United States Patent Application Publication US 2022/0211838 A1 - sequence listing, part 14

SEQ ID NO: 24796 - RNA, 4070 nt, Artificial Sequence
  SARS-CoV-2/Wuhan/WIV05/2019__EPI_ISL_402128 spike protein mRNA gc (1-1273)(K417N_E484K_N501Y_D614G)
aggagagucccgcagucggcguccagcggcucugcuuguucgugugugugucguugcaggccuuauucaagcuuaccauguucguguuccuggugcugcugccccuggugagcagccagugcgugaaccugaccacccggacccagcugcccccugccuacaccaacagcuucacccggggcguguacuaccccgacaagguguuccggagcagcgugcugcacagcacccaggaccuguuccugcccuucuucagcaacgugaccugguuccacgccauccacgugagcggcaccaacggcaccaagcgguucgacaacccagugcugcccuucaacgacggcguguacuucgccagcaccgagaagucaaacaucauccggggcuggaucuucggcaccacccuggacagcaagacacagagccugcugaucgugaacaacgccaccaacguggugaucaaggugugcgaguuucaguucugcaacgaccccuuccugggcguguacuaccacaagaacaacaagagcuggauggagagcgaguuccgggucuacagcagcgcuaacaauugcaccuucgaguacgugagccagcccuuccugauggaccucgagggcaagcagggcaacuucaagaaccugcgggaguucguguucaagaacaucgauggcuacuucaagaucuacagcaagcacacccccaucaaccuggugcgggaccugccccagggauucagcgcccuggagccucugguggaccugcccaucggcaucaacaucaccagguuccagacccugcuggcccugcaccggagcuaccugacccccggcgacagcagcagcggcuggaccgccggcgccgccgcauacuacgugggcuaccugcagccacggaccuuccugcugaaguacaacgagaacggcaccaucaccgacgccguggacugcgcccuggacccccugagcgagaccaagugcacccuaaagagcuucaccguggagaagggcaucuaccagaccagcaacuuccgggugcagcccacugagagcaucgugcgguuccccaacauuaccaaccugugucccuucggcgagguguucaacgccacccgguucgccagcguguacgccuggaaccggaagcggaucagcaacugcguggccgacuacagcgugcuguacaacagcgccagcuucagcaccuucaagugcuacggcgugagcccuaccaagcugaacgaccugugcuucaccaacguguacgcugacagcuucgugauccggggcgacgaggugcggcagaucgcccccggccagaccggcaacaucgccgacuacaacuacaagcugcccgacgacuucaccggcugcgugaucgccuggaacagcaacaaccuggacagcaaggugggcggcaacuacaacuaccuguaccggcuguuccguaagagcaaccugaagccauucgagcgggacaucagcaccgagaucuaccaggccggcagcacccccugcaacggugugaagggcuuuaacugcuacuucccccugcagagcuacggcuuccagcccaccuacggcgugggcuaccagcccuaccgggugguggugcugagcuucgagcugcugcacgcccccgccaccgugugcggcccuaaaaagagcaccaaccuggugaagaacaagugcgugaacuucaauuucaacggccugaccggcaccggcgugcugaccgagagcaacaagaaguuccugcccuuccagcaguucggccgggauaucgccgacaccaccgacgcagugcgggacccccagacccuggagauccuggacaucaccccaugcagcuucggcggcgugagcgucaucacccccggcacaaacaccagcaaccagguggccgugcuguaccagggagugaacugcaccgaggugcccguggccauccacgccgaccagcugacccccaccuggcggguguacagcaccggcagcaacguguuccagacccgggccggcugccugaucggcgccgagcacgugaacaacuccuacgagugcgacauccccaucggcgcuggcaucugcgccagcuaccagacccagaccaacagcccccggcgggcccggagcguggccagccagagcaucaucgccuacaccaugagcuuaggcgccgagaacagcguggccuacagcaacaacagcaucgcgaucccuaccaacuucaccaucagcgugaccaccgagauacugcccgugagcaugaccaagaccagcguggacuguaccauguacaucugcggcgacagcaccgagugcagcaaccugcugcugcaguacggcagcuucugcacccagcugaaccgggcccugaccggcaucgccguggagcaggacaagaacacccaagagguguucgcccaggugaagcagaucuacaagacucccccaaucaaggacuucggcggcuucaacuucagccagauccugcccgaccccagcaagcccagcaagcggagcuucaucgaggaccugcuguucaacaaggugacccuggccgacgccggcuucaucaagcaguacggcgacugccugggggauaucgccgcucgggaccugaucugcgcccagaaguucaacggccugaccgugcugcccccucugcugaccgacgagaugaucgcccaguacaccagcgcccugcuugccggcaccaucaccagcggcuggaccuucggcgccggcgcagcccugcagauccccuucgccaugcagauggccuaccgguucaacggcaucggcgugacccagaacgugcuguacgagaaccagaagcugaucgccaaccaguucaacagcgccaucggcaagauccaggacagccugagcagcaccgccagcgcccugggcaagcugcaggacguggugaaccagaacgcucaggcccugaacacccuggugaagcagcugagcagcaacuucggcgccaucagcucagugcugaaugacauccugagcaggcuggacaagguggaggccgaggugcagaucgaccggcugaucaccggccggcugcagagccugcagaccuacgugacccagcagcugauccgggccgccgagauccgggccagcgccaaccuggcagccaccaagaugagcgagugcgugcugggccagagcaagcggguggacuuuugcggcaagggcuaccaccugaugagcuucccccagagcgccccacacggcgugguguuccuccacgucacauacgugcccgcccaggagaagaacuucaccaccgcccccgccauuugccacgacggcaaggcucacuucccccgggagggaguguucgugagcaacggcacccacugguucgugacccagcggaacuucuacgagccccagaucaucaccaccgacaacaccuucgugagcggcaacugcgacguggugaucggcaucgugaacaacaccguguacgacccccugcagccugagcuggacagcuucaaggaggagcuggacaaguacuucaagaaccacaccagccccgacguggaucugggcgacaucagcggcaucaacgccagcguggugaacauccagaaggagaucgaccggcugaacgagguggccaagaaccugaacgagagccugaucgaccugcaggagcugggcaaguacgagcaguacaucaaguggcccugguacaucuggcugggcuucaucgccggccugaucgccaucgugauggugaccaucaugcugugcugcaugaccagcugcuguagcugccugaagggcugcugcagcugcggcagcugcugcaaguucgacgaggacgacagcgagccagugcugaagggcgugaagcugcacuacaccugaggacuagucccuguucccagagcccacuuuuuuuucuuuuuuugaaauaaaauagccugucuuucagaucuaaaaaaaaaaaaaaaaaaaaaaaaaaaaaaaaaaaaaaaaaaaaaaaaaaaaaaaaaaaaaaaaaaaaaaaaaaaaaaaaaaaaaaaaaaaaaaaaaaaa

SEQ ID NO: 24797 - RNA, 4061 nt, Artificial Sequence
  SARS-CoV-2/Wuhan/WIV05/2019__EPI_ISL_402128 spike protein mRNA gc (1-1273)(L18F_D80A_D215G_L242del_A243del_L244del_R246I_K417N_E484 K_N501Y_D614G_A701V)
aggagagucccgcagucggcguccagcggcucugcuuguucgugugugugucguugcaggccuuauucaagcuuaccauguucguguuccuggugcugcugccccuggugagcagccagugcgugaacuucaccacccggacccagcugcccccugccuacaccaacagcuucacccggggcguguacuaccccgacaagguguuccggagcagcgugcugcacagcacccaggaccuguuccugcccuucuucagcaacgugaccugguuccacgccauccacgugagcggcaccaacggcaccaagcgguucgccaacccagugcugcccuucaacgacggcguguacuucgccagcaccgagaagucaaacaucauccggggcuggaucuuuggcaccacccuggacagcaagacacagagccugcugaucgugaacaacgcuaccaacguggugaucaaggugugcgaguuccaguucugcaacgaccccuuccugggcguguacuaccacaagaacaacaagagcuggauggagagcgaguuccgggucuacagcagcgccaacaauugcaccuucgaguacgugagccagcccuuccugauggaccuggagggcaagcagggcaacuucaagaaccuccgggaguucguguucaagaacaucgacggcuacuucaagaucuacagcaagcacacccccaucaaccuggugcggggacugccccagggcuucagcgcccuggagccucugguggaucugcccaucggcaucaacaucaccagguuccagacccugcacaucagcuaccugacccccggcgacagcagcagcggcuggaccgccggcgccgccgcauacuacgugggcuaccugcagccacggaccuuccugcugaaguacaacgagaacggcaccaucaccgacgccguggacugcgcccuggacccccugagcgagaccaagugcacccuuaagagcuucaccguggagaagggcaucuaccagaccagcaacuuccgggugcagcccacugagagcauugugcgguuccccaacaucaccaaccugugucccuucggcgagguguucaacgccacccgguucgccagcguguacgccuggaaccggaagcggaucagcaacugcguggccgacuacagcgugcuguacaacagcgccagcuucagcaccuucaagugcuacggcgugagcccuaccaagcugaacgaccugugcuucaccaacguguacgcugacagcuucgugauccggggcgacgaggugcggcagaucgcccccggccagaccggcaacaucgccgacuacaacuacaagcugcccgacgacuucaccggcugcgugaucgccuggaacagcaacaaccuggacagcaaggugggcggcaacuacaacuaccuguaccggcuauuccguaagagcaaccugaagccauuugagcgggacaucagcaccgagaucuaccaggccgguagcacccccugcaacggcgugaagggcuucaacugcuacuucccccugcagagcuacggcuuccagcccaccuacggcgugggcuaccagcccuaccgggugguggugcugagcuucgagcugcugcacgcccccgccaccgugugcggcccuaaaaagagcaccaaccuggugaagaacaagugcgugaacuucaauuucaacggccugaccggcaccggcgugcugaccgagagcaacaagaaguuccugcccuuccagcaguucggccgggacaucgccgacaccaccgaugcagugcgggacccccagacccuggagauccuggacaucaccccaugcagcuucggcggcgugagcgucaucacccccggaacaaacaccagcaaccagguggccgugcuguaccagggcgugaacugcaccgaggugcccguggccauccacgccgaccagcugacccccaccuggcggguguacagcaccggcagcaacguguuccagacccgggccggcugccugaucggcgccgagcacgugaacaacuccuacgagugcgacauccccaucggcgcuggcaucugcgccagcuaccagacccagaccaacagcccccggcgggcccggagcguggccagccagagcaucaucgccuacaccaugagccugggcguggagaacagcguggccuacagcaacaacagcaucgccaucccuaccaacuucaccauaagcgugaccaccgagauccugcccgugagcaugaccaagaccagcguggacuguaccauguacaucugcggcgacagcaccgagugcagcaaccuguuacugcaguacggcagcuucugcacccagcugaaccgggcgcugaccggcaucgccguggagcaggacaagaacacccaagagguguucgcccaggugaagcagaucuacaagacucccccaaucaaggacuucggcggcuucaacuucagccagauccugcccgaccccagcaagcccagcaagcggagcuucaucgaggaccugcuguucaacaaggugacccuggccgacgccggcuucaucaagcaguacggggacugccugggcgacaucgccgcccgggaccugaucugcgcucagaaguucaacggccugaccgugcugcccccucugcugaccgaugagaugaucgcccaguacaccagcgcccugcuggccggcaccaucaccagcggcuggaccuucggcgccggcgccgcacugcagauccccuucgccaugcagauggccuaccgguucaacggcaucggcgugacccagaacgugcuguacgagaaccagaagcugaucgccaaccaguucaacagcgccaucggcaagauccaggacagccugagcagcaccgccagcgcccugggcaagcugcaggacguggugaaccagaacgcccaggcucugaacacccuggugaagcagcugagcagcaacuuuggcgccaucagcucagugcugaaugacauccugagccggcuggacaagguggaggccgaggugcagaucgacaggcugaucaccggccggcugcagagccugcagaccuacgugacccagcagcugauccgggccgccgagauucgggccagcgccaaccuggccgcaaccaagaugagcgagugcgugcugggccagagcaagcggguggacuucugcggcaagggcuaccaccugaugagcuucccccagagcgccccacacggcguggucuuccugcacgugacauacgugcccgcccaggagaagaacuucaccaccgcccccgccaucugccacgacggaaaggcccacuucccccgggagggcguguucgugagcaacggcacccacugguucgugacccagcggaacuucuacgagccccagaucaucaccaccgacaacaccuucgugagcggcaacugcgacguggugaucggcaucgugaacaacaccguguacgacccccugcagccugagcuggacagcuucaaggaggagcucgacaaguacuucaagaaccacaccagccccgacguggaccugggcgacaucagcggcaucaacgcuagcguggugaacauccagaaggagaucgaucggcugaacgagguggccaagaaccugaacgagagccugaucgaccugcaggagcugggcaaguacgagcaguacaucaaguggcccugguacaucuggcugggcuucaucgccggccugaucgccaucgugauggugaccaucaugcugugcugcaugaccagcugcuguagcugccugaagggcugcugcagcugcggcagcugcugcaaguucgacgaggacgacagcgagccagugcugaagggcgugaagcugcacuacaccugaggacuagucccuguucccagagcccacuuuuuuuucuuuuuuugaaauaaaauagccugucuuucagaucuaaaaaaaaaaaaaaaaaaaaaaaaaaaaaaaaaaaaaaaaaaaaaaaaaaaaaaaaaaaaaaaaaaaaaaaaaaaaaaaaaaaaaaaaaaaaaaaaaaaa

SEQ ID NO: 24798 - RNA, 4070 nt, Artificial Sequence
  SARS-CoV-2/Wuhan/WIV05/2019__EPI_ISL_402128 spike protein mRNA gc (1-1273)(E484K_D614G)
aggagagucccgcagucggcguccagcggcucugcuuguucgugugugugucguugcaggccuuauucaagcuuaccauguucguguuccuggugcugcugccccuggugagcagccagugcgugaaccugaccacccggacccagcugcccccugccuacaccaacagcuucacccggggcguguacuaccccgacaagguguuccggagcagcgugcugcacagcacccaggaccuguuccugcccuucuucagcaacgugaccugguuccacgccauccacgugagcggcaccaacggcaccaagcgguucgacaacccagugcugcccuucaacgacggcguguacuucgccagcaccgagaagucaaacaucauccggggcuggaucuucggcaccacccuggacagcaagacacagagccugcugaucgugaacaacgccaccaacguggugaucaaggugugcgaguuucaguucugcaacgaccccuuccugggcguguacuaccacaagaacaacaagagcuggauggagagcgaguuccgggucuacagcagcgcuaacaauugcaccuucgaguacgugagccagcccuuccugauggaccucgagggcaagcagggcaacuucaagaaccugcgggaguucguguucaagaacaucgauggcuacuucaagaucuacagcaagcacacccccaucaaccuggugcgggaccugccccagggauucagcgcccuggagccucugguggaccugcccaucggcaucaacaucaccagguuccagacccugcuggcccugcaccggagcuaccugacccccggcgacagcagcagcggcuggaccgccggcgccgccgcauacuacgugggcuaccugcagccacggaccuuccugcugaaguacaacgagaacggcaccaucaccgacgccguggacugcgcccuggacccccugagcgagaccaagugcacccuaaagagcuucaccguggagaagggcaucuaccagaccagcaacuuccgggugcagcccacugagagcaucgugcgguuccccaacauuaccaaccugugucccuucggcgagguguucaacgccacccgguucgccagcguguacgccuggaaccggaagcggaucagcaacugcguggccgacuacagcgugcuguacaacagcgccagcuucagcaccuucaagugcuacggcgugagcccuaccaagcugaacgaccugugcuucaccaacguguacgcugacagcuucgugauccggggcgacgaggugcggcagaucgcccccggccagaccggcaagaucgccgacuacaacuacaagcugcccgacgacuucaccggcugcgugaucgccuggaacagcaacaaccuggacagcaaggugggcggcaacuacaacuaccuguaccggcuguuccguaagagcaaccugaagccauucgagcgggacaucagcaccgagaucuaccaggccggcagcacccccugcaacggugugaagggcuuuaacugcuacuucccccugcagagcuacggcuuccagcccaccaacggcgugggcuaccagcccuaccgggugguggugcugagcuucgagcugcugcacgcccccgccaccgugugcggcccuaaaaagagcaccaaccuggugaagaacaagugcgugaacuucaauuucaacggccugaccggcaccggcgugcugaccgagagcaacaagaaguuccugcccuuccagcaguucggccgggauaucgccgacaccaccgacgcagugcgggacccccagacccuggagauccuggacaucaccccaugcagcuucggcggcgugagcgucaucacccccggcacaaacaccagcaaccagguggccgugcuguaccagggagugaacugcaccgaggugcccguggccauccacgccgaccagcugacccccaccuggcggguguacagcaccggcagcaacguguuccagacccgggccggcugccugaucggcgccgagcacgugaacaacuccuacgagugcgacauccccaucggcgcuggcaucugcgccagcuaccagacccagaccaacagcccccggcgggcccggagcguggccagccagagcaucaucgccuacaccaugagcuuaggcgccgagaacagcguggccuacagcaacaacagcaucgcgaucccuaccaacuucaccaucagcgugaccaccgagauacugcccgugagcaugaccaagaccagcguggacuguaccauguacaucugcggcgacagcaccgagugcagcaaccugcugcugcaguacggcagcuucugcacccagcugaaccgggcccugaccggcaucgccguggagcaggacaagaacacccaagagguguucgcccaggugaagcagaucuacaagacucccccaaucaaggacuucggcggcuucaacuucagccagauccugcccgaccccagcaagcccagcaagcggagcuucaucgaggaccugcuguucaacaaggugacccuggccgacgccggcuucaucaagcaguacggcgacugccugggggauaucgccgcucgggaccugaucugcgcccagaaguucaacggccugaccgugcugcccccucugcugaccgacgagaugaucgcccaguacaccagcgcccugcuugccggcaccaucaccagcggcuggaccuucggcgccggcgcagcccugcagauccccuucgccaugcagauggccuaccgguucaacggcaucggcgugacccagaacgugcuguacgagaaccagaagcugaucgccaaccaguucaacagcgccaucggcaagauccaggacagccugagcagcaccgccagcgcccugggcaagcugcaggacguggugaaccagaacgcucaggcccugaacacccuggugaagcagcugagcagcaacuucggcgccaucagcucagugcugaaugacauccugagcaggcuggacaagguggaggccgaggugcagaucgaccggcugaucaccggccggcugcagagccugcagaccuacgugacccagcagcugauccgggccgccgagauccgggccagcgccaaccuggcagccaccaagaugagcgagugcgugcugggccagagcaagcggguggacuuuugcggcaagggcuaccaccugaugagcuucccccagagcgccccacacggcgugguguuccuccacgucacauacgugcccgcccaggagaagaacuucaccaccgcccccgccauuugccacgacggcaaggcucacuucccccgggagggaguguucgugagcaacggcacccacugguucgugacccagcggaacuucuacgagccccagaucaucaccaccgacaacaccuucgugagcggcaacugcgacguggugaucggcaucgugaacaacaccguguacgacccccugcagccugagcuggacagcuucaaggaggagcuggacaaguacuucaagaaccacaccagccccgacguggaucugggcgacaucagcggcaucaacgccagcguggugaacauccagaaggagaucgaccggcugaacgagguggccaagaaccugaacgagagccugaucgaccugcaggagcugggcaaguacgagcaguacaucaaguggcccugguacaucuggcugggcuucaucgccggccugaucgccaucgugauggugaccaucaugcugugcugcaugaccagcugcuguagcugccugaagggcugcugcagcugcggcagcugcugcaaguucgacgaggacgacagcgagccagugcugaagggcgugaagcugcacuacaccugaggacuagucccuguucccagagcccacuuuuuuuucuuuuuuugaaauaaaauagccugucuuucagaucuaaaaaaaaaaaaaaaaaaaaaaaaaaaaaaaaaaaaaaaaaaaaaaaaaaaaaaaaaaaaaaaaaaaaaaaaaaaaaaaaaaaaaaaaaaaaaaaaaaaa

SEQ ID NO: 24799 - RNA, 4070 nt, Artificial Sequence
  SARS-CoV-2/Wuhan/WIV05/2019__EPI_ISL_402128 spike protein mRNA gc (1-1273)(L18F_T20N_P26S_D138Y_R190S_K417T_E484K_N501Y_D614G_H655Y _T1027I)
aggagagucccgcagucggcguccagcggcucugcuuguucgugugugugucguugcaggccuuauucaagcuuaccauguucguguuccuggugcugcugccccuggugagcagccagugcgugaacuucaccaaccggacccagcugcccagcgccuacaccaacagcuucacccggggcguguacuacccugacaagguguuccggagcagcgugcugcacagcacccaggaccuguuccugcccuucuucagcaacgugaccugguuccacgccauccacgugagcggcaccaacggcaccaagcgguucgacaaccccgugcugccauucaacgacggcguguacuucgccagcaccgagaagucaaacaucauccggggcuggaucuuuggcaccacccuggacagcaagacccagagccugcugaucgugaacaacgccacaaacguggugaucaaggugugcgaguuccaguucugcaacuaccccuuccugggcguguacuaccacaagaacaacaagagcuggauggagagcgaguuccgggucuacagcagcgcuaauaacugcaccuucgaguacgugagccagcccuuccugauggaccuggagggcaagcagggcaacuucaagaaccucagcgaguucguguucaagaacaucgacggcuacuucaagaucuacagcaagcacacccccaucaaccuggugcgggaucugccccagggauucagcgcccuggagccccugguggaccugccuaucggcaucaacaucacccgguuccagacccugcuggcccugcacaggagcuaccugacccccggcgacagcagcagcggcuggaccgccggcgccgccgcauacuacgugggcuaccugcagccccggaccuuccugcugaaguacaacgagaacggcaccaucaccgacgccguggacugcgcccuggacccacugagcgagaccaagugcacccuaaagagcuucaccguggagaagggcaucuaccagaccagcaacuuccgggugcagcccaccgagagcaucgugcgguuccccaacauuacuaaccugugucccuucggcgagguguucaacgccacccgguucgccagcguguacgccuggaaccggaagcggaucagcaacugcguggccgacuacagcgugcuguacaacagcgccagcuucagcaccuucaagugcuacggcgugagccccaccaagcugaacgaccugugcuucaccaacguguacgcugacagcuucgugauccggggcgacgaggugcggcagaucgccccuggccagaccggcaccaucgccgacuacaacuacaagcugcccgacgacuucaccggcugcgugaucgccuggaacagcaacaaccuggacagcaaggugggcggcaacuacaacuaccuguaccggcuguuccguaagagcaaccugaagcccuuugagcgggacaucagcaccgagaucuaccaggccggcagcaccccaugcaacggugugaagggcuucaacugcuacuucccccugcagagcuacggcuuccagcccaccuacggcgugggcuaccagcccuaccgggugguggugcugagcuucgagcugcugcacgcccccgccaccgugugcggccccaaaaagagcaccaaccuggugaagaacaagugcgugaacuucaauuucaacggccugaccggcaccggcgugcugaccgagagcaacaagaaguuccugccuuuccagcaguucggccgggacaucgccgauaccaccgacgcagugcgggacccccagacccuggagauccuggacaucacccccugcagcuucggcggcgugagcgucaucaccccaggcacaaacaccagcaaccagguggccgugcuguaccagggagugaacugcaccgaggugcccguggccauccacgccgaccagcugacccccaccuggcggguguacuccaccggcagcaacguguuccagacccgggccggcugccugaucggcgccgaguacgugaacaacagcuacgagugcgacauccccaucggcgcuggcaucugcgccagcuaccagacccagaccaacagcccccggcgggcccggagcguggccagccagagcaucaucgccuacaccaugagccugggcgccgagaacagcguggccuacagcaacaacagcaucgcgauccccaccaacuucaccaucagcgugaccaccgagauauuaccugugagcaugaccaagaccagcguggacuguaccauguacaucugcggcgacagcaccgagugcagcaaccugcugcugcaguacggcagcuucugcacccagcugaaccgggcccugaccggcaucgccguggagcaggacaagaacacccaagagguguucgcccaggugaagcagaucuacaagacuccacccaucaaggacuucggcggcuucaacuucagccagauccugcccgaccccagcaagcccagcaagcggagcuucaucgaggaccugcuguucaacaaggugacccuggccgacgccggcuucaucaagcaguacggcgacugccugggggacaucgccgcucgggaucugaucugcgcccagaaguucaacggccugaccgugcugccuccccugcugaccgacgagaugaucgcccaguacaccagcgcccugcuggccggcaccaucaccagcggcuggaccuucggcgccggcgcagcccuucagauccccuucgccaugcagauggccuaccgguucaacggcaucggcgugacccagaacgugcuguacgagaaccagaagcugaucgccaaccaguucaacagcgccaucggcaagauccaggacagccugagcagcaccgccagcgcccugggcaagcugcaggacguggugaaccagaacgcucaggcccugaacacccuggugaagcagcugagcucaaacuuuggcgccaucagcagcgugcugaaugacauccugagccggcuggacaagguggaggccgaggugcagaucgacaggcugaucaccggccggcugcagagccugcagaccuacgugacccagcagcugauccgggccgccgagauccgggccagcgccaaccuggcagccauuaagaugagcgagugcgugcugggccagagcaagcggguggacuucugcggcaagggcuaccaccugaugagcuucccccagagcgcuccccacggcgugguguuccugcacgucaccuacgugccagcccaggagaagaacuucacaaccgcccccgccaucugccacgacggcaaggcccacuucccccgggagggaguguucgugagcaacggcacccacugguucgugacccagcggaacuucuacgagccccagaucaucaccaccgacaacaccuucgugagcggcaacugcgacguggugaucggcaucgugaacaacaccguguacgacccccuccagcccgagcuggacagcuucaaggaggagcuggacaaguacuucaagaaccacaccagcccugacguggaccugggcgauaucagcggcaucaacgccagcguggugaacauccagaaggagaucgaccggcugaacgagguggccaagaaccugaacgagagccugaucgaccugcaggagcugggcaaguacgagcaguacaucaaguggcccugguacaucuggcugggcuucaucgccggccugaucgccaucgugauggugaccaucaugcugugcugcaugaccagcugcuguagcugccugaagggcugcugcagcugcggcagcugcugcaaguucgacgaggacgacagcgagcccgugcugaagggcgugaagcugcacuacaccugaggacuagucccuguucccagagcccacuuuuuuuucuuuuuuugaaauaaaauagccugucuuucagaucuaaaaaaaaaaaaaaaaaaaaaaaaaaaaaaaaaaaaaaaaaaaaaaaaaaaaaaaaaaaaaaaaaaaaaaaaaaaaaaaaaaaaaaaaaaaaaaaaaaaa

SEQ ID NO: 24800 - RNA, 4070 nt, Artificial Sequence
  SARS-CoV-2/Wuhan/WIV05/2019__EPI_ISL_402128 spike protein mRNA gc (1-1273)(S13I_W152C_L452R_D614G)
aggagagucccgcagucggcguccagcggcucugcuuguucgugugugugucguugcaggccuuauucaagcuuaccauguucguguuccuggugcugcugccccuggugagcauccagugcgugaaccugaccacccggacccagcugcccccugccuacaccaacagcuucacccggggcguguacuaccccgacaagguguuccggagcagcgugcugcacagcacccaggaccuguuccugcccuucuucagcaacgugaccugguuccacgccauccacgugagcggcaccaacggcaccaagcgguucgacaacccagugcugcccuucaacgacggcguguacuucgccagcaccgagaagucaaacaucauccggggcuggaucuucggcaccacccuggacagcaagacacagagccugcugaucgugaacaacgccaccaacguggugaucaaggugugcgaguuucaguucugcaacgaccccuuccugggcguguacuaccacaagaacaacaagagcugcauggagagcgaguuccgggucuacagcagcgcuaacaauugcaccuucgaguacgugagccagcccuuccugauggaccucgagggcaagcagggcaacuucaagaaccugcgggaguucguguucaagaacaucgauggcuacuucaagaucuacagcaagcacacccccaucaaccuggugcgggaccugccccagggauucagcgcccuggagccucugguggaccugcccaucggcaucaacaucaccagguuccagacccugcuggcccugcaccggagcuaccugacccccggcgacagcagcagcggcuggaccgccggcgccgccgcauacuacgugggcuaccugcagccacggaccuuccugcugaaguacaacgagaacggcaccaucaccgacgccguggacugcgcccuggacccccugagcgagaccaaguguacccuaaagagcuucaccguggagaagggcaucuaccagaccagcaacuuccgggugcagcccacugagagcauugugcgguuccccaacaucaccaaccugugccccuucggcgagguguucaacgccacccgguucgccagcguguacgccuggaaccggaagcggaucagcaacugcguggccgacuacagcgugcuguacaacagcgccagcuucagcaccuucaagugcuacggcgugagcccuaccaagcugaacgaccugugcuucaccaacguguacgcugacagcuucgugauccggggcgacgaggugcggcagaucgcccccggccagaccggcaagaucgccgacuacaacuacaagcugcccgacgacuucaccggcugcgugaucgccuggaacagcaacaaccuggacagcaaggugggcggcaacuacaacuaccgguaccggcuguuccguaagagcaaccugaagccauucgagcgggacaucagcaccgagaucuaccaggccggcagcacccccugcaacgguguggagggcuuuaacugcuacuucccccugcagagcuacggcuuccagcccaccaacggcgugggcuaccagcccuaccgggugguggugcugagcuucgagcugcugcacgcccccgccaccgugugcggcccuaaaaagagcaccaaccuggugaagaacaagugcgugaacuucaauuucaacggccugaccggcaccggcgugcugaccgagagcaacaagaaguuccugcccuuccagcaguucggccgggauaucgccgacaccaccgacgcagugcgggacccccagacccuggagauccuggacaucaccccaugcagcuucggcggcgugagcgucaucacccccggcacaaacaccagcaaccagguggccgugcuguaccagggagugaacugcaccgaggugcccguggccauccacgccgaccagcugacccccaccuggcggguguacagcaccggcagcaacguguuccagacccgggccggcugccugaucggcgccgagcacgugaacaacagcuacgagugcgacauccccaucggcgcuggcaucugugccuccuaccagacccagaccaacagcccccggcgggcccggagcguggccagccagagcaucaucgccuacaccaugagccugggcgccgagaacagcguggccuacagcaacaacagcaucgcgaucccuaccaacuucaccauaagcgugaccaccgagaucuuacccgugagcaugaccaagaccagcguggacugcaccauguacaucugcggcgacagcaccgagugcagcaaccugcugcugcaguacggcagcuucugcacccagcugaaccgggcccugaccggcaucgccguggagcaggacaagaacacccaagagguguucgcccaggugaagcagaucuacaagacucccccaaucaaggacuucggcggcuucaacuucagccagauccugcccgaccccagcaagcccagcaagcggagcuucaucgaggaccugcuguucaacaaggugacccuggccgacgccggcuucaucaagcaguacggcgacugccugggggauaucgccgcucgggaccugaucugcgcccagaaguucaacggccugaccgugcugcccccucugcugaccgacgagaugaucgcccaguacaccagcgcccugcuggccggcaccaucaccagcggcuggaccuucggcgccggcgcagcccuucagauccccuucgccaugcagauggccuacagguucaacggcaucggcgugacccagaacgugcuguacgagaaccagaagcugaucgccaaccaguucaacagcgccaucggcaagauccaggacagccugagcagcaccgccagcgcccugggcaagcugcaggacguggugaaccagaacgcucaggcccugaacacccuggugaagcagcugagcagcaacuucggcgccaucagcagcgugcugaaugacauccugucacggcuggacaagguggaggccgaggugcagaucgaccggcugaucaccggccggcugcagagccugcagaccuacgugacccagcagcugauccgggccgccgagauucgggccagcgccaaccuggcagccaccaagaugagcgagugcgugcugggccagagcaagcggguggacuuuugcggcaagggcuaccaccugaugagcuucccccagagcgccccacacggcgugguguuccugcacgucacauacgugcccgcccaggagaagaacuucaccaccgcccccgccaucugccacgacggcaaggcucacuucccccgggagggaguguucgugagcaacggcacccacugguucgugacccagcggaacuucuacgagccccagaucaucaccaccgacaacaccuucgugagcggcaacugcgacguggugaucggcaucgugaacaacaccguguacgacccccuccagccugagcuggacagcuucaaggaggagcuggacaaguacuucaagaaccacaccagccccgacguggaucugggcgacaucagcggcaucaacgccagcguggugaacauccagaaggagaucgaccggcugaacgagguggccaagaaccugaacgagagccugaucgaccugcaggagcugggcaaguacgagcaguacaucaaguggcccugguacaucuggcugggcuucaucgccggccugaucgccaucgugauggugaccaucaugcugugcugcaugaccagcuguugcagcugccugaagggcugcugcagcugcggcagcugcugcaaguucgacgaggacgacagcgagccagugcugaagggcgugaagcugcacuacaccugaggacuagucccuguucccagagcccacuuuuuuuucuuuuuuugaaauaaaauagccugucuuucagaucuaaaaaaaaaaaaaaaaaaaaaaaaaaaaaaaaaaaaaaaaaaaaaaaaaaaaaaaaaaaaaaaaaaaaaaaaaaaaaaaaaaaaaaaaaaaaaaaaaaaa

SEQ ID NO: 24801 - RNA, 4070 nt, Artificial Sequence
  SARS-CoV-2/Wuhan/WIV05/2019__EPI_ISL_402128 spike protein mRNA gc mod (1-1273)
aggagagucccgcagucggcguccagcggcucugcuuguucgugugugugucguugcaggccuuauucaagcuuaccauguucguguuucuggugcugcugccccugguguccagccagugugugaaccugaccaccagaacacagcugccuccagccuacaccaacagcuucaccagaggcguguacuaccccgacaagguguucagauccagcgugcugcacucuacccaggaccuguuccugccuuucuucagcaacgugaccugguuccacgccauccacguguccggcaccaauggcaccaagagauucgacaaccccgugcugcccuucaacgacgggguguacuuugccagcaccgagaaguccaacaucaucagaggcuggaucuucggcaccacacuggacagcaagacccagagccugcugaucgugaacaacgccaccaacguggucaucaaagugugcgaguuccaguucugcaacgaccccuuccugggcgucuacuaccacaagaacaacaagagcuggauggaaagcgaguuccggguguacagcagcgccaacaacugcaccuucgaguacgugucccagccuuuccugauggaccuggaaggcaagcagggcaacuucaagaaccugcgcgaguucguguucaagaacaucgacggcuacuucaaaaucuacagcaagcacaccccuaucaaccucgugcgggaucugccucagggcuucucugcucuggaaccccugguggaucugcccaucggcaucaacaucacccgguuucagacacugcuggcccugcacagaagcuaccugacaccuggcgauagcagcagcggauggacagcuggugccgccgcuuacuaugugggcuaccugcagccuagaaccuuccugcugaaguacaacgagaacggcaccaucaccgacgccguggauugugcucuggauccucugagcgagacaaagugcacccugaaguccuucaccguggaaaagggcaucuaccagaccagcaacuuccgggugcagcccaccgaauccaucgugcgguuccccaauaucaccaaucugugccccuucggcgagguguucaaugccaccagauucgccucuguguacgccuggaaccggaagcggaucagcaauugcguggccgacuacuccgugcuguacaacuccgccagcuucagcaccuucaagugcuacggcguguccccuaccaagcugaacgaccugugcuucacaaacguguacgccgacagcuucgugauccggggagaugaagugcggcagauugccccuggacagacaggcaagaucgccgacuacaacuacaagcugcccgacgacuucaccggcugugugauugccuggaacagcaacaaccuggacuccaaagucggcggcaacuacaauuaccuguaccggcuguuccggaaguccaaucugaagcccuucgagcgggacaucagcaccgaaaucuaucaggccggcagcaccccuugcaacggcguggaaggcuucaacugcuacuucccacugcaguccuacggcuuucagcccacaaauggcgugggcuaucagcccuacagagugguggugcugagcuucgaacugcugcaugcuccugccacagugugcggcccuaagaaaagcaccaaucucgugaagaacaaaugcgugaacuucaacuucaacggccugaccggcaccggcgugcugacagagagcaacaagaaguuccugccauuccagcaguuuggccgggauaucgccgauaccacagacgccguuagagauccccagacacuggaaauccuggacaucaccccaugcagcuucggcggagugucugugaucaccccuggcaccaacaccagcaaucagguggcagugcuguaccaggacgugaacuguaccgaagugcccguggccauucacgccgaucagcugacaccuacauggcggguguacuccaccggcagcaauguguuucagaccagagccggcugucugaucggagccgagcacgugaacaauagcuacgagugcgacauccccaucggcgcuggcaucugugccagcuaccagacacagacaaacagccccagacgggcuagaagcguggccagccagagcaucauugccuacacaaugucucugggcgccgagaacagcguggccuacuccaacaacucuaucgcuauccccaccaacuucaccaucagcgugaccaccgagauccugccuguguccaugaccaagaccagcguggacugcaccauguacaucugcggcgauuccaccgagugcuccaaccugcugcugcaguacggcagcuucugcacccagcugaauagagcccugacagggaucgccguggaacaggacaagaacacccaagagguguucgcccaagugaagcaaaucuacaagaccccuccuaucaaggacuucggcggcuucaauuucagccagauucugcccgauccuagcaagcccagcaagcggagcuucaucgaggaccugcuguucaacaaagugacacuggccgacgccggcuucaucaagcaguauggcgauugucugggcgacauugccgccagggaucugauuugcgcccagaaguuuaacggacugacagugcugccuccucugcugaccgaugagaugaucgcccaguacacaucugcccugcuggccggcacaaucacaagcggcuggacauuuggagcuggcgccgcucugcagauccccuuugcuaugcagauggccuaccgguucaacggcaucggagugacccagaaugugcuguacgagaaccagaagcugaucgccaaccaguucaacagcgccaucggcaagauccaggacagccugagcagcacagcaagcgcccugggaaagcugcaggacguggucaaccagaaugcccaggcacugaacacccuggucaagcagcuguccuccaacuucggcgccaucagcucugugcugaacgauauccugagcagacuggacaaggucgaggccgaggugcagaucgacagacugaucacaggcagacugcagagccuccagacauacgugacccagcagcugaucagagccgccgagauuagagccucugccaaucuggccgccaccaagaugucugagugugugcugggccagagcaagagaguggacuuuugcggcaagggcuaccaccugaugagcuucccucagucugccccucacggcgugguguuucugcacgugacauaugugcccgcucaagagaagaauuucaccaccgcuccagccaucugccacgacggcaaagcccacuuuccuagagaaggcguguucguguccaacggcacccauugguucgugacacagcggaacuucuacgagccccagaucaucaccaccgacaacaccuucgugucuggcaacugcgacguugugaucggcauugugaacaauaccguguacgacccucugcagcccgagcuggacagcuucaaagaggaacuggacaaguacuuuaagaaccacacaagccccgacguggaccugggcgauaucagcggaaucaaugccagcgucgugaacauccagaaagagaucgaccggcugaacgagguggccaagaaucugaacgagagccugaucgaccugcaagaacuggggaaguacgagcaguacaucaaguggcccugguacaucuggcugggcuuuaucgccggacugauugccaucgugauggucacaaucaugcuguguugcaugaccagcugcuguagcugccugaagggcuguuguagcuguggcagcugcugcaaguucgacgaggacgauucugagcccgugcugaagggcgugaaacugcacuacaccugaggacuagucccuguucccagagcccacuuuuuuuucuuuuuuugaaauaaaauagccugucuuucagaucuaaaaaaaaaaaaaaaaaaaaaaaaaaaaaaaaaaaaaaaaaaaaaaaaaaaaaaaaaaaaaaaaaaaaaaaaaaaaaaaaaaaaaaaaaaaaaaaaaaaa

SEQ ID NO: 24802 - RNA, 4070 nt, Artificial Sequence
  SARS-CoV-2/Wuhan/WIV05/2019__EPI_ISL_402128 spike protein mRNA gc mod (1-1273)(D614G)
aggagagucccgcagucggcguccagcggcucugcuuguucgugugugugucguugcaggccuuauucaagcuuaccauguucguguuucuggugcugcugccccugguguccagccagugugugaaccugaccaccagaacacagcugccuccagccuacaccaacagcuucaccagaggcguguacuaccccgacaagguguucagauccagcgugcugcacucuacccaggaccuguuccugccuuucuucagcaacgugaccugguuccacgccauccacguguccggcaccaauggcaccaagagauucgacaaccccgugcugcccuucaacgacgggguguacuuugccagcaccgagaaguccaacaucaucagaggcuggaucuucggcaccacacuggacagcaagacccagagccugcugaucgugaacaacgccaccaacguggucaucaaagugugcgaguuccaguucugcaacgaccccuuccugggcgucuacuaccacaagaacaacaagagcuggauggaaagcgaguuccggguguacagcagcgccaacaacugcaccuucgaguacgugucccagccuuuccugauggaccuggaaggcaagcagggcaacuucaagaaccugcgcgaguucguguucaagaacaucgacggcuacuucaaaaucuacagcaagcacaccccuaucaaccucgugcgggaucugccucagggcuucucugcucuggaaccccugguggaucugcccaucggcaucaacaucacccgguuucagacacugcuggcccugcacagaagcuaccugacaccuggcgauagcagcagcggauggacagcuggugccgccgcuuacuaugugggcuaccugcagccuagaaccuuccugcugaaguacaacgagaacggcaccaucaccgacgccguggauugugcucuggauccucugagcgagacaaagugcacccugaaguccuucaccguggaaaagggcaucuaccagaccagcaacuuccgggugcagcccaccgaauccaucgugcgguuccccaauaucaccaaucugugccccuucggcgagguguucaaugccaccagauucgccucuguguacgccuggaaccggaagcggaucagcaauugcguggccgacuacuccgugcuguacaacuccgccagcuucagcaccuucaagugcuacggcguguccccuaccaagcugaacgaccugugcuucacaaacguguacgccgacagcuucgugauccggggagaugaagugcggcagauugccccuggacagacaggcaagaucgccgacuacaacuacaagcugcccgacgacuucaccggcugugugauugccuggaacagcaacaaccuggacuccaaagucggcggcaacuacaauuaccuguaccggcuguuccggaaguccaaucugaagcccuucgagcgggacaucagcaccgaaaucuaucaggccggcagcaccccuugcaacggcguggaaggcuucaacugcuacuucccacugcaguccuacggcuuucagcccacaaauggcgugggcuaucagcccuacagagugguggugcugagcuucgaacugcugcaugcuccugccacagugugcggcccuaagaaaagcaccaaucucgugaagaacaaaugcgugaacuucaacuucaacggccugaccggcaccggcgugcugacagagagcaacaagaaguuccugccauuccagcaguuuggccgggauaucgccgauaccacagacgccguuagagauccccagacacuggaaauccuggacaucaccccaugcagcuucggcggagugucugugaucaccccuggcaccaacaccagcaaucagguggcagugcuguaccagggcgugaacuguaccgaagugcccguggccauucacgccgaucagcugacaccuacauggcggguguacuccaccggcagcaauguguuucagaccagagccggcugucugaucggagccgagcacgugaacaauagcuacgagugcgacauccccaucggcgcuggcaucugugccagcuaccagacacagacaaacagccccagacgggcuagaagcguggccagccagagcaucauugccuacacaaugucucugggcgccgagaacagcguggccuacuccaacaacucuaucgcuauccccaccaacuucaccaucagcgugaccaccgagauccugccuguguccaugaccaagaccagcguggacugcaccauguacaucugcggcgauuccaccgagugcuccaaccugcugcugcaguacggcagcuucugcacccagcugaauagagcccugacagggaucgccguggaacaggacaagaacacccaagagguguucgcccaagugaagcaaaucuacaagaccccuccuaucaaggacuucggcggcuucaauuucagccagauucugcccgauccuagcaagcccagcaagcggagcuucaucgaggaccugcuguucaacaaagugacacuggccgacgccggcuucaucaagcaguauggcgauugucugggcgacauugccgccagggaucugauuugcgcccagaaguuuaacggacugacagugcugccuccucugcugaccgaugagaugaucgcccaguacacaucugcccugcuggccggcacaaucacaagcggcuggacauuuggagcuggcgccgcucugcagauccccuuugcuaugcagauggccuaccgguucaacggcaucggagugacccagaaugugcuguacgagaaccagaagcugaucgccaaccaguucaacagcgccaucggcaagauccaggacagccugagcagcacagcaagcgcccugggaaagcugcaggacguggucaaccagaaugcccaggcacugaacacccuggucaagcagcuguccuccaacuucggcgccaucagcucugugcugaacgauauccugagcagacuggacaaggucgaggccgaggugcagaucgacagacugaucacaggcagacugcagagccuccagacauacgugacccagcagcugaucagagccgccgagauuagagccucugccaaucuggccgccaccaagaugucugagugugugcugggccagagcaagagaguggacuuuugcggcaagggcuaccaccugaugagcuucccucagucugccccucacggcgugguguuucugcacgugacauaugugcccgcucaagagaagaauuucaccaccgcuccagccaucugccacgacggcaaagcccacuuuccuagagaaggcguguucguguccaacggcacccauugguucgugacacagcggaacuucuacgagccccagaucaucaccaccgacaacaccuucgugucuggcaacugcgacguugugaucggcauugugaacaauaccguguacgacccucugcagcccgagcuggacagcuucaaagaggaacuggacaaguacuuuaagaaccacacaagccccgacguggaccugggcgauaucagcggaaucaaugccagcgucgugaacauccagaaagagaucgaccggcugaacgagguggccaagaaucugaacgagagccugaucgaccugcaagaacuggggaaguacgagcaguacaucaaguggcccugguacaucuggcugggcuuuaucgccggacugauugccaucgugauggucacaaucaugcuguguugcaugaccagcugcuguagcugccugaagggcuguuguagcuguggcagcugcugcaaguucgacgaggacgauucugagcccgugcugaagggcgugaaacugcacuacaccugaggacuagucccuguucccagagcccacuuuuuuuucuuuuuuugaaauaaaauagccugucuuucagaucuaaaaaaaaaaaaaaaaaaaaaaaaaaaaaaaaaaaaaaaaaaaaaaaaaaaaaaaaaaaaaaaaaaaaaaaaaaaaaaaaaaaaaaaaaaaaaaaaaaaa

SEQ ID NO: 24803 - RNA, 4070 nt, Artificial Sequence
  SARS-CoV-2/Wuhan/WIV05/2019__EPI_ISL_402128 spike protein mRNA gc mod (1-1273)(A222V_D614G)
aggagagucccgcagucggcguccagcggcucugcuuguucgugugugugucguugcaggccuuauucaagcuuaccauguucguguuucuggugcugcugccccugguguccagccagugugugaaccugaccaccagaacacagcugccuccagccuacaccaacagcuucaccagaggcguguacuaccccgacaagguguucagauccagcgugcugcacucuacccaggaccuguuccugccuuucuucagcaacgugaccugguuccacgccauccacguguccggcaccaauggcaccaagagauucgacaaccccgugcugcccuucaacgacgggguguacuuugccagcaccgagaaguccaacaucaucagaggcuggaucuucggcaccacacuggacagcaagacccagagccugcugaucgugaacaacgccaccaacguggucaucaaagugugcgaguuccaguucugcaacgaccccuuccugggcgucuacuaccacaagaacaacaagagcuggauggaaagcgaguuccggguguacagcagcgccaacaacugcaccuucgaguacgugucccagccuuuccugauggaccuggaaggcaagcagggcaacuucaagaaccugcgcgaguucguguucaagaacaucgacggcuacuucaaaaucuacagcaagcacaccccuaucaaccucgugcgggaucugccucagggcuucucugugcuggaaccccugguggaucugcccaucggcaucaacaucacccgguuucagacacugcuggcccugcacagaagcuaccugacaccuggcgauagcagcagcggauggacagcuggugccgccgcuuacuaugugggcuaccugcagccuagaaccuuccugcugaaguacaacgagaacggcaccaucaccgacgccguggauugugcucuggauccucugagcgagacaaagugcacccugaaguccuucaccguggaaaagggcaucuaccagaccagcaacuuccgggugcagcccaccgaauccaucgugcgguuccccaauaucaccaaucugugccccuucggcgagguguucaaugccaccagauucgccucuguguacgccuggaaccggaagcggaucagcaauugcguggccgacuacuccgugcuguacaacuccgccagcuucagcaccuucaagugcuacggcguguccccuaccaagcugaacgaccugugcuucacaaacguguacgccgacagcuucgugauccggggagaugaagugcggcagauugccccuggacagacaggcaagaucgccgacuacaacuacaagcugcccgacgacuucaccggcugugugauugccuggaacagcaacaaccuggacuccaaagucggcggcaacuacaauuaccuguaccggcuguuccggaaguccaaucugaagcccuucgagcgggacaucagcaccgaaaucuaucaggccggcagcaccccuugcaacggcguggaaggcuucaacugcuacuucccacugcaguccuacggcuuucagcccacaaauggcgugggcuaucagcccuacagagugguggugcugagcuucgaacugcugcaugcuccugccacagugugcggcccuaagaaaagcaccaaucucgugaagaacaaaugcgugaacuucaacuucaacggccugaccggcaccggcgugcugacagagagcaacaagaaguuccugccauuccagcaguuuggccgggauaucgccgauaccacagacgccguuagagauccccagacacuggaaauccuggacaucaccccaugcagcuucggcggagugucugugaucaccccuggcaccaacaccagcaaucagguggcagugcuguaccagggcgugaacuguaccgaagugcccguggccauucacgccgaucagcugacaccuacauggcggguguacuccaccggcagcaauguguuucagaccagagccggcugucugaucggagccgagcacgugaacaauagcuacgagugcgacauccccaucggcgcuggcaucugugccagcuaccagacacagacaaacagccccagacgggcuagaagcguggccagccagagcaucauugccuacacaaugucucugggcgccgagaacagcguggccuacuccaacaacucuaucgcuauccccaccaacuucaccaucagcgugaccaccgagauccugccuguguccaugaccaagaccagcguggacugcaccauguacaucugcggcgauuccaccgagugcuccaaccugcugcugcaguacggcagcuucugcacccagcugaauagagcccugacagggaucgccguggaacaggacaagaacacccaagagguguucgcccaagugaagcaaaucuacaagaccccuccuaucaaggacuucggcggcuucaauuucagccagauucugcccgauccuagcaagcccagcaagcggagcuucaucgaggaccugcuguucaacaaagugacacuggccgacgccggcuucaucaagcaguauggcgauugucugggcgacauugccgccagggaucugauuugcgcccagaaguuuaacggacugacagugcugccuccucugcugaccgaugagaugaucgcccaguacacaucugcccugcuggccggcacaaucacaagcggcuggacauuuggagcuggcgccgcucugcagauccccuuugcuaugcagauggccuaccgguucaacggcaucggagugacccagaaugugcuguacgagaaccagaagcugaucgccaaccaguucaacagcgccaucggcaagauccaggacagccugagcagcacagcaagcgcccugggaaagcugcaggacguggucaaccagaaugcccaggcacugaacacccuggucaagcagcuguccuccaacuucggcgccaucagcucugugcugaacgauauccugagcagacuggacaaggucgaggccgaggugcagaucgacagacugaucacaggcagacugcagagccuccagacauacgugacccagcagcugaucagagccgccgagauuagagccucugccaaucuggccgccaccaagaugucugagugugugcugggccagagcaagagaguggacuuuugcggcaagggcuaccaccugaugagcuucccucagucugccccucacggcgugguguuucugcacgugacauaugugcccgcucaagagaagaauuucaccaccgcuccagccaucugccacgacggcaaagcccacuuuccuagagaaggcguguucguguccaacggcacccauugguucgugacacagcggaacuucuacgagccccagaucaucaccaccgacaacaccuucgugucuggcaacugcgacguugugaucggcauugugaacaauaccguguacgacccucugcagcccgagcuggacagcuucaaagaggaacuggacaaguacuuuaagaaccacacaagccccgacguggaccugggcgauaucagcggaaucaaugccagcgucgugaacauccagaaagagaucgaccggcugaacgagguggccaagaaucugaacgagagccugaucgaccugcaagaacuggggaaguacgagcaguacaucaaguggcccugguacaucuggcugggcuuuaucgccggacugauugccaucgugauggucacaaucaugcuguguugcaugaccagcugcuguagcugccugaagggcuguuguagcuguggcagcugcugcaaguucgacgaggacgauucugagcccgugcugaagggcgugaaacugcacuacaccugaggacuagucccuguucccagagcccacuuuuuuuucuuuuuuugaaauaaaauagccugucuuucagaucuaaaaaaaaaaaaaaaaaaaaaaaaaaaaaaaaaaaaaaaaaaaaaaaaaaaaaaaaaaaaaaaaaaaaaaaaaaaaaaaaaaaaaaaaaaaaaaaaaaaa

SEQ ID NO: 24804 - RNA, 4070 nt, Artificial Sequence
  SARS-CoV-2/Wuhan/WIV05/2019__EPI_ISL_402128 spike protein mRNA gc mod (1-1273)(N439K_D614G)
aggagagucccgcagucggcguccagcggcucugcuuguucgugugugugucguugcaggccuuauucaagcuuaccauguucguguuucuggugcugcugccccugguguccagccagugugugaaccugaccaccagaacacagcugccuccagccuacaccaacagcuucaccagaggcguguacuaccccgacaagguguucagauccagcgugcugcacucuacccaggaccuguuccugccuuucuucagcaacgugaccugguuccacgccauccacguguccggcaccaauggcaccaagagauucgacaaccccgugcugcccuucaacgacgggguguacuuugccagcaccgagaaguccaacaucaucagaggcuggaucuucggcaccacacuggacagcaagacccagagccugcugaucgugaacaacgccaccaacguggucaucaaagugugcgaguuccaguucugcaacgaccccuuccugggcgucuacuaccacaagaacaacaagagcuggauggaaagcgaguuccggguguacagcagcgccaacaacugcaccuucgaguacgugucccagccuuuccugauggaccuggaaggcaagcagggcaacuucaagaaccugcgcgaguucguguucaagaacaucgacggcuacuucaaaaucuacagcaagcacaccccuaucaaccucgugcgggaucugccucagggcuucucugcucuggaaccccugguggaucugcccaucggcaucaacaucacccgguuucagacacugcuggcccugcacagaagcuaccugacaccuggcgauagcagcagcggauggacagcuggugccgccgcuuacuaugugggcuaccugcagccuagaaccuuccugcugaaguacaacgagaacggcaccaucaccgacgccguggauugugcucuggauccucugagcgagacaaagugcacccugaaguccuucaccguggaaaagggcaucuaccagaccagcaacuuccgggugcagcccaccgaauccaucgugcgguuccccaauaucaccaaucugugccccuucggcgagguguucaaugccaccagauucgccucuguguacgccuggaaccggaagcggaucagcaauugcguggccgacuacuccgugcuguacaacuccgccagcuucagcaccuucaagugcuacggcguguccccuaccaagcugaacgaccugugcuucacaaacguguacgccgacagcuucgugauccggggagaugaagugcggcagauugccccuggacagacaggcaagaucgccgacuacaacuacaagcugcccgacgacuucaccggcugugugauugccuggaacagcaagaaccuggacuccaaagucggcggcaacuacaauuaccuguaccggcuguuccggaaguccaaucugaagcccuucgagcgggacaucagcaccgaaaucuaucaggccggcagcaccccuugcaacggcguggaaggcuucaacugcuacuucccacugcaguccuacggcuuucagcccacaaauggcgugggcuaucagcccuacagagugguggugcugagcuucgaacugcugcaugcuccugccacagugugcggcccuaagaaaagcaccaaucucgugaagaacaaaugcgugaacuucaacuucaacggccugaccggcaccggcgugcugacagagagcaacaagaaguuccugccauuccagcaguuuggccgggauaucgccgauaccacagacgccguuagagauccccagacacuggaaauccuggacaucaccccaugcagcuucggcggagugucugugaucaccccuggcaccaacaccagcaaucagguggcagugcuguaccagggcgugaacuguaccgaagugcccguggccauucacgccgaucagcugacaccuacauggcggguguacuccaccggcagcaauguguuucagaccagagccggcugucugaucggagccgagcacgugaacaauagcuacgagugcgacauccccaucggcgcuggcaucugugccagcuaccagacacagacaaacagccccagacgggcuagaagcguggccagccagagcaucauugccuacacaaugucucugggcgccgagaacagcguggccuacuccaacaacucuaucgcuauccccaccaacuucaccaucagcgugaccaccgagauccugccuguguccaugaccaagaccagcguggacugcaccauguacaucugcggcgauuccaccgagugcuccaaccugcugcugcaguacggcagcuucugcacccagcugaauagagcccugacagggaucgccguggaacaggacaagaacacccaagagguguucgcccaagugaagcaaaucuacaagaccccuccuaucaaggacuucggcggcuucaauuucagccagauucugcccgauccuagcaagcccagcaagcggagcuucaucgaggaccugcuguucaacaaagugacacuggccgacgccggcuucaucaagcaguauggcgauugucugggcgacauugccgccagggaucugauuugcgcccagaaguuuaacggacugacagugcugccuccucugcugaccgaugagaugaucgcccaguacacaucugcccugcuggccggcacaaucacaagcggcuggacauuuggagcuggcgccgcucugcagauccccuuugcuaugcagauggccuaccgguucaacggcaucggagugacccagaaugugcuguacgagaaccagaagcugaucgccaaccaguucaacagcgccaucggcaagauccaggacagccugagcagcacagcaagcgcccugggaaagcugcaggacguggucaaccagaaugcccaggcacugaacacccuggucaagcagcuguccuccaacuucggcgccaucagcucugugcugaacgauauccugagcagacuggacaaggucgaggccgaggugcagaucgacagacugaucacaggcagacugcagagccuccagacauacgugacccagcagcugaucagagccgccgagauuagagccucugccaaucuggccgccaccaagaugucugagugugugcugggccagagcaagagaguggacuuuugcggcaagggcuaccaccugaugagcuucccucagucugccccucacggcgugguguuucugcacgugacauaugugcccgcucaagagaagaauuucaccaccgcuccagccaucugccacgacggcaaagcccacuuuccuagagaaggcguguucguguccaacggcacccauugguucgugacacagcggaacuucuacgagccccagaucaucaccaccgacaacaccuucgugucuggcaacugcgacguugugaucggcauugugaacaauaccguguacgacccucugcagcccgagcuggacagcuucaaagaggaacuggacaaguacuuuaagaaccacacaagccccgacguggaccugggcgauaucagcggaaucaaugccagcgucgugaacauccagaaagagaucgaccggcugaacgagguggccaagaaucugaacgagagccugaucgaccugcaagaacuggggaaguacgagcaguacaucaaguggcccugguacaucuggcugggcuuuaucgccggacugauugccaucgugauggucacaaucaugcuguguugcaugaccagcugcuguagcugccugaagggcuguuguagcuguggcagcugcugcaaguucgacgaggacgauucugagcccgugcugaagggcgugaaacugcacuacaccugaggacuagucccuguucccagagcccacuuuuuuuucuuuuuuugaaauaaaauagccugucuuucagaucuaaaaaaaaaaaaaaaaaaaaaaaaaaaaaaaaaaaaaaaaaaaaaaaaaaaaaaaaaaaaaaaaaaaaaaaaaaaaaaaaaaaaaaaaaaaaaaaaaaaa

SEQ ID NO: 24805 - RNA, 4070 nt, Artificial Sequence
  SARS-CoV-2/Wuhan/WIV05/2019__EPI_ISL_402128 spike protein mRNA gc mod (1-1273)(S477N_D614G)
aggagagucccgcagucggcguccagcggcucugcuuguucgugugugugucguugcaggccuuauucaagcuuaccauguucguguuucuggugcugcugccccugguguccagccagugugugaaccugaccaccagaacacagcugccuccagccuacaccaacagcuucaccagaggcguguacuaccccgacaagguguucagauccagcgugcugcacucuacccaggaccuguuccugccuuucuucagcaacgugaccugguuccacgccauccacguguccggcaccaauggcaccaagagauucgacaaccccgugcugcccuucaacgacgggguguacuuugccagcaccgagaaguccaacaucaucagaggcuggaucuucggcaccacacuggacagcaagacccagagccugcugaucgugaacaacgccaccaacguggucaucaaagugugcgaguuccaguucugcaacgaccccuuccugggcgucuacuaccacaagaacaacaagagcuggauggaaagcgaguuccggguguacagcagcgccaacaacugcaccuucgaguacgugucccagccuuuccugauggaccuggaaggcaagcagggcaacuucaagaaccugcgcgaguucguguucaagaacaucgacggcuacuucaaaaucuacagcaagcacaccccuaucaaccucgugcgggaucugccucagggcuucucugcucuggaaccccugguggaucugcccaucggcaucaacaucacccgguuucagacacugcuggcccugcacagaagcuaccugacaccuggcgauagcagcagcggauggacagcuggugccgccgcuuacuaugugggcuaccugcagccuagaaccuuccugcugaaguacaacgagaacggcaccaucaccgacgccguggauugugcucuggauccucugagcgagacaaagugcacccugaaguccuucaccguggaaaagggcaucuaccagaccagcaacuuccgggugcagcccaccgaauccaucgugcgguuccccaauaucaccaaucugugccccuucggcgagguguucaaugccaccagauucgccucuguguacgccuggaaccggaagcggaucagcaauugcguggccgacuacuccgugcuguacaacuccgccagcuucagcaccuucaagugcuacggcguguccccuaccaagcugaacgaccugugcuucacaaacguguacgccgacagcuucgugauccggggagaugaagugcggcagauugccccuggacagacaggcaagaucgccgacuacaacuacaagcugcccgacgacuucaccggcugugugauugccuggaacagcaacaaccuggacuccaaagucggcggcaacuacaauuaccuguaccggcuguuccggaaguccaaucugaagcccuucgagcgggacaucagcaccgaaaucuaucaggccggcaacaccccuugcaacggcguggaaggcuucaacugcuacuucccacugcaguccuacggcuuucagcccacaaauggcgugggcuaucagcccuacagagugguggugcugagcuucgaacugcugcaugcuccugccacagugugcggcccuaagaaaagcaccaaucucgugaagaacaaaugcgugaacuucaacuucaacggccugaccggcaccggcgugcugacagagagcaacaagaaguuccugccauuccagcaguuuggccgggauaucgccgauaccacagacgccguuagagauccccagacacuggaaauccuggacaucaccccaugcagcuucggcggagugucugugaucaccccuggcaccaacaccagcaaucagguggcagugcuguaccagggcgugaacuguaccgaagugcccguggccauucacgccgaucagcugacaccuacauggcggguguacuccaccggcagcaauguguuucagaccagagccggcugucugaucggagccgagcacgugaacaauagcuacgagugcgacauccccaucggcgcuggcaucugugccagcuaccagacacagacaaacagccccagacgggcuagaagcguggccagccagagcaucauugccuacacaaugucucugggcgccgagaacagcguggccuacuccaacaacucuaucgcuauccccaccaacuucaccaucagcgugaccaccgagauccugccuguguccaugaccaagaccagcguggacugcaccauguacaucugcggcgauuccaccgagugcuccaaccugcugcugcaguacggcagcuucugcacccagcugaauagagcccugacagggaucgccguggaacaggacaagaacacccaagagguguucgcccaagugaagcaaaucuacaagaccccuccuaucaaggacuucggcggcuucaauuucagccagauucugcccgauccuagcaagcccagcaagcggagcuucaucgaggaccugcuguucaacaaagugacacuggccgacgccggcuucaucaagcaguauggcgauugucugggcgacauugccgccagggaucugauuugcgcccagaaguuuaacggacugacagugcugccuccucugcugaccgaugagaugaucgcccaguacacaucugcccugcuggccggcacaaucacaagcggcuggacauuuggagcuggcgccgcucugcagauccccuuugcuaugcagauggccuaccgguucaacggcaucggagugacccagaaugugcuguacgagaaccagaagcugaucgccaaccaguucaacagcgccaucggcaagauccaggacagccugagcagcacagcaagcgcccugggaaagcugcaggacguggucaaccagaaugcccaggcacugaacacccuggucaagcagcuguccuccaacuucggcgccaucagcucugugcugaacgauauccugagcagacuggacaaggucgaggccgaggugcagaucgacagacugaucacaggcagacugcagagccuccagacauacgugacccagcagcugaucagagccgccgagauuagagccucugccaaucuggccgccaccaagaugucugagugugugcugggccagagcaagagaguggacuuuugcggcaagggcuaccaccugaugagcuucccucagucugccccucacggcgugguguuucugcacgugacauaugugcccgcucaagagaagaauuucaccaccgcuccagccaucugccacgacggcaaagcccacuuuccuagagaaggcguguucguguccaacggcacccauugguucgugacacagcggaacuucuacgagccccagaucaucaccaccgacaacaccuucgugucuggcaacugcgacguugugaucggcauugugaacaauaccguguacgacccucugcagcccgagcuggacagcuucaaagaggaacuggacaaguacuuuaagaaccacacaagccccgacguggaccugggcgauaucagcggaaucaaugccagcgucgugaacauccagaaagagaucgaccggcugaacgagguggccaagaaucugaacgagagccugaucgaccugcaagaacuggggaaguacgagcaguacaucaaguggcccugguacaucuggcugggcuuuaucgccggacugauugccaucgugauggucacaaucaugcuguguugcaugaccagcugcuguagcugccugaagggcuguuguagcuguggcagcugcugcaaguucgacgaggacgauucugagcccgugcugaagggcgugaaacugcacuacaccugaggacuagucccuguucccagagcccacuuuuuuuucuuuuuuugaaauaaaauagccugucuuucagaucuaaaaaaaaaaaaaaaaaaaaaaaaaaaaaaaaaaaaaaaaaaaaaaaaaaaaaaaaaaaaaaaaaaaaaaaaaaaaaaaaaaaaaaaaaaaaaaaaaaaa

SEQ ID NO: 24806 - RNA, 4070 nt, Artificial Sequence
  SARS-CoV-2/Wuhan/WIV05/2019__EPI_ISL_402128 spike protein mRNA gc mod (1-1273)(N501Y_D614G)
aggagagucccgcagucggcguccagcggcucugcuuguucgugugugugucguugcaggccuuauucaagcuuaccauguucguguuucuggugcugcugccccugguguccagccagugugugaaccugaccaccagaacacagcugccuccagccuacaccaacagcuucaccagaggcguguacuaccccgacaagguguucagauccagcgugcugcacucuacccaggaccuguuccugccuuucuucagcaacgugaccugguuccacgccauccacguguccggcaccaauggcaccaagagauucgacaaccccgugcugcccuucaacgacgggguguacuuugccagcaccgagaaguccaacaucaucagaggcuggaucuucggcaccacacuggacagcaagacccagagccugcugaucgugaacaacgccaccaacguggucaucaaagugugcgaguuccaguucugcaacgaccccuuccugggcgucuacuaccacaagaacaacaagagcuggauggaaagcgaguuccggguguacagcagcgccaacaacugcaccuucgaguacgugucccagccuuuccugauggaccuggaaggcaagcagggcaacuucaagaaccugcgcgaguucguguucaagaacaucgacggcuacuucaaaaucuacagcaagcacaccccuaucaaccucgugcgggaucugccucagggcuucucugcucuggaaccccugguggaucugcccaucggcaucaacaucacccgguuucagacacugcuggcccugcacagaagcuaccugacaccuggcgauagcagcagcggauggacagcuggugccgccgcuuacuaugugggcuaccugcagccuagaaccuuccugcugaaguacaacgagaacggcaccaucaccgacgccguggauugugcucuggauccucugagcgagacaaagugcacccugaaguccuucaccguggaaaagggcaucuaccagaccagcaacuuccgggugcagcccaccgaauccaucgugcgguuccccaauaucaccaaucugugccccuucggcgagguguucaaugccaccagauucgccucuguguacgccuggaaccggaagcggaucagcaauugcguggccgacuacuccgugcuguacaacuccgccagcuucagcaccuucaagugcuacggcguguccccuaccaagcugaacgaccugugcuucacaaacguguacgccgacagcuucgugauccggggagaugaagugcggcagauugccccuggacagacaggcaagaucgccgacuacaacuacaagcugcccgacgacuucaccggcugugugauugccuggaacagcaacaaccuggacuccaaagucggcggcaacuacaauuaccuguaccggcuguuccggaaguccaaucugaagcccuucgagcgggacaucagcaccgaaaucuaucaggccggcagcaccccuugcaacggcguggaaggcuucaacugcuacuucccacugcaguccuacggcuuucagcccacauacggcgugggcuaucagcccuacagagugguggugcugagcuucgaacugcugcaugcuccugccacagugugcggcccuaagaaaagcaccaaucucgugaagaacaaaugcgugaacuucaacuucaacggccugaccggcaccggcgugcugacagagagcaacaagaaguuccugccauuccagcaguuuggccgggauaucgccgauaccacagacgccguuagagauccccagacacuggaaauccuggacaucaccccaugcagcuucggcggagugucugugaucaccccuggcaccaacaccagcaaucagguggcagugcuguaccagggcgugaacuguaccgaagugcccguggccauucacgccgaucagcugacaccuacauggcggguguacuccaccggcagcaauguguuucagaccagagccggcugucugaucggagccgagcacgugaacaauagcuacgagugcgacauccccaucggcgcuggcaucugugccagcuaccagacacagacaaacagccccagacgggcuagaagcguggccagccagagcaucauugccuacacaaugucucugggcgccgagaacagcguggccuacuccaacaacucuaucgcuauccccaccaacuucaccaucagcgugaccaccgagauccugccuguguccaugaccaagaccagcguggacugcaccauguacaucugcggcgauuccaccgagugcuccaaccugcugcugcaguacggcagcuucugcacccagcugaauagagcccugacagggaucgccguggaacaggacaagaacacccaagagguguucgcccaagugaagcaaaucuacaagaccccuccuaucaaggacuucggcggcuucaauuucagccagauucugcccgauccuagcaagcccagcaagcggagcuucaucgaggaccugcuguucaacaaagugacacuggccgacgccggcuucaucaagcaguauggcgauugucugggcgacauugccgccagggaucugauuugcgcccagaaguuuaacggacugacagugcugccuccucugcugaccgaugagaugaucgcccaguacacaucugcccugcuggccggcacaaucacaagcggcuggacauuuggagcuggcgccgcucugcagauccccuuugcuaugcagauggccuaccgguucaacggcaucggagugacccagaaugugcuguacgagaaccagaagcugaucgccaaccaguucaacagcgccaucggcaagauccaggacagccugagcagcacagcaagcgcccugggaaagcugcaggacguggucaaccagaaugcccaggcacugaacacccuggucaagcagcuguccuccaacuucggcgccaucagcucugugcugaacgauauccugagcagacuggacaaggucgaggccgaggugcagaucgacagacugaucacaggcagacugcagagccuccagacauacgugacccagcagcugaucagagccgccgagauuagagccucugccaaucuggccgccaccaagaugucugagugugugcugggccagagcaagagaguggacuuuugcggcaagggcuaccaccugaugagcuucccucagucugccccucacggcgugguguuucugcacgugacauaugugcccgcucaagagaagaauuucaccaccgcuccagccaucugccacgacggcaaagcccacuuuccuagagaaggcguguucguguccaacggcacccauugguucgugacacagcggaacuucuacgagccccagaucaucaccaccgacaacaccuucgugucuggcaacugcgacguugugaucggcauugugaacaauaccguguacgacccucugcagcccgagcuggacagcuucaaagaggaacuggacaaguacuuuaagaaccacacaagccccgacguggaccugggcgauaucagcggaaucaaugccagcgucgugaacauccagaaagagaucgaccggcugaacgagguggccaagaaucugaacgagagccugaucgaccugcaagaacuggggaaguacgagcaguacaucaaguggcccugguacaucuggcugggcuuuaucgccggacugauugccaucgugauggucacaaucaugcuguguugcaugaccagcugcuguagcugccugaagggcuguuguagcuguggcagcugcugcaaguucgacgaggacgauucugagcccgugcugaagggcgugaaacugcacuacaccugaggacuagucccuguucccagagcccacuuuuuuuucuuuuuuugaaauaaaauagccugucuuucagaucuaaaaaaaaaaaaaaaaaaaaaaaaaaaaaaaaaaaaaaaaaaaaaaaaaaaaaaaaaaaaaaaaaaaaaaaaaaaaaaaaaaaaaaaaaaaaaaaaaaaa

SEQ ID NO: 24807 - RNA, 4064 nt, Artificial Sequence
  SARS-CoV-2/Wuhan/WIV05/2019__EPI_ISL_402128 spike protein mRNA gc mod (1-1273)(H69del_V70del_D614G)
aggagagucccgcagucggcguccagcggcucugcuuguucgugugugugucguugcaggccuuauucaagcuuaccauguucguguuucuggugcugcugccccugguguccagccagugugugaaccugaccaccagaacacagcugccuccagccuacaccaacagcuucaccagaggcguguacuaccccgacaagguguucagauccagcgugcugcacucuacccaggaccuguuccugccuuucuucagcaacgugaccugguuccacgccaucuccggcaccaauggcaccaagagauucgacaaccccgugcugcccuucaacgacgggguguacuuugccagcaccgagaaguccaacaucaucagaggcuggaucuucggcaccacacuggacagcaagacccagagccugcugaucgugaacaacgccaccaacguggucaucaaagugugcgaguuccaguucugcaacgaccccuuccugggcgucuacuaccacaagaacaacaagagcuggauggaaagcgaguuccggguguacagcagcgccaacaacugcaccuucgaguacgugucccagccuuuccugauggaccuggaaggcaagcagggcaacuucaagaaccugcgcgaguucguguucaagaacaucgacggcuacuucaaaaucuacagcaagcacaccccuaucaaccucgugcgggaucugccucagggcuucucugcucuggaaccccugguggaucugcccaucggcaucaacaucacccgguuucagacacugcuggcccugcacagaagcuaccugacaccuggcgauagcagcagcggauggacagcuggugccgccgcuuacuaugugggcuaccugcagccuagaaccuuccugcugaaguacaacgagaacggcaccaucaccgacgccguggauugugcucuggauccucugagcgagacaaagugcacccugaaguccuucaccguggaaaagggcaucuaccagaccagcaacuuccgggugcagcccaccgaauccaucgugcgguuccccaauaucaccaaucugugccccuucggcgagguguucaaugccaccagauucgccucuguguacgccuggaaccggaagcggaucagcaauugcguggccgacuacuccgugcuguacaacuccgccagcuucagcaccuucaagugcuacggcguguccccuaccaagcugaacgaccugugcuucacaaacguguacgccgacagcuucgugauccggggagaugaagugcggcagauugccccuggacagacaggcaagaucgccgacuacaacuacaagcugcccgacgacuucaccggcugugugauugccuggaacagcaacaaccuggacuccaaagucggcggcaacuacaauuaccuguaccggcuguuccggaaguccaaucugaagcccuucgagcgggacaucagcaccgaaaucuaucaggccggcagcaccccuugcaacggcguggaaggcuucaacugcuacuucccacugcaguccuacggcuuucagcccacaaauggcgugggcuaucagcccuacagagugguggugcugagcuucgaacugcugcaugcuccugccacagugugcggcccuaagaaaagcaccaaucucgugaagaacaaaugcgugaacuucaacuucaacggccugaccggcaccggcgugcugacagagagcaacaagaaguuccugccauuccagcaguuuggccgggauaucgccgauaccacagacgccguuagagauccccagacacuggaaauccuggacaucaccccaugcagcuucggcggagugucugugaucaccccuggcaccaacaccagcaaucagguggcagugcuguaccagggcgugaacuguaccgaagugcccguggccauucacgccgaucagcugacaccuacauggcggguguacuccaccggcagcaauguguuucagaccagagccggcugucugaucggagccgagcacgugaacaauagcuacgagugcgacauccccaucggcgcuggcaucugugccagcuaccagacacagacaaacagccccagacgggcuagaagcguggccagccagagcaucauugccuacacaaugucucugggcgccgagaacagcguggccuacuccaacaacucuaucgcuauccccaccaacuucaccaucagcgugaccaccgagauccugccuguguccaugaccaagaccagcguggacugcaccauguacaucugcggcgauuccaccgagugcuccaaccugcugcugcaguacggcagcuucugcacccagcugaauagagcccugacagggaucgccguggaacaggacaagaacacccaagagguguucgcccaagugaagcaaaucuacaagaccccuccuaucaaggacuucggcggcuucaauuucagccagauucugcccgauccuagcaagcccagcaagcggagcuucaucgaggaccugcuguucaacaaagugacacuggccgacgccggcuucaucaagcaguauggcgauugucugggcgacauugccgccagggaucugauuugcgcccagaaguuuaacggacugacagugcugccuccucugcugaccgaugagaugaucgcccaguacacaucugcccugcuggccggcacaaucacaagcggcuggacauuuggagcuggcgccgcucugcagauccccuuugcuaugcagauggccuaccgguucaacggcaucggagugacccagaaugugcuguacgagaaccagaagcugaucgccaaccaguucaacagcgccaucggcaagauccaggacagccugagcagcacagcaagcgcccugggaaagcugcaggacguggucaaccagaaugcccaggcacugaacacccuggucaagcagcuguccuccaacuucggcgccaucagcucugugcugaacgauauccugagcagacuggacaaggucgaggccgaggugcagaucgacagacugaucacaggcagacugcagagccuccagacauacgugacccagcagcugaucagagccgccgagauuagagccucugccaaucuggccgccaccaagaugucugagugugugcugggccagagcaagagaguggacuuuugcggcaagggcuaccaccugaugagcuucccucagucugccccucacggcgugguguuucugcacgugacauaugugcccgcucaagagaagaauuucaccaccgcuccagccaucugccacgacggcaaagcccacuuuccuagagaaggcguguucguguccaacggcacccauugguucgugacacagcggaacuucuacgagccccagaucaucaccaccgacaacaccuucgugucuggcaacugcgacguugugaucggcauugugaacaauaccguguacgacccucugcagcccgagcuggacagcuucaaagaggaacuggacaaguacuuuaagaaccacacaagccccgacguggaccugggcgauaucagcggaaucaaugccagcgucgugaacauccagaaagagaucgaccggcugaacgagguggccaagaaucugaacgagagccugaucgaccugcaagaacuggggaaguacgagcaguacaucaaguggcccugguacaucuggcugggcuuuaucgccggacugauugccaucgugauggucacaaucaugcuguguugcaugaccagcugcuguagcugccugaagggcuguuguagcuguggcagcugcugcaaguucgacgaggacgauucugagcccgugcugaagggcgugaaacugcacuacaccugaggacuagucccuguucccagagcccacuuuuuuuucuuuuuuugaaauaaaauagccugucuuucagaucuaaaaaaaaaaaaaaaaaaaaaaaaaaaaaaaaaaaaaaaaaaaaaaaaaaaaaaaaaaaaaaaaaaaaaaaaaaaaaaaaaaaaaaaaaaaaaaaaaaaa

SEQ ID NO: 24808 - RNA, 4070 nt, Artificial Sequence
  SARS-CoV-2/Wuhan/WIV05/2019__EPI_ISL_402128 spike protein mRNA gc mod (1-1273)(Y453F_D614G)
aggagagucccgcagucggcguccagcggcucugcuuguucgugugugugucguugcaggccuuauucaagcuuaccauguucguguuucuggugcugcugccccugguguccagccagugugugaaccugaccaccagaacacagcugccuccagccuacaccaacagcuucaccagaggcguguacuaccccgacaagguguucagauccagcgugcugcacucuacccaggaccuguuccugccuuucuucagcaacgugaccugguuccacgccauccacguguccggcaccaauggcaccaagagauucgacaaccccgugcugcccuucaacgacgggguguacuuugccagcaccgagaaguccaacaucaucagaggcuggaucuucggcaccacacuggacagcaagacccagagccugcugaucgugaacaacgccaccaacguggucaucaaagugugcgaguuccaguucugcaacgaccccuuccugggcgucuacuaccacaagaacaacaagagcuggauggaaagcgaguuccggguguacagcagcgccaacaacugcaccuucgaguacgugucccagccuuuccugauggaccuggaaggcaagcagggcaacuucaagaaccugcgcgaguucguguucaagaacaucgacggcuacuucaaaaucuacagcaagcacaccccuaucaaccucgugcgggaucugccucagggcuucucugcucuggaaccccugguggaucugcccaucggcaucaacaucacccgguuucagacacugcuggcccugcacagaagcuaccugacaccuggcgauagcagcagcggauggacagcuggugccgccgcuuacuaugugggcuaccugcagccuagaaccuuccugcugaaguacaacgagaacggcaccaucaccgacgccguggauugugcucuggauccucugagcgagacaaagugcacccugaaguccuucaccguggaaaagggcaucuaccagaccagcaacuuccgggugcagcccaccgaauccaucgugcgguuccccaauaucaccaaucugugccccuucggcgagguguucaaugccaccagauucgccucuguguacgccuggaaccggaagcggaucagcaauugcguggccgacuacuccgugcuguacaacuccgccagcuucagcaccuucaagugcuacggcguguccccuaccaagcugaacgaccugugcuucacaaacguguacgccgacagcuucgugauccggggagaugaagugcggcagauugccccuggacagacaggcaagaucgccgacuacaacuacaagcugcccgacgacuucaccggcugugugauugccuggaacagcaacaaccuggacuccaaagucggcggcaacuacaauuaccuguuccggcuguuccggaaguccaaucugaagcccuucgagcgggacaucagcaccgaaaucuaucaggccggcagcaccccuugcaacggcguggaaggcuucaacugcuacuucccacugcaguccuacggcuuucagcccacaaauggcgugggcuaucagcccuacagagugguggugcugagcuucgaacugcugcaugcuccugccacagugugcggcccuaagaaaagcaccaaucucgugaagaacaaaugcgugaacuucaacuucaacggccugaccggcaccggcgugcugacagagagcaacaagaaguuccugccauuccagcaguuuggccgggauaucgccgauaccacagacgccguuagagauccccagacacuggaaauccuggacaucaccccaugcagcuucggcggagugucugugaucaccccuggcaccaacaccagcaaucagguggcagugcuguaccagggcgugaacuguaccgaagugcccguggccauucacgccgaucagcugacaccuacauggcggguguacuccaccggcagcaauguguuucagaccagagccggcugucugaucggagccgagcacgugaacaauagcuacgagugcgacauccccaucggcgcuggcaucugugccagcuaccagacacagacaaacagccccagacgggcuagaagcguggccagccagagcaucauugccuacacaaugucucugggcgccgagaacagcguggccuacuccaacaacucuaucgcuauccccaccaacuucaccaucagcgugaccaccgagauccugccuguguccaugaccaagaccagcguggacugcaccauguacaucugcggcgauuccaccgagugcuccaaccugcugcugcaguacggcagcuucugcacccagcugaauagagcccugacagggaucgccguggaacaggacaagaacacccaagagguguucgcccaagugaagcaaaucuacaagaccccuccuaucaaggacuucggcggcuucaauuucagccagauucugcccgauccuagcaagcccagcaagcggagcuucaucgaggaccugcuguucaacaaagugacacuggccgacgccggcuucaucaagcaguauggcgauugucugggcgacauugccgccagggaucugauuugcgcccagaaguuuaacggacugacagugcugccuccucugcugaccgaugagaugaucgcccaguacacaucugcccugcuggccggcacaaucacaagcggcuggacauuuggagcuggcgccgcucugcagauccccuuugcuaugcagauggccuaccgguucaacggcaucggagugacccagaaugugcuguacgagaaccagaagcugaucgccaaccaguucaacagcgccaucggcaagauccaggacagccugagcagcacagcaagcgcccugggaaagcugcaggacguggucaaccagaaugcccaggcacugaacacccuggucaagcagcuguccuccaacuucggcgccaucagcucugugcugaacgauauccugagcagacuggacaaggucgaggccgaggugcagaucgacagacugaucacaggcagacugcagagccuccagacauacgugacccagcagcugaucagagccgccgagauuagagccucugccaaucuggccgccaccaagaugucugagugugugcugggccagagcaagagaguggacuuuugcggcaagggcuaccaccugaugagcuucccucagucugccccucacggcgugguguuucugcacgugacauaugugcccgcucaagagaagaauuucaccaccgcuccagccaucugccacgacggcaaagcccacuuuccuagagaaggcguguucguguccaacggcacccauugguucgugacacagcggaacuucuacgagccccagaucaucaccaccgacaacaccuucgugucuggcaacugcgacguugugaucggcauugugaacaauaccguguacgacccucugcagcccgagcuggacagcuucaaagaggaacuggacaaguacuuuaagaaccacacaagccccgacguggaccugggcgauaucagcggaaucaaugccagcgucgugaacauccagaaagagaucgaccggcugaacgagguggccaagaaucugaacgagagccugaucgaccugcaagaacuggggaaguacgagcaguacaucaaguggcccugguacaucuggcugggcuuuaucgccggacugauugccaucgugauggucacaaucaugcuguguugcaugaccagcugcuguagcugccugaagggcuguuguagcuguggcagcugcugcaaguucgacgaggacgauucugagcccgugcugaagggcgugaaacugcacuacaccugaggacuagucccuguucccagagcccacuuuuuuuucuuuuuuugaaauaaaauagccugucuuucagaucuaaaaaaaaaaaaaaaaaaaaaaaaaaaaaaaaaaaaaaaaaaaaaaaaaaaaaaaaaaaaaaaaaaaaaaaaaaaaaaaaaaaaaaaaaaaaaaaaaaaa

SEQ ID NO: 24809 - RNA, 4070 nt, Artificial Sequence
  SARS-CoV-2/Wuhan/WIV05/2019__EPI_ISL_402128 spike protein mRNA gc mod (1-1273)(D614G_I692V)
aggagagucccgcagucggcguccagcggcucugcuuguucgugugugugucguugcaggccuuauucaagcuuaccauguucguguuucuggugcugcugccccugguguccagccagugugugaaccugaccaccagaacacagcugccuccagccuacaccaacagcuucaccagaggcguguacuaccccgacaagguguucagauccagcgugcugcacucuacccaggaccuguuccugccuuucuucagcaacgugaccugguuccacgccauccacguguccggcaccaauggcaccaagagauucgacaaccccgugcugcccuucaacgacgggguguacuuugccagcaccgagaaguccaacaucaucagaggcuggaucuucggcaccacacuggacagcaagacccagagccugcugaucgugaacaacgccaccaacguggucaucaaagugugcgaguuccaguucugcaacgaccccuuccugggcgucuacuaccacaagaacaacaagagcuggauggaaagcgaguuccggguguacagcagcgccaacaacugcaccuucgaguacgugucccagccuuuccugauggaccuggaaggcaagcagggcaacuucaagaaccugcgcgaguucguguucaagaacaucgacggcuacuucaaaaucuacagcaagcacaccccuaucaaccucgugcgggaucugccucagggcuucucugcucuggaaccccugguggaucugcccaucggcaucaacaucacccgguuucagacacugcuggcccugcacagaagcuaccugacaccuggcgauagcagcagcggauggacagcuggugccgccgcuuacuaugugggcuaccugcagccuagaaccuuccugcugaaguacaacgagaacggcaccaucaccgacgccguggauugugcucuggauccucugagcgagacaaagugcacccugaaguccuucaccguggaaaagggcaucuaccagaccagcaacuuccgggugcagcccaccgaauccaucgugcgguuccccaauaucaccaaucugugccccuucggcgagguguucaaugccaccagauucgccucuguguacgccuggaaccggaagcggaucagcaauugcguggccgacuacuccgugcuguacaacuccgccagcuucagcaccuucaagugcuacggcguguccccuaccaagcugaacgaccugugcuucacaaacguguacgccgacagcuucgugauccggggagaugaagugcggcagauugccccuggacagacaggcaagaucgccgacuacaacuacaagcugcccgacgacuucaccggcugugugauugccuggaacagcaacaaccuggacuccaaagucggcggcaacuacaauuaccuguaccggcuguuccggaaguccaaucugaagcccuucgagcgggacaucagcaccgaaaucuaucaggccggcagcaccccuugcaacggcguggaaggcuucaacugcuacuucccacugcaguccuacggcuuucagcccacaaauggcgugggcuaucagcccuacagagugguggugcugagcuucgaacugcugcaugcuccugccacagugugcggcccuaagaaaagcaccaaucucgugaagaacaaaugcgugaacuucaacuucaacggccugaccggcaccggcgugcugacagagagcaacaagaaguuccugccauuccagcaguuuggccgggauaucgccgauaccacagacgccguuagagauccccagacacuggaaauccuggacaucaccccaugcagcuucggcggagugucugugaucaccccuggcaccaacaccagcaaucagguggcagugcuguaccagggcgugaacuguaccgaagugcccguggccauucacgccgaucagcugacaccuacauggcggguguacuccaccggcagcaauguguuucagaccagagccggcugucugaucggagccgagcacgugaacaauagcuacgagugcgacauccccaucggcgcuggcaucugugccagcuaccagacacagacaaacagccccagacgggcuagaagcguggccagccagagcgugauugccuacacaaugucucugggcgccgagaacagcguggccuacuccaacaacucuaucgcuauccccaccaacuucaccaucagcgugaccaccgagauccugccuguguccaugaccaagaccagcguggacugcaccauguacaucugcggcgauuccaccgagugcuccaaccugcugcugcaguacggcagcuucugcacccagcugaauagagcccugacagggaucgccguggaacaggacaagaacacccaagagguguucgcccaagugaagcaaaucuacaagaccccuccuaucaaggacuucggcggcuucaauuucagccagauucugcccgauccuagcaagcccagcaagcggagcuucaucgaggaccugcuguucaacaaagugacacuggccgacgccggcuucaucaagcaguauggcgauugucugggcgacauugccgccagggaucugauuugcgcccagaaguuuaacggacugacagugcugccuccucugcugaccgaugagaugaucgcccaguacacaucugcccugcuggccggcacaaucacaagcggcuggacauuuggagcuggcgccgcucugcagauccccuuugcuaugcagauggccuaccgguucaacggcaucggagugacccagaaugugcuguacgagaaccagaagcugaucgccaaccaguucaacagcgccaucggcaagauccaggacagccugagcagcacagcaagcgcccugggaaagcugcaggacguggucaaccagaaugcccaggcacugaacacccuggucaagcagcuguccuccaacuucggcgccaucagcucugugcugaacgauauccugagcagacuggacaaggucgaggccgaggugcagaucgacagacugaucacaggcagacugcagagccuccagacauacgugacccagcagcugaucagagccgccgagauuagagccucugccaaucuggccgccaccaagaugucugagugugugcugggccagagcaagagaguggacuuuugcggcaagggcuaccaccugaugagcuucccucagucugccccucacggcgugguguuucugcacgugacauaugugcccgcucaagagaagaauuucaccaccgcuccagccaucugccacgacggcaaagcccacuuuccuagagaaggcguguucguguccaacggcacccauugguucgugacacagcggaacuucuacgagccccagaucaucaccaccgacaacaccuucgugucuggcaacugcgacguugugaucggcauugugaacaauaccguguacgacccucugcagcccgagcuggacagcuucaaagaggaacuggacaaguacuuuaagaaccacacaagccccgacguggaccugggcgauaucagcggaaucaaugccagcgucgugaacauccagaaagagaucgaccggcugaacgagguggccaagaaucugaacgagagccugaucgaccugcaagaacuggggaaguacgagcaguacaucaaguggcccugguacaucuggcugggcuuuaucgccggacugauugccaucgugauggucacaaucaugcuguguugcaugaccagcugcuguagcugccugaagggcuguuguagcuguggcagcugcugcaaguucgacgaggacgauucugagcccgugcugaagggcgugaaacugcacuacaccugaggacuagucccuguucccagagcccacuuuuuuuucuuuuuuugaaauaaaauagccugucuuucagaucuaaaaaaaaaaaaaaaaaaaaaaaaaaaaaaaaaaaaaaaaaaaaaaaaaaaaaaaaaaaaaaaaaaaaaaaaaaaaaaaaaaaaaaaaaaaaaaaaaaaa

SEQ ID NO: 24810 - RNA, 4070 nt, Artificial Sequence
  SARS-CoV-2/Wuhan/WIV05/2019__EPI_ISL_402128 spike protein mRNA gc mod (1-1273)(D614G_M1229I)
aggagagucccgcagucggcguccagcggcucugcuuguucgugugugugucguugcaggccuuauucaagcuuaccauguucguguuucuggugcugcugccccugguguccagccagugugugaaccugaccaccagaacacagcugccuccagccuacaccaacagcuucaccagaggcguguacuaccccgacaagguguucagauccagcgugcugcacucuacccaggaccuguuccugccuuucuucagcaacgugaccugguuccacgccauccacguguccggcaccaauggcaccaagagauucgacaaccccgugcugcccuucaacgacgggguguacuuugccagcaccgagaaguccaacaucaucagaggcuggaucuucggcaccacacuggacagcaagacccagagccugcugaucgugaacaacgccaccaacguggucaucaaagugugcgaguuccaguucugcaacgaccccuuccugggcgucuacuaccacaagaacaacaagagcuggauggaaagcgaguuccggguguacagcagcgccaacaacugcaccuucgaguacgugucccagccuuuccugauggaccuggaaggcaagcagggcaacuucaagaaccugcgcgaguucguguucaagaacaucgacggcuacuucaaaaucuacagcaagcacaccccuaucaaccucgugcgggaucugccucagggcuucucugcucuggaaccccugguggaucugcccaucggcaucaacaucacccgguuucagacacugcuggcccugcacagaagcuaccugacaccuggcgauagcagcagcggauggacagcuggugccgccgcuuacuaugugggcuaccugcagccuagaaccuuccugcugaaguacaacgagaacggcaccaucaccgacgccguggauugugcucuggauccucugagcgagacaaagugcacccugaaguccuucaccguggaaaagggcaucuaccagaccagcaacuuccgggugcagcccaccgaauccaucgugcgguuccccaauaucaccaaucugugccccuucggcgagguguucaaugccaccagauucgccucuguguacgccuggaaccggaagcggaucagcaauugcguggccgacuacuccgugcuguacaacuccgccagcuucagcaccuucaagugcuacggcguguccccuaccaagcugaacgaccugugcuucacaaacguguacgccgacagcuucgugauccggggagaugaagugcggcagauugccccuggacagacaggcaagaucgccgacuacaacuacaagcugcccgacgacuucaccggcugugugauugccuggaacagcaacaaccuggacuccaaagucggcggcaacuacaauuaccuguaccggcuguuccggaaguccaaucugaagcccuucgagcgggacaucagcaccgaaaucuaucaggccggcagcaccccuugcaacggcguggaaggcuucaacugcuacuucccacugcaguccuacggcuuucagcccacaaauggcgugggcuaucagcccuacagagugguggugcugagcuucgaacugcugcaugcuccugccacagugugcggcccuaagaaaagcaccaaucucgugaagaacaaaugcgugaacuucaacuucaacggccugaccggcaccggcgugcugacagagagcaacaagaaguuccugccauuccagcaguuuggccgggauaucgccgauaccacagacgccguuagagauccccagacacuggaaauccuggacaucaccccaugcagcuucggcggagugucugugaucaccccuggcaccaacaccagcaaucagguggcagugcuguaccagggcgugaacuguaccgaagugcccguggccauucacgccgaucagcugacaccuacauggcggguguacuccaccggcagcaauguguuucagaccagagccggcugucugaucggagccgagcacgugaacaauagcuacgagugcgacauccccaucggcgcuggcaucugugccagcuaccagacacagacaaacagccccagacgggcuagaagcguggccagccagagcaucauugccuacacaaugucucugggcgccgagaacagcguggccuacuccaacaacucuaucgcuauccccaccaacuucaccaucagcgugaccaccgagauccugccuguguccaugaccaagaccagcguggacugcaccauguacaucugcggcgauuccaccgagugcuccaaccugcugcugcaguacggcagcuucugcacccagcugaauagagcccugacagggaucgccguggaacaggacaagaacacccaagagguguucgcccaagugaagcaaaucuacaagaccccuccuaucaaggacuucggcggcuucaauuucagccagauucugcccgauccuagcaagcccagcaagcggagcuucaucgaggaccugcuguucaacaaagugacacuggccgacgccggcuucaucaagcaguauggcgauugucugggcgacauugccgccagggaucugauuugcgcccagaaguuuaacggacugacagugcugccuccucugcugaccgaugagaugaucgcccaguacacaucugcccugcuggccggcacaaucacaagcggcuggacauuuggagcuggcgccgcucugcagauccccuuugcuaugcagauggccuaccgguucaacggcaucggagugacccagaaugugcuguacgagaaccagaagcugaucgccaaccaguucaacagcgccaucggcaagauccaggacagccugagcagcacagcaagcgcccugggaaagcugcaggacguggucaaccagaaugcccaggcacugaacacccuggucaagcagcuguccuccaacuucggcgccaucagcucugugcugaacgauauccugagcagacuggacaaggucgaggccgaggugcagaucgacagacugaucacaggcagacugcagagccuccagacauacgugacccagcagcugaucagagccgccgagauuagagccucugccaaucuggccgccaccaagaugucugagugugugcugggccagagcaagagaguggacuuuugcggcaagggcuaccaccugaugagcuucccucagucugccccucacggcgugguguuucugcacgugacauaugugcccgcucaagagaagaauuucaccaccgcuccagccaucugccacgacggcaaagcccacuuuccuagagaaggcguguucguguccaacggcacccauugguucgugacacagcggaacuucuacgagccccagaucaucaccaccgacaacaccuucgugucuggcaacugcgacguugugaucggcauugugaacaauaccguguacgacccucugcagcccgagcuggacagcuucaaagaggaacuggacaaguacuuuaagaaccacacaagccccgacguggaccugggcgauaucagcggaaucaaugccagcgucgugaacauccagaaagagaucgaccggcugaacgagguggccaagaaucugaacgagagccugaucgaccugcaagaacuggggaaguacgagcaguacaucaaguggcccugguacaucuggcugggcuuuaucgccggacugauugccaucgugaucgucacaaucaugcuguguugcaugaccagcugcuguagcugccugaagggcuguuguagcuguggcagcugcugcaaguucgacgaggacgauucugagcccgugcugaagggcgugaaacugcacuacaccugaggacuagucccuguucccagagcccacuuuuuuuucuuuuuuugaaauaaaauagccugucuuucagaucuaaaaaaaaaaaaaaaaaaaaaaaaaaaaaaaaaaaaaaaaaaaaaaaaaaaaaaaaaaaaaaaaaaaaaaaaaaaaaaaaaaaaaaaaaaaaaaaaaaaa

SEQ ID NO: 24811 - RNA, 4064 nt, Artificial Sequence
  SARS-CoV-2/Wuhan/WIV05/2019__EPI_ISL_402128 spike protein mRNA gc mod (1-1273)(H69del_V70del_A222V_Y453F_S477N_D614G_I692V)
aggagagucccgcagucggcguccagcggcucugcuuguucgugugugugucguugcaggccuuauucaagcuuaccauguucguguuucuggugcugcugccccugguguccagccagugugugaaccugaccaccagaacacagcugccuccagccuacaccaacagcuucaccagaggcguguacuaccccgacaagguguucagauccagcgugcugcacucuacccaggaccuguuccugccuuucuucagcaacgugaccugguuccacgccaucuccggcaccaauggcaccaagagauucgacaaccccgugcugcccuucaacgacgggguguacuuugccagcaccgagaaguccaacaucaucagaggcuggaucuucggcaccacacuggacagcaagacccagagccugcugaucgugaacaacgccaccaacguggucaucaaagugugcgaguuccaguucugcaacgaccccuuccugggcgucuacuaccacaagaacaacaagagcuggauggaaagcgaguuccggguguacagcagcgccaacaacugcaccuucgaguacgugucccagccuuuccugauggaccuggaaggcaagcagggcaacuucaagaaccugcgcgaguucguguucaagaacaucgacggcuacuucaaaaucuacagcaagcacaccccuaucaaccucgugcgggaucugccucagggcuucucugugcuggaaccccugguggaucugcccaucggcaucaacaucacccgguuucagacacugcuggcccugcacagaagcuaccugacaccuggcgauagcagcagcggauggacagcuggugccgccgcuuacuaugugggcuaccugcagccuagaaccuuccugcugaaguacaacgagaacggcaccaucaccgacgccguggauugugcucuggauccucugagcgagacaaagugcacccugaaguccuucaccguggaaaagggcaucuaccagaccagcaacuuccgggugcagcccaccgaauccaucgugcgguuccccaauaucaccaaucugugccccuucggcgagguguucaaugccaccagauucgccucuguguacgccuggaaccggaagcggaucagcaauugcguggccgacuacuccgugcuguacaacuccgccagcuucagcaccuucaagugcuacggcguguccccuaccaagcugaacgaccugugcuucacaaacguguacgccgacagcuucgugauccggggagaugaagugcggcagauugccccuggacagacaggcaagaucgccgacuacaacuacaagcugcccgacgacuucaccggcugugugauugccuggaacagcaacaaccuggacuccaaagucggcggcaacuacaauuaccuguuccggcuguuccggaaguccaaucugaagcccuucgagcgggacaucagcaccgaaaucuaucaggccggcaacaccccuugcaacggcguggaaggcuucaacugcuacuucccacugcaguccuacggcuuucagcccacaaauggcgugggcuaucagcccuacagagugguggugcugagcuucgaacugcugcaugcuccugccacagugugcggcccuaagaaaagcaccaaucucgugaagaacaaaugcgugaacuucaacuucaacggccugaccggcaccggcgugcugacagagagcaacaagaaguuccugccauuccagcaguuuggccgggauaucgccgauaccacagacgccguuagagauccccagacacuggaaauccuggacaucaccccaugcagcuucggcggagugucugugaucaccccuggcaccaacaccagcaaucagguggcagugcuguaccagggcgugaacuguaccgaagugcccguggccauucacgccgaucagcugacaccuacauggcggguguacuccaccggcagcaauguguuucagaccagagccggcugucugaucggagccgagcacgugaacaauagcuacgagugcgacauccccaucggcgcuggcaucugugccagcuaccagacacagacaaacagccccagacgggcuagaagcguggccagccagagcgugauugccuacacaaugucucugggcgccgagaacagcguggccuacuccaacaacucuaucgcuauccccaccaacuucaccaucagcgugaccaccgagauccugccuguguccaugaccaagaccagcguggacugcaccauguacaucugcggcgauuccaccgagugcuccaaccugcugcugcaguacggcagcuucugcacccagcugaauagagcccugacagggaucgccguggaacaggacaagaacacccaagagguguucgcccaagugaagcaaaucuacaagaccccuccuaucaaggacuucggcggcuucaauuucagccagauucugcccgauccuagcaagcccagcaagcggagcuucaucgaggaccugcuguucaacaaagugacacuggccgacgccggcuucaucaagcaguauggcgauugucugggcgacauugccgccagggaucugauuugcgcccagaaguuuaacggacugacagugcugccuccucugcugaccgaugagaugaucgcccaguacacaucugcccugcuggccggcacaaucacaagcggcuggacauuuggagcuggcgccgcucugcagauccccuuugcuaugcagauggccuaccgguucaacggcaucggagugacccagaaugugcuguacgagaaccagaagcugaucgccaaccaguucaacagcgccaucggcaagauccaggacagccugagcagcacagcaagcgcccugggaaagcugcaggacguggucaaccagaaugcccaggcacugaacacccuggucaagcagcuguccuccaacuucggcgccaucagcucugugcugaacgauauccugagcagacuggacaaggucgaggccgaggugcagaucgacagacugaucacaggcagacugcagagccuccagacauacgugacccagcagcugaucagagccgccgagauuagagccucugccaaucuggccgccaccaagaugucugagugugugcugggccagagcaagagaguggacuuuugcggcaagggcuaccaccugaugagcuucccucagucugccccucacggcgugguguuucugcacgugacauaugugcccgcucaagagaagaauuucaccaccgcuccagccaucugccacgacggcaaagcccacuuuccuagagaaggcguguucguguccaacggcacccauugguucgugacacagcggaacuucuacgagccccagaucaucaccaccgacaacaccuucgugucuggcaacugcgacguugugaucggcauugugaacaauaccguguacgacccucugcagcccgagcuggacagcuucaaagaggaacuggacaaguacuuuaagaaccacacaagccccgacguggaccugggcgauaucagcggaaucaaugccagcgucgugaacauccagaaagagaucgaccggcugaacgagguggccaagaaucugaacgagagccugaucgaccugcaagaacuggggaaguacgagcaguacaucaaguggcccugguacaucuggcugggcuuuaucgccggacugauugccaucgugauggucacaaucaugcuguguugcaugaccagcugcuguagcugccugaagggcuguuguagcuguggcagcugcugcaaguucgacgaggacgauucugagcccgugcugaagggcgugaaacugcacuacaccugaggacuagucccuguucccagagcccacuuuuuuuucuuuuuuugaaauaaaauagccugucuuucagaucuaaaaaaaaaaaaaaaaaaaaaaaaaaaaaaaaaaaaaaaaaaaaaaaaaaaaaaaaaaaaaaaaaaaaaaaaaaaaaaaaaaaaaaaaaaaaaaaaaaaa

SEQ ID NO: 24812 - RNA, 4064 nt, Artificial Sequence
  SARS-CoV-2/Wuhan/WIV05/2019__EPI_ISL_402128 spike protein mRNA gc mod (1-1273)(H69del_V70del_Y453F_D614G_I692V_M1229I)
aggagagucccgcagucggcguccagcggcucugcuuguucgugugugugucguugcaggccuuauucaagcuuaccauguucguguuucuggugcugcugccccugguguccagccagugugugaaccugaccaccagaacacagcugccuccagccuacaccaacagcuucaccagaggcguguacuaccccgacaagguguucagauccagcgugcugcacucuacccaggaccuguuccugccuuucuucagcaacgugaccugguuccacgccaucuccggcaccaauggcaccaagagauucgacaaccccgugcugcccuucaacgacgggguguacuuugccagcaccgagaaguccaacaucaucagaggcuggaucuucggcaccacacuggacagcaagacccagagccugcugaucgugaacaacgccaccaacguggucaucaaagugugcgaguuccaguucugcaacgaccccuuccugggcgucuacuaccacaagaacaacaagagcuggauggaaagcgaguuccggguguacagcagcgccaacaacugcaccuucgaguacgugucccagccuuuccugauggaccuggaaggcaagcagggcaacuucaagaaccugcgcgaguucguguucaagaacaucgacggcuacuucaaaaucuacagcaagcacaccccuaucaaccucgugcgggaucugccucagggcuucucugcucuggaaccccugguggaucugcccaucggcaucaacaucacccgguuucagacacugcuggcccugcacagaagcuaccugacaccuggcgauagcagcagcggauggacagcuggugccgccgcuuacuaugugggcuaccugcagccuagaaccuuccugcugaaguacaacgagaacggcaccaucaccgacgccguggauugugcucuggauccucugagcgagacaaagugcacccugaaguccuucaccguggaaaagggcaucuaccagaccagcaacuuccgggugcagcccaccgaauccaucgugcgguuccccaauaucaccaaucugugccccuucggcgagguguucaaugccaccagauucgccucuguguacgccuggaaccggaagcggaucagcaauugcguggccgacuacuccgugcuguacaacuccgccagcuucagcaccuucaagugcuacggcguguccccuaccaagcugaacgaccugugcuucacaaacguguacgccgacagcuucgugauccggggagaugaagugcggcagauugccccuggacagacaggcaagaucgccgacuacaacuacaagcugcccgacgacuucaccggcugugugauugccuggaacagcaacaaccuggacuccaaagucggcggcaacuacaauuaccuguuccggcuguuccggaaguccaaucugaagcccuucgagcgggacaucagcaccgaaaucuaucaggccggcagcaccccuugcaacggcguggaaggcuucaacugcuacuucccacugcaguccuacggcuuucagcccacaaauggcgugggcuaucagcccuacagagugguggugcugagcuucgaacugcugcaugcuccugccacagugugcggcccuaagaaaagcaccaaucucgugaagaacaaaugcgugaacuucaacuucaacggccugaccggcaccggcgugcugacagagagcaacaagaaguuccugccauuccagcaguuuggccgggauaucgccgauaccacagacgccguuagagauccccagacacuggaaauccuggacaucaccccaugcagcuucggcggagugucugugaucaccccuggcaccaacaccagcaaucagguggcagugcuguaccagggcgugaacuguaccgaagugcccguggccauucacgccgaucagcugacaccuacauggcggguguacuccaccggcagcaauguguuucagaccagagccggcugucugaucggagccgagcacgugaacaauagcuacgagugcgacauccccaucggcgcuggcaucugugccagcuaccagacacagacaaacagccccagacgggcuagaagcguggccagccagagcgugauugccuacacaaugucucugggcgccgagaacagcguggccuacuccaacaacucuaucgcuauccccaccaacuucaccaucagcgugaccaccgagauccugccuguguccaugaccaagaccagcguggacugcaccauguacaucugcggcgauuccaccgagugcuccaaccugcugcugcaguacggcagcuucugcacccagcugaauagagcccugacagggaucgccguggaacaggacaagaacacccaagagguguucgcccaagugaagcaaaucuacaagaccccuccuaucaaggacuucggcggcuucaauuucagccagauucugcccgauccuagcaagcccagcaagcggagcuucaucgaggaccugcuguucaacaaagugacacuggccgacgccggcuucaucaagcaguauggcgauugucugggcgacauugccgccagggaucugauuugcgcccagaaguuuaacggacugacagugcugccuccucugcugaccgaugagaugaucgcccaguacacaucugcccugcuggccggcacaaucacaagcggcuggacauuuggagcuggcgccgcucugcagauccccuuugcuaugcagauggccuaccgguucaacggcaucggagugacccagaaugugcuguacgagaaccagaagcugaucgccaaccaguucaacagcgccaucggcaagauccaggacagccugagcagcacagcaagcgcccugggaaagcugcaggacguggucaaccagaaugcccaggcacugaacacccuggucaagcagcuguccuccaacuucggcgccaucagcucugugcugaacgauauccugagcagacuggacaaggucgaggccgaggugcagaucgacagacugaucacaggcagacugcagagccuccagacauacgugacccagcagcugaucagagccgccgagauuagagccucugccaaucuggccgccaccaagaugucugagugugugcugggccagagcaagagaguggacuuuugcggcaagggcuaccaccugaugagcuucccucagucugccccucacggcgugguguuucugcacgugacauaugugcccgcucaagagaagaauuucaccaccgcuccagccaucugccacgacggcaaagcccacuuuccuagagaaggcguguucguguccaacggcacccauugguucgugacacagcggaacuucuacgagccccagaucaucaccaccgacaacaccuucgugucuggcaacugcgacguugugaucggcauugugaacaauaccguguacgacccucugcagcccgagcuggacagcuucaaagaggaacuggacaaguacuuuaagaaccacacaagccccgacguggaccugggcgauaucagcggaaucaaugccagcgucgugaacauccagaaagagaucgaccggcugaacgagguggccaagaaucugaacgagagccugaucgaccugcaagaacuggggaaguacgagcaguacaucaaguggcccugguacaucuggcugggcuuuaucgccggacugauugccaucgugaucgucacaaucaugcuguguugcaugaccagcugcuguagcugccugaagggcuguuguagcuguggcagcugcugcaaguucgacgaggacgauucugagcccgugcugaagggcgugaaacugcacuacaccugaggacuagucccuguucccagagcccacuuuuuuuucuuuuuuugaaauaaaauagccugucuuucagaucuaaaaaaaaaaaaaaaaaaaaaaaaaaaaaaaaaaaaaaaaaaaaaaaaaaaaaaaaaaaaaaaaaaaaaaaaaaaaaaaaaaaaaaaaaaaaaaaaaaaa

SEQ ID NO: 24813 - RNA, 4061 nt, Artificial Sequence
  SARS-CoV-2/Wuhan/WIV05/2019__EPI_ISL_402128 spike protein mRNA gc mod (1-1273)(H69del_V70del_Y144del_N501Y_A570D_D614G_P681H_T716I_S982 A_D1118H)
aggagagucccgcagucggcguccagcggcucugcuuguucgugugugugucguugcaggccuuauucaagcuuaccauguucguguuucuggugcugcugccccugguguccagccagugugugaaccugaccaccagaacacagcugccuccagccuacaccaacagcuucaccagaggcguguacuaccccgacaagguguucagauccagcgugcugcacucuacccaggaccuguuccugccuuucuucagcaacgugaccugguuccacgccaucuccggcaccaauggcaccaagagauucgacaaccccgugcugcccuucaacgacgggguguacuuugccagcaccgagaaguccaacaucaucagaggcuggaucuucggcaccacacuggacagcaagacccagagccugcugaucgugaacaacgccaccaacguggucaucaaagugugcgaguuccaguucugcaacgaccccuuccugggcgucuaccacaagaacaacaagagcuggauggaaagcgaguuccggguguacagcagcgccaacaacugcaccuucgaguacgugucccagccuuuccugauggaccuggaaggcaagcagggcaacuucaagaaccugcgcgaguucguguucaagaacaucgacggcuacuucaaaaucuacagcaagcacaccccuaucaaccucgugcgggaucugccucagggcuucucugcucuggaaccccugguggaucugcccaucggcaucaacaucacccgguuucagacacugcuggcccugcacagaagcuaccugacaccuggcgauagcagcagcggauggacagcuggugccgccgcuuacuaugugggcuaccugcagccuagaaccuuccugcugaaguacaacgagaacggcaccaucaccgacgccguggauugugcucuggauccucugagcgagacaaagugcacccugaaguccuucaccguggaaaagggcaucuaccagaccagcaacuuccgggugcagcccaccgaauccaucgugcgguuccccaauaucaccaaucugugccccuucggcgagguguucaaugccaccagauucgccucuguguacgccuggaaccggaagcggaucagcaauugcguggccgacuacuccgugcuguacaacuccgccagcuucagcaccuucaagugcuacggcguguccccuaccaagcugaacgaccugugcuucacaaacguguacgccgacagcuucgugauccggggagaugaagugcggcagauugccccuggacagacaggcaagaucgccgacuacaacuacaagcugcccgacgacuucaccggcugugugauugccuggaacagcaacaaccuggacuccaaagucggcggcaacuacaauuaccuguaccggcuguuccggaaguccaaucugaagcccuucgagcgggacaucagcaccgaaaucuaucaggccggcagcaccccuugcaacggcguggaaggcuucaacugcuacuucccacugcaguccuacggcuuucagcccacauacggcgugggcuaucagcccuacagagugguggugcugagcuucgaacugcugcaugcuccugccacagugugcggcccuaagaaaagcaccaaucucgugaagaacaaaugcgugaacuucaacuucaacggccugaccggcaccggcgugcugacagagagcaacaagaaguuccugccauuccagcaguuuggccgggauaucgacgauaccacagacgccguuagagauccccagacacuggaaauccuggacaucaccccaugcagcuucggcggagugucugugaucaccccuggcaccaacaccagcaaucagguggcagugcuguaccagggcgugaacuguaccgaagugcccguggccauucacgccgaucagcugacaccuacauggcggguguacuccaccggcagcaauguguuucagaccagagccggcugucugaucggagccgagcacgugaacaauagcuacgagugcgacauccccaucggcgcuggcaucugugccagcuaccagacacagacaaacagccacagacgggcuagaagcguggccagccagagcaucauugccuacacaaugucucugggcgccgagaacagcguggccuacuccaacaacucuaucgcuauccccaucaacuucaccaucagcgugaccaccgagauccugccuguguccaugaccaagaccagcguggacugcaccauguacaucugcggcgauuccaccgagugcuccaaccugcugcugcaguacggcagcuucugcacccagcugaauagagcccugacagggaucgccguggaacaggacaagaacacccaagagguguucgcccaagugaagcaaaucuacaagaccccuccuaucaaggacuucggcggcuucaauuucagccagauucugcccgauccuagcaagcccagcaagcggagcuucaucgaggaccugcuguucaacaaagugacacuggccgacgccggcuucaucaagcaguauggcgauugucugggcgacauugccgccagggaucugauuugcgcccagaaguuuaacggacugacagugcugccuccucugcugaccgaugagaugaucgcccaguacacaucugcccugcuggccggcacaaucacaagcggcuggacauuuggagcuggcgccgcucugcagauccccuuugcuaugcagauggccuaccgguucaacggcaucggagugacccagaaugugcuguacgagaaccagaagcugaucgccaaccaguucaacagcgccaucggcaagauccaggacagccugagcagcacagcaagcgcccugggaaagcugcaggacguggucaaccagaaugcccaggcacugaacacccuggucaagcagcuguccuccaacuucggcgccaucagcucugugcugaacgauauccuggccagacuggacaaggucgaggccgaggugcagaucgacagacugaucacaggcagacugcagagccuccagacauacgugacccagcagcugaucagagccgccgagauuagagccucugccaaucuggccgccaccaagaugucugagugugugcugggccagagcaagagaguggacuuuugcggcaagggcuaccaccugaugagcuucccucagucugccccucacggcgugguguuucugcacgugacauaugugcccgcucaagagaagaauuucaccaccgcuccagccaucugccacgacggcaaagcccacuuuccuagagaaggcguguucguguccaacggcacccauugguucgugacacagcggaacuucuacgagccccagaucaucaccacccacaacaccuucgugucuggcaacugcgacguugugaucggcauugugaacaauaccguguacgacccucugcagcccgagcuggacagcuucaaagaggaacuggacaaguacuuuaagaaccacacaagccccgacguggaccugggcgauaucagcggaaucaaugccagcgucgugaacauccagaaagagaucgaccggcugaacgagguggccaagaaucugaacgagagccugaucgaccugcaagaacuggggaaguacgagcaguacaucaaguggcccugguacaucuggcugggcuuuaucgccggacugauugccaucgugauggucacaaucaugcuguguugcaugaccagcugcuguagcugccugaagggcuguuguagcuguggcagcugcugcaaguucgacgaggacgauucugagcccgugcugaagggcgugaaacugcacuacaccugaggacuagucccuguucccagagcccacuuuuuuuucuuuuuuugaaauaaaauagccugucuuucagaucuaaaaaaaaaaaaaaaaaaaaaaaaaaaaaaaaaaaaaaaaaaaaaaaaaaaaaaaaaaaaaaaaaaaaaaaaaaaaaaaaaaaaaaaaaaaaaaaaaaaa

SEQ ID NO: 24814 - RNA, 4070 nt, Artificial Sequence
  SARS-CoV-2/Wuhan/WIV05/2019__EPI_ISL_402128 spike protein mRNA gc mod (1-1273)(K417N_E484K_N501Y_D614G)
aggagagucccgcagucggcguccagcggcucugcuuguucgugugugugucguugcaggccuuauucaagcuuaccauguucguguuucuggugcugcugccccugguguccagccagugugugaaccugaccaccagaacacagcugccuccagccuacaccaacagcuucaccagaggcguguacuaccccgacaagguguucagauccagcgugcugcacucuacccaggaccuguuccugccuuucuucagcaacgugaccugguuccacgccauccacguguccggcaccaauggcaccaagagauucgacaaccccgugcugcccuucaacgacgggguguacuuugccagcaccgagaaguccaacaucaucagaggcuggaucuucggcaccacacuggacagcaagacccagagccugcugaucgugaacaacgccaccaacguggucaucaaagugugcgaguuccaguucugcaacgaccccuuccugggcgucuacuaccacaagaacaacaagagcuggauggaaagcgaguuccggguguacagcagcgccaacaacugcaccuucgaguacgugucccagccuuuccugauggaccuggaaggcaagcagggcaacuucaagaaccugcgcgaguucguguucaagaacaucgacggcuacuucaaaaucuacagcaagcacaccccuaucaaccucgugcgggaucugccucagggcuucucugcucuggaaccccugguggaucugcccaucggcaucaacaucacccgguuucagacacugcuggcccugcacagaagcuaccugacaccuggcgauagcagcagcggauggacagcuggugccgccgcuuacuaugugggcuaccugcagccuagaaccuuccugcugaaguacaacgagaacggcaccaucaccgacgccguggauugugcucuggauccucugagcgagacaaagugcacccugaaguccuucaccguggaaaagggcaucuaccagaccagcaacuuccgggugcagcccaccgaauccaucgugcgguuccccaauaucaccaaucugugccccuucggcgagguguucaaugccaccagauucgccucuguguacgccuggaaccggaagcggaucagcaauugcguggccgacuacuccgugcuguacaacuccgccagcuucagcaccuucaagugcuacggcguguccccuaccaagcugaacgaccugugcuucacaaacguguacgccgacagcuucgugauccggggagaugaagugcggcagauugccccuggacagacaggcaacaucgccgacuacaacuacaagcugcccgacgacuucaccggcugugugauugccuggaacagcaacaaccuggacuccaaagucggcggcaacuacaauuaccuguaccggcuguuccggaaguccaaucugaagcccuucgagcgggacaucagcaccgaaaucuaucaggccggcagcaccccuugcaacggcgugaagggcuucaacugcuacuucccacugcaguccuacggcuuucagcccacauacggcgugggcuaucagcccuacagagugguggugcugagcuucgaacugcugcaugcuccugccacagugugcggcccuaagaaaagcaccaaucucgugaagaacaaaugcgugaacuucaacuucaacggccugaccggcaccggcgugcugacagagagcaacaagaaguuccugccauuccagcaguuuggccgggauaucgccgauaccacagacgccguuagagauccccagacacuggaaauccuggacaucaccccaugcagcuucggcggagugucugugaucaccccuggcaccaacaccagcaaucagguggcagugcuguaccagggcgugaacuguaccgaagugcccguggccauucacgccgaucagcugacaccuacauggcggguguacuccaccggcagcaauguguuucagaccagagccggcugucugaucggagccgagcacgugaacaauagcuacgagugcgacauccccaucggcgcuggcaucugugccagcuaccagacacagacaaacagccccagacgggcuagaagcguggccagccagagcaucauugccuacacaaugucucugggcgccgagaacagcguggccuacuccaacaacucuaucgcuauccccaccaacuucaccaucagcgugaccaccgagauccugccuguguccaugaccaagaccagcguggacugcaccauguacaucugcggcgauuccaccgagugcuccaaccugcugcugcaguacggcagcuucugcacccagcugaauagagcccugacagggaucgccguggaacaggacaagaacacccaagagguguucgcccaagugaagcaaaucuacaagaccccuccuaucaaggacuucggcggcuucaauuucagccagauucugcccgauccuagcaagcccagcaagcggagcuucaucgaggaccugcuguucaacaaagugacacuggccgacgccggcuucaucaagcaguauggcgauugucugggcgacauugccgccagggaucugauuugcgcccagaaguuuaacggacugacagugcugccuccucugcugaccgaugagaugaucgcccaguacacaucugcccugcuggccggcacaaucacaagcggcuggacauuuggagcuggcgccgcucugcagauccccuuugcuaugcagauggccuaccgguucaacggcaucggagugacccagaaugugcuguacgagaaccagaagcugaucgccaaccaguucaacagcgccaucggcaagauccaggacagccugagcagcacagcaagcgcccugggaaagcugcaggacguggucaaccagaaugcccaggcacugaacacccuggucaagcagcuguccuccaacuucggcgccaucagcucugugcugaacgauauccugagcagacuggacaaggucgaggccgaggugcagaucgacagacugaucacaggcagacugcagagccuccagacauacgugacccagcagcugaucagagccgccgagauuagagccucugccaaucuggccgccaccaagaugucugagugugugcugggccagagcaagagaguggacuuuugcggcaagggcuaccaccugaugagcuucccucagucugccccucacggcgugguguuucugcacgugacauaugugcccgcucaagagaagaauuucaccaccgcuccagccaucugccacgacggcaaagcccacuuuccuagagaaggcguguucguguccaacggcacccauugguucgugacacagcggaacuucuacgagccccagaucaucaccaccgacaacaccuucgugucuggcaacugcgacguugugaucggcauugugaacaauaccguguacgacccucugcagcccgagcuggacagcuucaaagaggaacuggacaaguacuuuaagaaccacacaagccccgacguggaccugggcgauaucagcggaaucaaugccagcgucgugaacauccagaaagagaucgaccggcugaacgagguggccaagaaucugaacgagagccugaucgaccugcaagaacuggggaaguacgagcaguacaucaaguggcccugguacaucuggcugggcuuuaucgccggacugauugccaucgugauggucacaaucaugcuguguugcaugaccagcugcuguagcugccugaagggcuguuguagcuguggcagcugcugcaaguucgacgaggacgauucugagcccgugcugaagggcgugaaacugcacuacaccugaggacuagucccuguucccagagcccacuuuuuuuucuuuuuuugaaauaaaauagccugucuuucagaucuaaaaaaaaaaaaaaaaaaaaaaaaaaaaaaaaaaaaaaaaaaaaaaaaaaaaaaaaaaaaaaaaaaaaaaaaaaaaaaaaaaaaaaaaaaaaaaaaaaaa

SEQ ID NO: 24815 - RNA, 4061 nt, Artificial Sequence
  SARS-CoV-2/Wuhan/WIV05/2019__EPI_ISL_402128 spike protein mRNA gc mod (1-1273)(L18F_D80A_D215G_L242del_A243del_L244del_R246I_K417N_E484 K_N501Y_D614G_A701V)
aggagagucccgcagucggcguccagcggcucugcuuguucgugugugugucguugcaggccuuauucaagcuuaccauguucguguuucuggugcugcugccccugguguccagccagugugugaacuucaccaccagaacacagcugccuccagccuacaccaacagcuucaccagaggcguguacuaccccgacaagguguucagauccagcgugcugcacucuacccaggaccuguuccugccuuucuucagcaacgugaccugguuccacgccauccacguguccggcaccaauggcaccaagagauucgccaaccccgugcugcccuucaacgacgggguguacuuugccagcaccgagaaguccaacaucaucagaggcuggaucuucggcaccacacuggacagcaagacccagagccugcugaucgugaacaacgccaccaacguggucaucaaagugugcgaguuccaguucugcaacgaccccuuccugggcgucuacuaccacaagaacaacaagagcuggauggaaagcgaguuccggguguacagcagcgccaacaacugcaccuucgaguacgugucccagccuuuccugauggaccuggaaggcaagcagggcaacuucaagaaccugcgcgaguucguguucaagaacaucgacggcuacuucaaaaucuacagcaagcacaccccuaucaaccucgugcggggccugccucagggcuucucugcucuggaaccccugguggaucugcccaucggcaucaacaucacccgguuucagacacugcacaucagcuaccugacaccuggcgauagcagcagcggauggacagcuggugccgccgcuuacuaugugggcuaccugcagccuagaaccuuccugcugaaguacaacgagaacggcaccaucaccgacgccguggauugugcucuggauccucugagcgagacaaagugcacccugaaguccuucaccguggaaaagggcaucuaccagaccagcaacuuccgggugcagcccaccgaauccaucgugcgguuccccaauaucaccaaucugugccccuucggcgagguguucaaugccaccagauucgccucuguguacgccuggaaccggaagcggaucagcaauugcguggccgacuacuccgugcuguacaacuccgccagcuucagcaccuucaagugcuacggcguguccccuaccaagcugaacgaccugugcuucacaaacguguacgccgacagcuucgugauccggggagaugaagugcggcagauugccccuggacagacaggcaacaucgccgacuacaacuacaagcugcccgacgacuucaccggcugugugauugccuggaacagcaacaaccuggacuccaaagucggcggcaacuacaauuaccuguaccggcuguuccggaaguccaaucugaagcccuucgagcgggacaucagcaccgaaaucuaucaggccggcagcaccccuugcaacggcgugaagggcuucaacugcuacuucccacugcaguccuacggcuuucagcccacauacggcgugggcuaucagcccuacagagugguggugcugagcuucgaacugcugcaugcuccugccacagugugcggcccuaagaaaagcaccaaucucgugaagaacaaaugcgugaacuucaacuucaacggccugaccggcaccggcgugcugacagagagcaacaagaaguuccugccauuccagcaguuuggccgggauaucgccgauaccacagacgccguuagagauccccagacacuggaaauccuggacaucaccccaugcagcuucggcggagugucugugaucaccccuggcaccaacaccagcaaucagguggcagugcuguaccagggcgugaacuguaccgaagugcccguggccauucacgccgaucagcugacaccuacauggcggguguacuccaccggcagcaauguguuucagaccagagccggcugucugaucggagccgagcacgugaacaauagcuacgagugcgacauccccaucggcgcuggcaucugugccagcuaccagacacagacaaacagccccagacgggcuagaagcguggccagccagagcaucauugccuacacaaugucucugggcguggagaacagcguggccuacuccaacaacucuaucgcuauccccaccaacuucaccaucagcgugaccaccgagauccugccuguguccaugaccaagaccagcguggacugcaccauguacaucugcggcgauuccaccgagugcuccaaccugcugcugcaguacggcagcuucugcacccagcugaauagagcccugacagggaucgccguggaacaggacaagaacacccaagagguguucgcccaagugaagcaaaucuacaagaccccuccuaucaaggacuucggcggcuucaauuucagccagauucugcccgauccuagcaagcccagcaagcggagcuucaucgaggaccugcuguucaacaaagugacacuggccgacgccggcuucaucaagcaguauggcgauugucugggcgacauugccgccagggaucugauuugcgcccagaaguuuaacggacugacagugcugccuccucugcugaccgaugagaugaucgcccaguacacaucugcccugcuggccggcacaaucacaagcggcuggacauuuggagcuggcgccgcucugcagauccccuuugcuaugcagauggccuaccgguucaacggcaucggagugacccagaaugugcuguacgagaaccagaagcugaucgccaaccaguucaacagcgccaucggcaagauccaggacagccugagcagcacagcaagcgcccugggaaagcugcaggacguggucaaccagaaugcccaggcacugaacacccuggucaagcagcuguccuccaacuucggcgccaucagcucugugcugaacgauauccugagcagacuggacaaggucgaggccgaggugcagaucgacagacugaucacaggcagacugcagagccuccagacauacgugacccagcagcugaucagagccgccgagauuagagccucugccaaucuggccgccaccaagaugucugagugugugcugggccagagcaagagaguggacuuuugcggcaagggcuaccaccugaugagcuucccucagucugccccucacggcgugguguuucugcacgugacauaugugcccgcucaagagaagaauuucaccaccgcuccagccaucugccacgacggcaaagcccacuuuccuagagaaggcguguucguguccaacggcacccauugguucgugacacagcggaacuucuacgagccccagaucaucaccaccgacaacaccuucgugucuggcaacugcgacguugugaucggcauugugaacaauaccguguacgacccucugcagcccgagcuggacagcuucaaagaggaacuggacaaguacuuuaagaaccacacaagccccgacguggaccugggcgauaucagcggaaucaaugccagcgucgugaacauccagaaagagaucgaccggcugaacgagguggccaagaaucugaacgagagccugaucgaccugcaagaacuggggaaguacgagcaguacaucaaguggcccugguacaucuggcugggcuuuaucgccggacugauugccaucgugauggucacaaucaugcuguguugcaugaccagcugcuguagcugccugaagggcuguuguagcuguggcagcugcugcaaguucgacgaggacgauucugagcccgugcugaagggcgugaaacugcacuacaccugaggacuagucccuguucccagagcccacuuuuuuuucuuuuuuugaaauaaaauagccugucuuucagaucuaaaaaaaaaaaaaaaaaaaaaaaaaaaaaaaaaaaaaaaaaaaaaaaaaaaaaaaaaaaaaaaaaaaaaaaaaaaaaaaaaaaaaaaaaaaaaaaaaaaa

SEQ ID NO: 24816 - RNA, 4070 nt, Artificial Sequence
  SARS-CoV-2/Wuhan/WIV05/2019__EPI_ISL_402128 spike protein mRNA gc mod (1-1273)(E484K_D614G)
aggagagucccgcagucggcguccagcggcucugcuuguucgugugugugucguugcaggccuuauucaagcuuaccauguucguguuucuggugcugcugccccugguguccagccagugugugaaccugaccaccagaacacagcugccuccagccuacaccaacagcuucaccagaggcguguacuaccccgacaagguguucagauccagcgugcugcacucuacccaggaccuguuccugccuuucuucagcaacgugaccugguuccacgccauccacguguccggcaccaauggcaccaagagauucgacaaccccgugcugcccuucaacgacgggguguacuuugccagcaccgagaaguccaacaucaucagaggcuggaucuucggcaccacacuggacagcaagacccagagccugcugaucgugaacaacgccaccaacguggucaucaaagugugcgaguuccaguucugcaacgaccccuuccugggcgucuacuaccacaagaacaacaagagcuggauggaaagcgaguuccggguguacagcagcgccaacaacugcaccuucgaguacgugucccagccuuuccugauggaccuggaaggcaagcagggcaacuucaagaaccugcgcgaguucguguucaagaacaucgacggcuacuucaaaaucuacagcaagcacaccccuaucaaccucgugcgggaucugccucagggcuucucugcucuggaaccccugguggaucugcccaucggcaucaacaucacccgguuucagacacugcuggcccugcacagaagcuaccugacaccuggcgauagcagcagcggauggacagcuggugccgccgcuuacuaugugggcuaccugcagccuagaaccuuccugcugaaguacaacgagaacggcaccaucaccgacgccguggauugugcucuggauccucugagcgagacaaagugcacccugaaguccuucaccguggaaaagggcaucuaccagaccagcaacuuccgggugcagcccaccgaauccaucgugcgguuccccaauaucaccaaucugugccccuucggcgagguguucaaugccaccagauucgccucuguguacgccuggaaccggaagcggaucagcaauugcguggccgacuacuccgugcuguacaacuccgccagcuucagcaccuucaagugcuacggcguguccccuaccaagcugaacgaccugugcuucacaaacguguacgccgacagcuucgugauccggggagaugaagugcggcagauugccccuggacagacaggcaagaucgccgacuacaacuacaagcugcccgacgacuucaccggcugugugauugccuggaacagcaacaaccuggacuccaaagucggcggcaacuacaauuaccuguaccggcuguuccggaaguccaaucugaagcccuucgagcgggacaucagcaccgaaaucuaucaggccggcagcaccccuugcaacggcgugaagggcuucaacugcuacuucccacugcaguccuacggcuuucagcccacaaauggcgugggcuaucagcccuacagagugguggugcugagcuucgaacugcugcaugcuccugccacagugugcggcccuaagaaaagcaccaaucucgugaagaacaaaugcgugaacuucaacuucaacggccugaccggcaccggcgugcugacagagagcaacaagaaguuccugccauuccagcaguuuggccgggauaucgccgauaccacagacgccguuagagauccccagacacuggaaauccuggacaucaccccaugcagcuucggcggagugucugugaucaccccuggcaccaacaccagcaaucagguggcagugcuguaccagggcgugaacuguaccgaagugcccguggccauucacgccgaucagcugacaccuacauggcggguguacuccaccggcagcaauguguuucagaccagagccggcugucugaucggagccgagcacgugaacaauagcuacgagugcgacauccccaucggcgcuggcaucugugccagcuaccagacacagacaaacagccccagacgggcuagaagcguggccagccagagcaucauugccuacacaaugucucugggcgccgagaacagcguggccuacuccaacaacucuaucgcuauccccaccaacuucaccaucagcgugaccaccgagauccugccuguguccaugaccaagaccagcguggacugcaccauguacaucugcggcgauuccaccgagugcuccaaccugcugcugcaguacggcagcuucugcacccagcugaauagagcccugacagggaucgccguggaacaggacaagaacacccaagagguguucgcccaagugaagcaaaucuacaagaccccuccuaucaaggacuucggcggcuucaauuucagccagauucugcccgauccuagcaagcccagcaagcggagcuucaucgaggaccugcuguucaacaaagugacacuggccgacgccggcuucaucaagcaguauggcgauugucugggcgacauugccgccagggaucugauuugcgcccagaaguuuaacggacugacagugcugccuccucugcugaccgaugagaugaucgcccaguacacaucugcccugcuggccggcacaaucacaagcggcuggacauuuggagcuggcgccgcucugcagauccccuuugcuaugcagauggccuaccgguucaacggcaucggagugacccagaaugugcuguacgagaaccagaagcugaucgccaaccaguucaacagcgccaucggcaagauccaggacagccugagcagcacagcaagcgcccugggaaagcugcaggacguggucaaccagaaugcccaggcacugaacacccuggucaagcagcuguccuccaacuucggcgccaucagcucugugcugaacgauauccugagcagacuggacaaggucgaggccgaggugcagaucgacagacugaucacaggcagacugcagagccuccagacauacgugacccagcagcugaucagagccgccgagauuagagccucugccaaucuggccgccaccaagaugucugagugugugcugggccagagcaagagaguggacuuuugcggcaagggcuaccaccugaugagcuucccucagucugccccucacggcgugguguuucugcacgugacauaugugcccgcucaagagaagaauuucaccaccgcuccagccaucugccacgacggcaaagcccacuuuccuagagaaggcguguucguguccaacggcacccauugguucgugacacagcggaacuucuacgagccccagaucaucaccaccgacaacaccuucgugucuggcaacugcgacguugugaucggcauugugaacaauaccguguacgacccucugcagcccgagcuggacagcuucaaagaggaacuggacaaguacuuuaagaaccacacaagccccgacguggaccugggcgauaucagcggaaucaaugccagcgucgugaacauccagaaagagaucgaccggcugaacgagguggccaagaaucugaacgagagccugaucgaccugcaagaacuggggaaguacgagcaguacaucaaguggcccugguacaucuggcugggcuuuaucgccggacugauugccaucgugauggucacaaucaugcuguguugcaugaccagcugcuguagcugccugaagggcuguuguagcuguggcagcugcugcaaguucgacgaggacgauucugagcccgugcugaagggcgugaaacugcacuacaccugaggacuagucccuguucccagagcccacuuuuuuuucuuuuuuugaaauaaaauagccugucuuucagaucuaaaaaaaaaaaaaaaaaaaaaaaaaaaaaaaaaaaaaaaaaaaaaaaaaaaaaaaaaaaaaaaaaaaaaaaaaaaaaaaaaaaaaaaaaaaaaaaaaaaa

SEQ ID NO: 24817 - RNA, 4070 nt, Artificial Sequence
  SARS-CoV-2/Wuhan/WIV05/2019__EPI_ISL_402128 spike protein mRNA gc mod (1-1273)(L18F_T20N_P26S_D138Y_R190S_K417T_E484K_N501Y_D614G_H655Y _T1027I)
aggagagucccgcagucggcguccagcggcucugcuuguucgugugugugucguugcaggccuuauucaagcuuaccauguucguguuucuggugcugcugccccugguguccagccagugugugaacuucaccaacagaacacagcugccuagcgccuacaccaacagcuucaccagaggcguguacuaccccgacaagguguucagauccagcgugcugcacucuacccaggaccuguuccugccuuucuucagcaacgugaccugguuccacgccauccacguguccggcaccaauggcaccaagagauucgacaaccccgugcugcccuucaacgacgggguguacuuugccagcaccgagaaguccaacaucaucagaggcuggaucuucggcaccacacuggacagcaagacccagagccugcugaucgugaacaacgccaccaacguggucaucaaagugugcgaguuccaguucugcaacuaccccuuccugggcgucuacuaccacaagaacaacaagagcuggauggaaagcgaguuccggguguacagcagcgccaacaacugcaccuucgaguacgugucccagccuuuccugauggaccuggaaggcaagcagggcaacuucaagaaccugagcgaguucguguucaagaacaucgacggcuacuucaaaaucuacagcaagcacaccccuaucaaccucgugcgggaucugccucagggcuucucugcucuggaaccccugguggaucugcccaucggcaucaacaucacccgguuucagacacugcuggcccugcacagaagcuaccugacaccuggcgauagcagcagcggauggacagcuggugccgccgcuuacuaugugggcuaccugcagccuagaaccuuccugcugaaguacaacgagaacggcaccaucaccgacgccguggauugugcucuggauccucugagcgagacaaagugcacccugaaguccuucaccguggaaaagggcaucuaccagaccagcaacuuccgggugcagcccaccgaauccaucgugcgguuccccaauaucaccaaucugugccccuucggcgagguguucaaugccaccagauucgccucuguguacgccuggaaccggaagcggaucagcaauugcguggccgacuacuccgugcuguacaacuccgccagcuucagcaccuucaagugcuacggcguguccccuaccaagcugaacgaccugugcuucacaaacguguacgccgacagcuucgugauccggggagaugaagugcggcagauugccccuggacagacaggcaccaucgccgacuacaacuacaagcugcccgacgacuucaccggcugugugauugccuggaacagcaacaaccuggacuccaaagucggcggcaacuacaauuaccuguaccggcuguuccggaaguccaaucugaagcccuucgagcgggacaucagcaccgaaaucuaucaggccggcagcaccccuugcaacggcgugaagggcuucaacugcuacuucccacugcaguccuacggcuuucagcccacauacggcgugggcuaucagcccuacagagugguggugcugagcuucgaacugcugcaugcuccugccacagugugcggcccuaagaaaagcaccaaucucgugaagaacaaaugcgugaacuucaacuucaacggccugaccggcaccggcgugcugacagagagcaacaagaaguuccugccauuccagcaguuuggccgggauaucgccgauaccacagacgccguuagagauccccagacacuggaaauccuggacaucaccccaugcagcuucggcggagugucugugaucaccccuggcaccaacaccagcaaucagguggcagugcuguaccagggcgugaacuguaccgaagugcccguggccauucacgccgaucagcugacaccuacauggcggguguacuccaccggcagcaauguguuucagaccagagccggcugucugaucggagccgaguacgugaacaauagcuacgagugcgacauccccaucggcgcuggcaucugugccagcuaccagacacagacaaacagccccagacgggcuagaagcguggccagccagagcaucauugccuacacaaugucucugggcgccgagaacagcguggccuacuccaacaacucuaucgcuauccccaccaacuucaccaucagcgugaccaccgagauccugccuguguccaugaccaagaccagcguggacugcaccauguacaucugcggcgauuccaccgagugcuccaaccugcugcugcaguacggcagcuucugcacccagcugaauagagcccugacagggaucgccguggaacaggacaagaacacccaagagguguucgcccaagugaagcaaaucuacaagaccccuccuaucaaggacuucggcggcuucaauuucagccagauucugcccgauccuagcaagcccagcaagcggagcuucaucgaggaccugcuguucaacaaagugacacuggccgacgccggcuucaucaagcaguauggcgauugucugggcgacauugccgccagggaucugauuugcgcccagaaguuuaacggacugacagugcugccuccucugcugaccgaugagaugaucgcccaguacacaucugcccugcuggccggcacaaucacaagcggcuggacauuuggagcuggcgccgcucugcagauccccuuugcuaugcagauggccuaccgguucaacggcaucggagugacccagaaugugcuguacgagaaccagaagcugaucgccaaccaguucaacagcgccaucggcaagauccaggacagccugagcagcacagcaagcgcccugggaaagcugcaggacguggucaaccagaaugcccaggcacugaacacccuggucaagcagcuguccuccaacuucggcgccaucagcucugugcugaacgauauccugagcagacuggacaaggucgaggccgaggugcagaucgacagacugaucacaggcagacugcagagccuccagacauacgugacccagcagcugaucagagccgccgagauuagagccucugccaaucuggccgccaucaagaugucugagugugugcugggccagagcaagagaguggacuuuugcggcaagggcuaccaccugaugagcuucccucagucugccccucacggcgugguguuucugcacgugacauaugugcccgcucaagagaagaauuucaccaccgcuccagccaucugccacgacggcaaagcccacuuuccuagagaaggcguguucguguccaacggcacccauugguucgugacacagcggaacuucuacgagccccagaucaucaccaccgacaacaccuucgugucuggcaacugcgacguugugaucggcauugugaacaauaccguguacgacccucugcagcccgagcuggacagcuucaaagaggaacuggacaaguacuuuaagaaccacacaagccccgacguggaccugggcgauaucagcggaaucaaugccagcgucgugaacauccagaaagagaucgaccggcugaacgagguggccaagaaucugaacgagagccugaucgaccugcaagaacuggggaaguacgagcaguacaucaaguggcccugguacaucuggcugggcuuuaucgccggacugauugccaucgugauggucacaaucaugcuguguugcaugaccagcugcuguagcugccugaagggcuguuguagcuguggcagcugcugcaaguucgacgaggacgauucugagcccgugcugaagggcgugaaacugcacuacaccugaggacuagucccuguucccagagcccacuuuuuuuucuuuuuuugaaauaaaauagccugucuuucagaucuaaaaaaaaaaaaaaaaaaaaaaaaaaaaaaaaaaaaaaaaaaaaaaaaaaaaaaaaaaaaaaaaaaaaaaaaaaaaaaaaaaaaaaaaaaaaaaaaaaaa

SEQ ID NO: 24818 - RNA, 4070 nt, Artificial Sequence
  SARS-CoV-2/Wuhan/WIV05/2019__EPI_ISL_402128 spike protein mRNA gc mod (1-1273)(S13I_W152C_L452R_D614G)
aggagagucccgcagucggcguccagcggcucugcuuguucgugugugugucguugcaggccuuauucaagcuuaccauguucguguuucuggugcugcugccccugguguccauccagugugugaaccugaccaccagaacacagcugccuccagccuacaccaacagcuucaccagaggcguguacuaccccgacaagguguucagauccagcgugcugcacucuacccaggaccuguuccugccuuucuucagcaacgugaccugguuccacgccauccacguguccggcaccaauggcaccaagagauucgacaaccccgugcugcccuucaacgacgggguguacuuugccagcaccgagaaguccaacaucaucagaggcuggaucuucggcaccacacuggacagcaagacccagagccugcugaucgugaacaacgccaccaacguggucaucaaagugugcgaguuccaguucugcaacgaccccuuccugggcgucuacuaccacaagaacaacaagagcugcauggaaagcgaguuccggguguacagcagcgccaacaacugcaccuucgaguacgugucccagccuuuccugauggaccuggaaggcaagcagggcaacuucaagaaccugcgcgaguucguguucaagaacaucgacggcuacuucaaaaucuacagcaagcacaccccuaucaaccucgugcgggaucugccucagggcuucucugcucuggaaccccugguggaucugcccaucggcaucaacaucacccgguuucagacacugcuggcccugcacagaagcuaccugacaccuggcgauagcagcagcggauggacagcuggugccgccgcuuacuaugugggcuaccugcagccuagaaccuuccugcugaaguacaacgagaacggcaccaucaccgacgccguggauugugcucuggauccucugagcgagacaaagugcacccugaaguccuucaccguggaaaagggcaucuaccagaccagcaacuuccgggugcagcccaccgaauccaucgugcgguuccccaauaucaccaaucugugccccuucggcgagguguucaaugccaccagauucgccucuguguacgccuggaaccggaagcggaucagcaauugcguggccgacuacuccgugcuguacaacuccgccagcuucagcaccuucaagugcuacggcguguccccuaccaagcugaacgaccugugcuucacaaacguguacgccgacagcuucgugauccggggagaugaagugcggcagauugccccuggacagacaggcaagaucgccgacuacaacuacaagcugcccgacgacuucaccggcugugugauugccuggaacagcaacaaccuggacuccaaagucggcggcaacuacaauuaccgcuaccggcuguuccggaaguccaaucugaagcccuucgagcgggacaucagcaccgaaaucuaucaggccggcagcaccccuugcaacggcguggaaggcuucaacugcuacuucccacugcaguccuacggcuuucagcccacaaauggcgugggcuaucagcccuacagagugguggugcugagcuucgaacugcugcaugcuccugccacagugugcggcccuaagaaaagcaccaaucucgugaagaacaaaugcgugaacuucaacuucaacggccugaccggcaccggcgugcugacagagagcaacaagaaguuccugccauuccagcaguuuggccgggauaucgccgauaccacagacgccguuagagauccccagacacuggaaauccuggacaucaccccaugcagcuucggcggagugucugugaucaccccuggcaccaacaccagcaaucagguggcagugcuguaccagggcgugaacuguaccgaagugcccguggccauucacgccgaucagcugacaccuacauggcggguguacuccaccggcagcaauguguuucagaccagagccggcugucugaucggagccgagcacgugaacaauagcuacgagugcgacauccccaucggcgcuggcaucugugccagcuaccagacacagacaaacagccccagacgggcuagaagcguggccagccagagcaucauugccuacacaaugucucugggcgccgagaacagcguggccuacuccaacaacucuaucgcuauccccaccaacuucaccaucagcgugaccaccgagauccugccuguguccaugaccaagaccagcguggacugcaccauguacaucugcggcgauuccaccgagugcuccaaccugcugcugcaguacggcagcuucugcacccagcugaauagagcccugacagggaucgccguggaacaggacaagaacacccaagagguguucgcccaagugaagcaaaucuacaagaccccuccuaucaaggacuucggcggcuucaauuucagccagauucugcccgauccuagcaagcccagcaagcggagcuucaucgaggaccugcuguucaacaaagugacacuggccgacgccggcuucaucaagcaguauggcgauugucugggcgacauugccgccagggaucugauuugcgcccagaaguuuaacggacugacagugcugccuccucugcugaccgaugagaugaucgcccaguacacaucugcccugcuggccggcacaaucacaagcggcuggacauuuggagcuggcgccgcucugcagauccccuuugcuaugcagauggccuaccgguucaacggcaucggagugacccagaaugugcuguacgagaaccagaagcugaucgccaaccaguucaacagcgccaucggcaagauccaggacagccugagcagcacagcaagcgcccugggaaagcugcaggacguggucaaccagaaugcccaggcacugaacacccuggucaagcagcuguccuccaacuucggcgccaucagcucugugcugaacgauauccugagcagacuggacaaggucgaggccgaggugcagaucgacagacugaucacaggcagacugcagagccuccagacauacgugacccagcagcugaucagagccgccgagauuagagccucugccaaucuggccgccaccaagaugucugagugugugcugggccagagcaagagaguggacuuuugcggcaagggcuaccaccugaugagcuucccucagucugccccucacggcgugguguuucugcacgugacauaugugcccgcucaagagaagaauuucaccaccgcuccagccaucugccacgacggcaaagcccacuuuccuagagaaggcguguucguguccaacggcacccauugguucgugacacagcggaacuucuacgagccccagaucaucaccaccgacaacaccuucgugucuggcaacugcgacguugugaucggcauugugaacaauaccguguacgacccucugcagcccgagcuggacagcuucaaagaggaacuggacaaguacuuuaagaaccacacaagccccgacguggaccugggcgauaucagcggaaucaaugccagcgucgugaacauccagaaagagaucgaccggcugaacgagguggccaagaaucugaacgagagccugaucgaccugcaagaacuggggaaguacgagcaguacaucaaguggcccugguacaucuggcugggcuuuaucgccggacugauugccaucgugauggucacaaucaugcuguguugcaugaccagcugcuguagcugccugaagggcuguuguagcuguggcagcugcugcaaguucgacgaggacgauucugagcccgugcugaagggcgugaaacugcacuacaccugaggacuagucccuguucccagagcccacuuuuuuuucuuuuuuugaaauaaaauagccugucuuucagaucuaaaaaaaaaaaaaaaaaaaaaaaaaaaaaaaaaaaaaaaaaaaaaaaaaaaaaaaaaaaaaaaaaaaaaaaaaaaaaaaaaaaaaaaaaaaaaaaaaaaa

SEQ ID NO: 24819 - RNA, 4070 nt, Artificial Sequence
  SARS-CoV-2/Wuhan/WIV05/2019__EPI_ISL_402128 spike protein mRNA gc mod (1-1273)
aggagagucccgcagucggcguccagcggcucugcuuguucgugugugugucguugcaggccuuauucaagcuuaccauguucguguuccuggugcugcugccucugguguccagccagugugugaaccugaccaccagaacacagcugccuccagccuacaccaacagcuuuaccagaggcguguacuaccccgacaagguguucagauccagcgugcugcacucuacccaggaccuguuccugccuuucuucagcaacgugaccugguuccacgccauccacguguccggcaccaauggcaccaagagauucgacaaccccgugcugcccuucaacgacgggguguacuuugccagcaccgagaaguccaacaucaucagaggcuggaucuucggcaccacacuggacagcaagacccagagccugcugaucgugaacaacgccaccaacguggucaucaaagugugcgaguuccaguucugcaacgaccccuuccugggcgucuacuaccacaagaacaacaagagcuggauggaaagcgaguuccggguguacagcagcgccaacaacugcaccuucgaguacgugucccagccuuuccugauggaccuggaaggcaagcagggcaacuucaagaaccugcgcgaguucguguuuaagaacaucgacggcuacuucaagaucuacagcaagcacaccccuaucaaccucgugcgggaucugccucagggcuucucugcucuggaaccccugguggaucugcccaucggcaucaacaucacccgguuucagacacugcuggcccugcacagaagcuaccugacaccuggcgauagcagcagcggauggacagcuggugccgccgcuuacuaugugggcuaccugcagccuagaaccuuccugcugaaguacaacgagaacggcaccaucaccgacgccguggauugugcucuggauccucugagcgagacaaagugcacccugaaguccuucaccguggaaaagggcaucuaccagaccagcaacuuccgggugcagcccaccgaauccaucgugcgguuccccaauaucaccaaucugugccccuucggcgagguguucaaugccaccagauucgccucuguguacgccuggaaccggaagcggaucagcaauugcguggccgacuacuccgugcuguacaacuccgccagcuucagcaccuucaagugcuacggcguguccccuaccaagcugaacgaccugugcuucacaaacguguacgccgacagcuucgugauccggggagaugaagugcggcagauugccccuggacagacaggcaagaucgccgacuacaacuacaagcugcccgacgacuucaccggcugugugauugccuggaacagcaacaaccuggacuccaaagucggcggcaacuacaauuaccuguaccggcuguuccggaaguccaaucugaagcccuucgagcgggacaucuccaccgagaucuaucaggccggcagcaccccuuguaacggcguggaaggcuucaacugcuacuucccacugcaguccuacggcuuucagcccacaaauggcgugggcuaucagcccuacagagugguggugcugagcuucgaacugcugcaugccccugccacagugugcggcccuaagaaaagcaccaaucucgugaagaacaaaugcgugaacuucaacuucaacggccugaccggcaccggcgugcugacagagagcaacaagaaguuccugccauuccagcaguuuggccgggauaucgccgauaccacagacgccguuagagauccccagacacuggaaauccuggacaucaccccuugcagcuucggcggagugucugugaucaccccuggcaccaacaccagcaaucagguggcagugcuguaccaggacgugaacuguaccgaagugcccguggccauucacgccgaucagcugacaccuacauggcggguguacuccaccggcagcaauguguuucagaccagagccggcugucugaucggagccgagcacgugaacaauagcuacgagugcgacauccccaucggcgcuggaaucugcgccagcuaccagacacagacaaacagcccucggagagccagaagcguggccagccagagcaucauugccuacacaaugucucugggcgccgagaacagcguggccuacuccaacaacucuaucgcuauccccaccaacuucaccaucagcgugaccacagagauccugccuguguccaugaccaagaccagcguggacugcaccauguacaucugcggcgauuccaccgagugcuccaaccugcugcugcaguacggcagcuucugcacccagcugaauagagcccugacagggaucgccguggaacaggacaagaacacccaagagguguucgcccaagugaagcagaucuacaagaccccuccuaucaaggacuucggcggcuucaauuucagccagauucugcccgauccuagcaagcccagcaagcggagcuucaucgaggaccugcuguucaacaaagugacacuggccgacgccggcuucaucaagcaguauggcgauugucugggcgacauugccgccagggaucugauuugcgcccagaaguuuaacggacugacagugcugccuccucugcugaccgaugagaugaucgcccaguacacaucugcccugcuggccggcacaaucacaagcggcuggacauuuggagcaggcgccgcucugcagauccccuuugcuaugcagauggccuaccgguucaacggcaucggagugacccagaaugugcuguacgagaaccagaagcugaucgccaaccaguucaacagcgccaucggcaagauccaggacagccugagcagcacagcaagcgcccugggaaagcugcaggacguggucaaccagaaugcccaggcacugaacacccuggucaagcagcuguccuccaacuucggcgccaucagcucugugcugaacgauauccugagcagacuggacaaggucgaggccgaggugcagaucgacagacugaucacaggcagacugcagagccuccagacauacgugacccagcagcugaucagagccgccgagauuagagccucugccaaucuggccgccaccaagaugucugagugugugcugggccagagcaagagaguggacuuuugcggcaagggcuaccaccugaugagcuucccucagucugccccucacggcgugguguuucugcacgugacauaugugcccgcucaagagaagaauuucaccaccgcuccagccaucugccacgacggcaaagcccacuuuccuagagaaggcguguucguguccaacggcacccauugguucgugacacagcggaacuucuacgagccccagaucaucaccaccgacaacaccuucgugucuggcaacugcgacgucgugaucggcauugugaacaauaccguguacgacccucugcagcccgagcuggacagcuucaaagaggaacuggacaaguacuuuaagaaccacacaagccccgacguggaccugggcgauaucagcggaaucaaugccagcgucgugaacauccagaaagagaucgaccggcugaacgagguggccaagaaucugaacgagagccugaucgaccugcaagaacuggggaaguacgagcaguacaucaaguggcccugguacaucuggcugggcuuuaucgccggacugauugccaucgugauggucacaaucaugcuguguugcaugaccagcugcuguagcugccugaagggcuguuguagcuguggcagcugcugcaaguucgacgaggacgauucugagcccgugcugaagggcgugaaacugcacuacacaugaggacuagucccuguucccagagcccacuuuuuuuucuuuuuuugaaauaaaauagccugucuuucagaucuaaaaaaaaaaaaaaaaaaaaaaaaaaaaaaaaaaaaaaaaaaaaaaaaaaaaaaaaaaaaaaaaaaaaaaaaaaaaaaaaaaaaaaaaaaaaaaaaaaaa

SEQ ID NO: 24820 - RNA, 4070 nt, Artificial Sequence
  SARS-CoV-2/Wuhan/WIV05/2019__EPI_ISL_402128 spike protein mRNA gc mod (1-1273)(D614G)
aggagagucccgcagucggcguccagcggcucugcuuguucgugugugugucguugcaggccuuauucaagcuuaccauguucguguuccuggugcugcugccucugguguccagccagugugugaaccugaccaccagaacacagcugccuccagccuacaccaacagcuuuaccagaggcguguacuaccccgacaagguguucagauccagcgugcugcacucuacccaggaccuguuccugccuuucuucagcaacgugaccugguuccacgccauccacguguccggcaccaauggcaccaagagauucgacaaccccgugcugcccuucaacgacgggguguacuuugccagcaccgagaaguccaacaucaucagaggcuggaucuucggcaccacacuggacagcaagacccagagccugcugaucgugaacaacgccaccaacguggucaucaaagugugcgaguuccaguucugcaacgaccccuuccugggcgucuacuaccacaagaacaacaagagcuggauggaaagcgaguuccggguguacagcagcgccaacaacugcaccuucgaguacgugucccagccuuuccugauggaccuggaaggcaagcagggcaacuucaagaaccugcgcgaguucguguuuaagaacaucgacggcuacuucaagaucuacagcaagcacaccccuaucaaccucgugcgggaucugccucagggcuucucugcucuggaaccccugguggaucugcccaucggcaucaacaucacccgguuucagacacugcuggcccugcacagaagcuaccugacaccuggcgauagcagcagcggauggacagcuggugccgccgcuuacuaugugggcuaccugcagccuagaaccuuccugcugaaguacaacgagaacggcaccaucaccgacgccguggauugugcucuggauccucugagcgagacaaagugcacccugaaguccuucaccguggaaaagggcaucuaccagaccagcaacuuccgggugcagcccaccgaauccaucgugcgguuccccaauaucaccaaucugugccccuucggcgagguguucaaugccaccagauucgccucuguguacgccuggaaccggaagcggaucagcaauugcguggccgacuacuccgugcuguacaacuccgccagcuucagcaccuucaagugcuacggcguguccccuaccaagcugaacgaccugugcuucacaaacguguacgccgacagcuucgugauccggggagaugaagugcggcagauugccccuggacagacaggcaagaucgccgacuacaacuacaagcugcccgacgacuucaccggcugugugauugccuggaacagcaacaaccuggacuccaaagucggcggcaacuacaauuaccuguaccggcuguuccggaaguccaaucugaagcccuucgagcgggacaucuccaccgagaucuaucaggccggcagcaccccuuguaacggcguggaaggcuucaacugcuacuucccacugcaguccuacggcuuucagcccacaaauggcgugggcuaucagcccuacagagugguggugcugagcuucgaacugcugcaugccccugccacagugugcggcccuaagaaaagcaccaaucucgugaagaacaaaugcgugaacuucaacuucaacggccugaccggcaccggcgugcugacagagagcaacaagaaguuccugccauuccagcaguuuggccgggauaucgccgauaccacagacgccguuagagauccccagacacuggaaauccuggacaucaccccuugcagcuucggcggagugucugugaucaccccuggcaccaacaccagcaaucagguggcagugcuguaccagggcgugaacuguaccgaagugcccguggccauucacgccgaucagcugacaccuacauggcggguguacuccaccggcagcaauguguuucagaccagagccggcugucugaucggagccgagcacgugaacaauagcuacgagugcgacauccccaucggcgcuggaaucugcgccagcuaccagacacagacaaacagcccucggagagccagaagcguggccagccagagcaucauugccuacacaaugucucugggcgccgagaacagcguggccuacuccaacaacucuaucgcuauccccaccaacuucaccaucagcgugaccacagagauccugccuguguccaugaccaagaccagcguggacugcaccauguacaucugcggcgauuccaccgagugcuccaaccugcugcugcaguacggcagcuucugcacccagcugaauagagcccugacagggaucgccguggaacaggacaagaacacccaagagguguucgcccaagugaagcagaucuacaagaccccuccuaucaaggacuucggcggcuucaauuucagccagauucugcccgauccuagcaagcccagcaagcggagcuucaucgaggaccugcuguucaacaaagugacacuggccgacgccggcuucaucaagcaguauggcgauugucugggcgacauugccgccagggaucugauuugcgcccagaaguuuaacggacugacagugcugccuccucugcugaccgaugagaugaucgcccaguacacaucugcccugcuggccggcacaaucacaagcggcuggacauuuggagcaggcgccgcucugcagauccccuuugcuaugcagauggccuaccgguucaacggcaucggagugacccagaaugugcuguacgagaaccagaagcugaucgccaaccaguucaacagcgccaucggcaagauccaggacagccugagcagcacagcaagcgcccugggaaagcugcaggacguggucaaccagaaugcccaggcacugaacacccuggucaagcagcuguccuccaacuucggcgccaucagcucugugcugaacgauauccugagcagacuggacaaggucgaggccgaggugcagaucgacagacugaucacaggcagacugcagagccuccagacauacgugacccagcagcugaucagagccgccgagauuagagccucugccaaucuggccgccaccaagaugucugagugugugcugggccagagcaagagaguggacuuuugcggcaagggcuaccaccugaugagcuucccucagucugccccucacggcgugguguuucugcacgugacauaugugcccgcucaagagaagaauuucaccaccgcuccagccaucugccacgacggcaaagcccacuuuccuagagaaggcguguucguguccaacggcacccauugguucgugacacagcggaacuucuacgagccccagaucaucaccaccgacaacaccuucgugucuggcaacugcgacgucgugaucggcauugugaacaauaccguguacgacccucugcagcccgagcuggacagcuucaaagaggaacuggacaaguacuuuaagaaccacacaagccccgacguggaccugggcgauaucagcggaaucaaugccagcgucgugaacauccagaaagagaucgaccggcugaacgagguggccaagaaucugaacgagagccugaucgaccugcaagaacuggggaaguacgagcaguacaucaaguggcccugguacaucuggcugggcuuuaucgccggacugauugccaucgugauggucacaaucaugcuguguugcaugaccagcugcuguagcugccugaagggcuguuguagcuguggcagcugcugcaaguucgacgaggacgauucugagcccgugcugaagggcgugaaacugcacuacacaugaggacuagucccuguucccagagcccacuuuuuuuucuuuuuuugaaauaaaauagccugucuuucagaucuaaaaaaaaaaaaaaaaaaaaaaaaaaaaaaaaaaaaaaaaaaaaaaaaaaaaaaaaaaaaaaaaaaaaaaaaaaaaaaaaaaaaaaaaaaaaaaaaaaaa

SEQ ID NO: 24821 - RNA, 4070 nt, Artificial Sequence
  SARS-CoV-2/Wuhan/WIV05/2019__EPI_ISL_402128 spike protein mRNA gc mod (1-1273)(A222V_D614G)
aggagagucccgcagucggcguccagcggcucugcuuguucgugugugugucguugcaggccuuauucaagcuuaccauguucguguuccuggugcugcugccucugguguccagccagugugugaaccugaccaccagaacacagcugccuccagccuacaccaacagcuuuaccagaggcguguacuaccccgacaagguguucagauccagcgugcugcacucuacccaggaccuguuccugccuuucuucagcaacgugaccugguuccacgccauccacguguccggcaccaauggcaccaagagauucgacaaccccgugcugcccuucaacgacgggguguacuuugccagcaccgagaaguccaacaucaucagaggcuggaucuucggcaccacacuggacagcaagacccagagccugcugaucgugaacaacgccaccaacguggucaucaaagugugcgaguuccaguucugcaacgaccccuuccugggcgucuacuaccacaagaacaacaagagcuggauggaaagcgaguuccggguguacagcagcgccaacaacugcaccuucgaguacgugucccagccuuuccugauggaccuggaaggcaagcagggcaacuucaagaaccugcgcgaguucguguuuaagaacaucgacggcuacuucaagaucuacagcaagcacaccccuaucaaccucgugcgggaucugccucagggcuucucugugcuggaaccccugguggaucugcccaucggcaucaacaucacccgguuucagacacugcuggcccugcacagaagcuaccugacaccuggcgauagcagcagcggauggacagcuggugccgccgcuuacuaugugggcuaccugcagccuagaaccuuccugcugaaguacaacgagaacggcaccaucaccgacgccguggauugugcucuggauccucugagcgagacaaagugcacccugaaguccuucaccguggaaaagggcaucuaccagaccagcaacuuccgggugcagcccaccgaauccaucgugcgguuccccaauaucaccaaucugugccccuucggcgagguguucaaugccaccagauucgccucuguguacgccuggaaccggaagcggaucagcaauugcguggccgacuacuccgugcuguacaacuccgccagcuucagcaccuucaagugcuacggcguguccccuaccaagcugaacgaccugugcuucacaaacguguacgccgacagcuucgugauccggggagaugaagugcggcagauugccccuggacagacaggcaagaucgccgacuacaacuacaagcugcccgacgacuucaccggcugugugauugccuggaacagcaacaaccuggacuccaaagucggcggcaacuacaauuaccuguaccggcuguuccggaaguccaaucugaagcccuucgagcgggacaucuccaccgagaucuaucaggccggcagcaccccuuguaacggcguggaaggcuucaacugcuacuucccacugcaguccuacggcuuucagcccacaaauggcgugggcuaucagcccuacagagugguggugcugagcuucgaacugcugcaugccccugccacagugugcggcccuaagaaaagcaccaaucucgugaagaacaaaugcgugaacuucaacuucaacggccugaccggcaccggcgugcugacagagagcaacaagaaguuccugccauuccagcaguuuggccgggauaucgccgauaccacagacgccguuagagauccccagacacuggaaauccuggacaucaccccuugcagcuucggcggagugucugugaucaccccuggcaccaacaccagcaaucagguggcagugcuguaccagggcgugaacuguaccgaagugcccguggccauucacgccgaucagcugacaccuacauggcggguguacuccaccggcagcaauguguuucagaccagagccggcugucugaucggagccgagcacgugaacaauagcuacgagugcgacauccccaucggcgcuggaaucugcgccagcuaccagacacagacaaacagcccucggagagccagaagcguggccagccagagcaucauugccuacacaaugucucugggcgccgagaacagcguggccuacuccaacaacucuaucgcuauccccaccaacuucaccaucagcgugaccacagagauccugccuguguccaugaccaagaccagcguggacugcaccauguacaucugcggcgauuccaccgagugcuccaaccugcugcugcaguacggcagcuucugcacccagcugaauagagcccugacagggaucgccguggaacaggacaagaacacccaagagguguucgcccaagugaagcagaucuacaagaccccuccuaucaaggacuucggcggcuucaauuucagccagauucugcccgauccuagcaagcccagcaagcggagcuucaucgaggaccugcuguucaacaaagugacacuggccgacgccggcuucaucaagcaguauggcgauugucugggcgacauugccgccagggaucugauuugcgcccagaaguuuaacggacugacagugcugccuccucugcugaccgaugagaugaucgcccaguacacaucugcccugcuggccggcacaaucacaagcggcuggacauuuggagcaggcgccgcucugcagauccccuuugcuaugcagauggccuaccgguucaacggcaucggagugacccagaaugugcuguacgagaaccagaagcugaucgccaaccaguucaacagcgccaucggcaagauccaggacagccugagcagcacagcaagcgcccugggaaagcugcaggacguggucaaccagaaugcccaggcacugaacacccuggucaagcagcuguccuccaacuucggcgccaucagcucugugcugaacgauauccugagcagacuggacaaggucgaggccgaggugcagaucgacagacugaucacaggcagacugcagagccuccagacauacgugacccagcagcugaucagagccgccgagauuagagccucugccaaucuggccgccaccaagaugucugagugugugcugggccagagcaagagaguggacuuuugcggcaagggcuaccaccugaugagcuucccucagucugccccucacggcgugguguuucugcacgugacauaugugcccgcucaagagaagaauuucaccaccgcuccagccaucugccacgacggcaaagcccacuuuccuagagaaggcguguucguguccaacggcacccauugguucgugacacagcggaacuucuacgagccccagaucaucaccaccgacaacaccuucgugucuggcaacugcgacgucgugaucggcauugugaacaauaccguguacgacccucugcagcccgagcuggacagcuucaaagaggaacuggacaaguacuuuaagaaccacacaagccccgacguggaccugggcgauaucagcggaaucaaugccagcgucgugaacauccagaaagagaucgaccggcugaacgagguggccaagaaucugaacgagagccugaucgaccugcaagaacuggggaaguacgagcaguacaucaaguggcccugguacaucuggcugggcuuuaucgccggacugauugccaucgugauggucacaaucaugcuguguugcaugaccagcugcuguagcugccugaagggcuguuguagcuguggcagcugcugcaaguucgacgaggacgauucugagcccgugcugaagggcgugaaacugcacuacacaugaggacuagucccuguucccagagcccacuuuuuuuucuuuuuuugaaauaaaauagccugucuuucagaucuaaaaaaaaaaaaaaaaaaaaaaaaaaaaaaaaaaaaaaaaaaaaaaaaaaaaaaaaaaaaaaaaaaaaaaaaaaaaaaaaaaaaaaaaaaaaaaaaaaaa

SEQ ID NO: 24822 - RNA, 4070 nt, Artificial Sequence
  SARS-CoV-2/Wuhan/WIV05/2019__EPI_ISL_402128 spike protein mRNA gc mod (1-1273)(N439K_D614G)
aggagagucccgcagucggcguccagcggcucugcuuguucgugugugugucguugcaggccuuauucaagcuuaccauguucguguuccuggugcugcugccucugguguccagccagugugugaaccugaccaccagaacacagcugccuccagccuacaccaacagcuuuaccagaggcguguacuaccccgacaagguguucagauccagcgugcugcacucuacccaggaccuguuccugccuuucuucagcaacgugaccugguuccacgccauccacguguccggcaccaauggcaccaagagauucgacaaccccgugcugcccuucaacgacgggguguacuuugccagcaccgagaaguccaacaucaucagaggcuggaucuucggcaccacacuggacagcaagacccagagccugcugaucgugaacaacgccaccaacguggucaucaaagugugcgaguuccaguucugcaacgaccccuuccugggcgucuacuaccacaagaacaacaagagcuggauggaaagcgaguuccggguguacagcagcgccaacaacugcaccuucgaguacgugucccagccuuuccugauggaccuggaaggcaagcagggcaacuucaagaaccugcgcgaguucguguuuaagaacaucgacggcuacuucaagaucuacagcaagcacaccccuaucaaccucgugcgggaucugccucagggcuucucugcucuggaaccccugguggaucugcccaucggcaucaacaucacccgguuucagacacugcuggcccugcacagaagcuaccugacaccuggcgauagcagcagcggauggacagcuggugccgccgcuuacuaugugggcuaccugcagccuagaaccuuccugcugaaguacaacgagaacggcaccaucaccgacgccguggauugugcucuggauccucugagcgagacaaagugcacccugaaguccuucaccguggaaaagggcaucuaccagaccagcaacuuccgggugcagcccaccgaauccaucgugcgguuccccaauaucaccaaucugugccccuucggcgagguguucaaugccaccagauucgccucuguguacgccuggaaccggaagcggaucagcaauugcguggccgacuacuccgugcuguacaacuccgccagcuucagcaccuucaagugcuacggcguguccccuaccaagcugaacgaccugugcuucacaaacguguacgccgacagcuucgugauccggggagaugaagugcggcagauugccccuggacagacaggcaagaucgccgacuacaacuacaagcugcccgacgacuucaccggcugugugauugccuggaacagcaagaaccuggacuccaaagucggcggcaacuacaauuaccuguaccggcuguuccggaaguccaaucugaagcccuucgagcgggacaucuccaccgagaucuaucaggccggcagcaccccuuguaacggcguggaaggcuucaacugcuacuucccacugcaguccuacggcuuucagcccacaaauggcgugggcuaucagcccuacagagugguggugcugagcuucgaacugcugcaugccccugccacagugugcggcccuaagaaaagcaccaaucucgugaagaacaaaugcgugaacuucaacuucaacggccugaccggcaccggcgugcugacagagagcaacaagaaguuccugccauuccagcaguuuggccgggauaucgccgauaccacagacgccguuagagauccccagacacuggaaauccuggacaucaccccuugcagcuucggcggagugucugugaucaccccuggcaccaacaccagcaaucagguggcagugcuguaccagggcgugaacuguaccgaagugcccguggccauucacgccgaucagcugacaccuacauggcggguguacuccaccggcagcaauguguuucagaccagagccggcugucugaucggagccgagcacgugaacaauagcuacgagugcgacauccccaucggcgcuggaaucugcgccagcuaccagacacagacaaacagcccucggagagccagaagcguggccagccagagcaucauugccuacacaaugucucugggcgccgagaacagcguggccuacuccaacaacucuaucgcuauccccaccaacuucaccaucagcgugaccacagagauccugccuguguccaugaccaagaccagcguggacugcaccauguacaucugcggcgauuccaccgagugcuccaaccugcugcugcaguacggcagcuucugcacccagcugaauagagcccugacagggaucgccguggaacaggacaagaacacccaagagguguucgcccaagugaagcagaucuacaagaccccuccuaucaaggacuucggcggcuucaauuucagccagauucugcccgauccuagcaagcccagcaagcggagcuucaucgaggaccugcuguucaacaaagugacacuggccgacgccggcuucaucaagcaguauggcgauugucugggcgacauugccgccagggaucugauuugcgcccagaaguuuaacggacugacagugcugccuccucugcugaccgaugagaugaucgcccaguacacaucugcccugcuggccggcacaaucacaagcggcuggacauuuggagcaggcgccgcucugcagauccccuuugcuaugcagauggccuaccgguucaacggcaucggagugacccagaaugugcuguacgagaaccagaagcugaucgccaaccaguucaacagcgccaucggcaagauccaggacagccugagcagcacagcaagcgcccugggaaagcugcaggacguggucaaccagaaugcccaggcacugaacacccuggucaagcagcuguccuccaacuucggcgccaucagcucugugcugaacgauauccugagcagacuggacaaggucgaggccgaggugcagaucgacagacugaucacaggcagacugcagagccuccagacauacgugacccagcagcugaucagagccgccgagauuagagccucugccaaucuggccgccaccaagaugucugagugugugcugggccagagcaagagaguggacuuuugcggcaagggcuaccaccugaugagcuucccucagucugccccucacggcgugguguuucugcacgugacauaugugcccgcucaagagaagaauuucaccaccgcuccagccaucugccacgacggcaaagcccacuuuccuagagaaggcguguucguguccaacggcacccauugguucgugacacagcggaacuucuacgagccccagaucaucaccaccgacaacaccuucgugucuggcaacugcgacgucgugaucggcauugugaacaauaccguguacgacccucugcagcccgagcuggacagcuucaaagaggaacuggacaaguacuuuaagaaccacacaagccccgacguggaccugggcgauaucagcggaaucaaugccagcgucgugaacauccagaaagagaucgaccggcugaacgagguggccaagaaucugaacgagagccugaucgaccugcaagaacuggggaaguacgagcaguacaucaaguggcccugguacaucuggcugggcuuuaucgccggacugauugccaucgugauggucacaaucaugcuguguugcaugaccagcugcuguagcugccugaagggcuguuguagcuguggcagcugcugcaaguucgacgaggacgauucugagcccgugcugaagggcgugaaacugcacuacacaugaggacuagucccuguucccagagcccacuuuuuuuucuuuuuuugaaauaaaauagccugucuuucagaucuaaaaaaaaaaaaaaaaaaaaaaaaaaaaaaaaaaaaaaaaaaaaaaaaaaaaaaaaaaaaaaaaaaaaaaaaaaaaaaaaaaaaaaaaaaaaaaaaaaaa

SEQ ID NO: 24823 - RNA, 4070 nt, Artificial Sequence
  SARS-CoV-2/Wuhan/WIV05/2019__EPI_ISL_402128 spike protein mRNA gc mod (1-1273)(S477N_D614G)
aggagagucccgcagucggcguccagcggcucugcuuguucgugugugugucguugcaggccuuauucaagcuuaccauguucguguuccuggugcugcugccucugguguccagccagugugugaaccugaccaccagaacacagcugccuccagccuacaccaacagcuuuaccagaggcguguacuaccccgacaagguguucagauccagcgugcugcacucuacccaggaccuguuccugccuuucuucagcaacgugaccugguuccacgccauccacguguccggcaccaauggcaccaagagauucgacaaccccgugcugcccuucaacgacgggguguacuuugccagcaccgagaaguccaacaucaucagaggcuggaucuucggcaccacacuggacagcaagacccagagccugcugaucgugaacaacgccaccaacguggucaucaaagugugcgaguuccaguucugcaacgaccccuuccugggcgucuacuaccacaagaacaacaagagcuggauggaaagcgaguuccggguguacagcagcgccaacaacugcaccuucgaguacgugucccagccuuuccugauggaccuggaaggcaagcagggcaacuucaagaaccugcgcgaguucguguuuaagaacaucgacggcuacuucaagaucuacagcaagcacaccccuaucaaccucgugcgggaucugccucagggcuucucugcucuggaaccccugguggaucugcccaucggcaucaacaucacccgguuucagacacugcuggcccugcacagaagcuaccugacaccuggcgauagcagcagcggauggacagcuggugccgccgcuuacuaugugggcuaccugcagccuagaaccuuccugcugaaguacaacgagaacggcaccaucaccgacgccguggauugugcucuggauccucugagcgagacaaagugcacccugaaguccuucaccguggaaaagggcaucuaccagaccagcaacuuccgggugcagcccaccgaauccaucgugcgguuccccaauaucaccaaucugugccccuucggcgagguguucaaugccaccagauucgccucuguguacgccuggaaccggaagcggaucagcaauugcguggccgacuacuccgugcuguacaacuccgccagcuucagcaccuucaagugcuacggcguguccccuaccaagcugaacgaccugugcuucacaaacguguacgccgacagcuucgugauccggggagaugaagugcggcagauugccccuggacagacaggcaagaucgccgacuacaacuacaagcugcccgacgacuucaccggcugugugauugccuggaacagcaacaaccuggacuccaaagucggcggcaacuacaauuaccuguaccggcuguuccggaaguccaaucugaagcccuucgagcgggacaucuccaccgagaucuaucaggccggcaacaccccuuguaacggcguggaaggcuucaacugcuacuucccacugcaguccuacggcuuucagcccacaaauggcgugggcuaucagcccuacagagugguggugcugagcuucgaacugcugcaugccccugccacagugugcggcccuaagaaaagcaccaaucucgugaagaacaaaugcgugaacuucaacuucaacggccugaccggcaccggcgugcugacagagagcaacaagaaguuccugccauuccagcaguuuggccgggauaucgccgauaccacagacgccguuagagauccccagacacuggaaauccuggacaucaccccuugcagcuucggcggagugucugugaucaccccuggcaccaacaccagcaaucagguggcagugcuguaccagggcgugaacuguaccgaagugcccguggccauucacgccgaucagcugacaccuacauggcggguguacuccaccggcagcaauguguuucagaccagagccggcugucugaucggagccgagcacgugaacaauagcuacgagugcgacauccccaucggcgcuggaaucugcgccagcuaccagacacagacaaacagcccucggagagccagaagcguggccagccagagcaucauugccuacacaaugucucugggcgccgagaacagcguggccuacuccaacaacucuaucgcuauccccaccaacuucaccaucagcgugaccacagagauccugccuguguccaugaccaagaccagcguggacugcaccauguacaucugcggcgauuccaccgagugcuccaaccugcugcugcaguacggcagcuucugcacccagcugaauagagcccugacagggaucgccguggaacaggacaagaacacccaagagguguucgcccaagugaagcagaucuacaagaccccuccuaucaaggacuucggcggcuucaauuucagccagauucugcccgauccuagcaagcccagcaagcggagcuucaucgaggaccugcuguucaacaaagugacacuggccgacgccggcuucaucaagcaguauggcgauugucugggcgacauugccgccagggaucugauuugcgcccagaaguuuaacggacugacagugcugccuccucugcugaccgaugagaugaucgcccaguacacaucugcccugcuggccggcacaaucacaagcggcuggacauuuggagcaggcgccgcucugcagauccccuuugcuaugcagauggccuaccgguucaacggcaucggagugacccagaaugugcuguacgagaaccagaagcugaucgccaaccaguucaacagcgccaucggcaagauccaggacagccugagcagcacagcaagcgcccugggaaagcugcaggacguggucaaccagaaugcccaggcacugaacacccuggucaagcagcuguccuccaacuucggcgccaucagcucugugcugaacgauauccugagcagacuggacaaggucgaggccgaggugcagaucgacagacugaucacaggcagacugcagagccuccagacauacgugacccagcagcugaucagagccgccgagauuagagccucugccaaucuggccgccaccaagaugucugagugugugcugggccagagcaagagaguggacuuuugcggcaagggcuaccaccugaugagcuucccucagucugccccucacggcgugguguuucugcacgugacauaugugcccgcucaagagaagaauuucaccaccgcuccagccaucugccacgacggcaaagcccacuuuccuagagaaggcguguucguguccaacggcacccauugguucgugacacagcggaacuucuacgagccccagaucaucaccaccgacaacaccuucgugucuggcaacugcgacgucgugaucggcauugugaacaauaccguguacgacccucugcagcccgagcuggacagcuucaaagaggaacuggacaaguacuuuaagaaccacacaagccccgacguggaccugggcgauaucagcggaaucaaugccagcgucgugaacauccagaaagagaucgaccggcugaacgagguggccaagaaucugaacgagagccugaucgaccugcaagaacuggggaaguacgagcaguacaucaaguggcccugguacaucuggcugggcuuuaucgccggacugauugccaucgugauggucacaaucaugcuguguugcaugaccagcugcuguagcugccugaagggcuguuguagcuguggcagcugcugcaaguucgacgaggacgauucugagcccgugcugaagggcgugaaacugcacuacacaugaggacuagucccuguucccagagcccacuuuuuuuucuuuuuuugaaauaaaauagccugucuuucagaucuaaaaaaaaaaaaaaaaaaaaaaaaaaaaaaaaaaaaaaaaaaaaaaaaaaaaaaaaaaaaaaaaaaaaaaaaaaaaaaaaaaaaaaaaaaaaaaaaaaaa

SEQ ID NO: 24824 - RNA, 4070 nt, Artificial Sequence
  SARS-CoV-2/Wuhan/WIV05/2019__EPI_ISL_402128 spike protein mRNA gc mod (1-1273)(N501Y_D614G)
aggagagucccgcagucggcguccagcggcucugcuuguucgugugugugucguugcaggccuuauucaagcuuaccauguucguguuccuggugcugcugccucugguguccagccagugugugaaccugaccaccagaacacagcugccuccagccuacaccaacagcuuuaccagaggcguguacuaccccgacaagguguucagauccagcgugcugcacucuacccaggaccuguuccugccuuucuucagcaacgugaccugguuccacgccauccacguguccggcaccaauggcaccaagagauucgacaaccccgugcugcccuucaacgacgggguguacuuugccagcaccgagaaguccaacaucaucagaggcuggaucuucggcaccacacuggacagcaagacccagagccugcugaucgugaacaacgccaccaacguggucaucaaagugugcgaguuccaguucugcaacgaccccuuccugggcgucuacuaccacaagaacaacaagagcuggauggaaagcgaguuccggguguacagcagcgccaacaacugcaccuucgaguacgugucccagccuuuccugauggaccuggaaggcaagcagggcaacuucaagaaccugcgcgaguucguguuuaagaacaucgacggcuacuucaagaucuacagcaagcacaccccuaucaaccucgugcgggaucugccucagggcuucucugcucuggaaccccugguggaucugcccaucggcaucaacaucacccgguuucagacacugcuggcccugcacagaagcuaccugacaccuggcgauagcagcagcggauggacagcuggugccgccgcuuacuaugugggcuaccugcagccuagaaccuuccugcugaaguacaacgagaacggcaccaucaccgacgccguggauugugcucuggauccucugagcgagacaaagugcacccugaaguccuucaccguggaaaagggcaucuaccagaccagcaacuuccgggugcagcccaccgaauccaucgugcgguuccccaauaucaccaaucugugccccuucggcgagguguucaaugccaccagauucgccucuguguacgccuggaaccggaagcggaucagcaauugcguggccgacuacuccgugcuguacaacuccgccagcuucagcaccuucaagugcuacggcguguccccuaccaagcugaacgaccugugcuucacaaacguguacgccgacagcuucgugauccggggagaugaagugcggcagauugccccuggacagacaggcaagaucgccgacuacaacuacaagcugcccgacgacuucaccggcugugugauugccuggaacagcaacaaccuggacuccaaagucggcggcaacuacaauuaccuguaccggcuguuccggaaguccaaucugaagcccuucgagcgggacaucuccaccgagaucuaucaggccggcagcaccccuuguaacggcguggaaggcuucaacugcuacuucccacugcaguccuacggcuuucagcccacauacggcgugggcuaucagcccuacagagugguggugcugagcuucgaacugcugcaugccccugccacagugugcggcccuaagaaaagcaccaaucucgugaagaacaaaugcgugaacuucaacuucaacggccugaccggcaccggcgugcugacagagagcaacaagaaguuccugccauuccagcaguuuggccgggauaucgccgauaccacagacgccguuagagauccccagacacuggaaauccuggacaucaccccuugcagcuucggcggagugucugugaucaccccuggcaccaacaccagcaaucagguggcagugcuguaccagggcgugaacuguaccgaagugcccguggccauucacgccgaucagcugacaccuacauggcggguguacuccaccggcagcaauguguuucagaccagagccggcugucugaucggagccgagcacgugaacaauagcuacgagugcgacauccccaucggcgcuggaaucugcgccagcuaccagacacagacaaacagcccucggagagccagaagcguggccagccagagcaucauugccuacacaaugucucugggcgccgagaacagcguggccuacuccaacaacucuaucgcuauccccaccaacuucaccaucagcgugaccacagagauccugccuguguccaugaccaagaccagcguggacugcaccauguacaucugcggcgauuccaccgagugcuccaaccugcugcugcaguacggcagcuucugcacccagcugaauagagcccugacagggaucgccguggaacaggacaagaacacccaagagguguucgcccaagugaagcagaucuacaagaccccuccuaucaaggacuucggcggcuucaauuucagccagauucugcccgauccuagcaagcccagcaagcggagcuucaucgaggaccugcuguucaacaaagugacacuggccgacgccggcuucaucaagcaguauggcgauugucugggcgacauugccgccagggaucugauuugcgcccagaaguuuaacggacugacagugcugccuccucugcugaccgaugagaugaucgcccaguacacaucugcccugcuggccggcacaaucacaagcggcuggacauuuggagcaggcgccgcucugcagauccccuuugcuaugcagauggccuaccgguucaacggcaucggagugacccagaaugugcuguacgagaaccagaagcugaucgccaaccaguucaacagcgccaucggcaagauccaggacagccugagcagcacagcaagcgcccugggaaagcugcaggacguggucaaccagaaugcccaggcacugaacacccuggucaagcagcuguccuccaacuucggcgccaucagcucugugcugaacgauauccugagcagacuggacaaggucgaggccgaggugcagaucgacagacugaucacaggcagacugcagagccuccagacauacgugacccagcagcugaucagagccgccgagauuagagccucugccaaucuggccgccaccaagaugucugagugugugcugggccagagcaagagaguggacuuuugcggcaagggcuaccaccugaugagcuucccucagucugccccucacggcgugguguuucugcacgugacauaugugcccgcucaagagaagaauuucaccaccgcuccagccaucugccacgacggcaaagcccacuuuccuagagaaggcguguucguguccaacggcacccauugguucgugacacagcggaacuucuacgagccccagaucaucaccaccgacaacaccuucgugucuggcaacugcgacgucgugaucggcauugugaacaauaccguguacgacccucugcagcccgagcuggacagcuucaaagaggaacuggacaaguacuuuaagaaccacacaagccccgacguggaccugggcgauaucagcggaaucaaugccagcgucgugaacauccagaaagagaucgaccggcugaacgagguggccaagaaucugaacgagagccugaucgaccugcaagaacuggggaaguacgagcaguacaucaaguggcccugguacaucuggcugggcuuuaucgccggacugauugccaucgugauggucacaaucaugcuguguugcaugaccagcugcuguagcugccugaagggcuguuguagcuguggcagcugcugcaaguucgacgaggacgauucugagcccgugcugaagggcgugaaacugcacuacacaugaggacuagucccuguucccagagcccacuuuuuuuucuuuuuuugaaauaaaauagccugucuuucagaucuaaaaaaaaaaaaaaaaaaaaaaaaaaaaaaaaaaaaaaaaaaaaaaaaaaaaaaaaaaaaaaaaaaaaaaaaaaaaaaaaaaaaaaaaaaaaaaaaaaaa

SEQ ID NO: 24825 - RNA, 4064 nt, Artificial Sequence
  SARS-CoV-2/Wuhan/WIV05/2019__EPI_ISL_402128 spike protein mRNA gc mod (1-1273)(H69del_V70del_D614G)
aggagagucccgcagucggcguccagcggcucugcuuguucgugugugugucguugcaggccuuauucaagcuuaccauguucguguuccuggugcugcugccucugguguccagccagugugugaaccugaccaccagaacacagcugccuccagccuacaccaacagcuuuaccagaggcguguacuaccccgacaagguguucagauccagcgugcugcacucuacccaggaccuguuccugccuuucuucagcaacgugaccugguuccacgccaucuccggcaccaauggcaccaagagauucgacaaccccgugcugcccuucaacgacgggguguacuuugccagcaccgagaaguccaacaucaucagaggcuggaucuucggcaccacacuggacagcaagacccagagccugcugaucgugaacaacgccaccaacguggucaucaaagugugcgaguuccaguucugcaacgaccccuuccugggcgucuacuaccacaagaacaacaagagcuggauggaaagcgaguuccggguguacagcagcgccaacaacugcaccuucgaguacgugucccagccuuuccugauggaccuggaaggcaagcagggcaacuucaagaaccugcgcgaguucguguuuaagaacaucgacggcuacuucaagaucuacagcaagcacaccccuaucaaccucgugcgggaucugccucagggcuucucugcucuggaaccccugguggaucugcccaucggcaucaacaucacccgguuucagacacugcuggcccugcacagaagcuaccugacaccuggcgauagcagcagcggauggacagcuggugccgccgcuuacuaugugggcuaccugcagccuagaaccuuccugcugaaguacaacgagaacggcaccaucaccgacgccguggauugugcucuggauccucugagcgagacaaagugcacccugaaguccuucaccguggaaaagggcaucuaccagaccagcaacuuccgggugcagcccaccgaauccaucgugcgguuccccaauaucaccaaucugugccccuucggcgagguguucaaugccaccagauucgccucuguguacgccuggaaccggaagcggaucagcaauugcguggccgacuacuccgugcuguacaacuccgccagcuucagcaccuucaagugcuacggcguguccccuaccaagcugaacgaccugugcuucacaaacguguacgccgacagcuucgugauccggggagaugaagugcggcagauugccccuggacagacaggcaagaucgccgacuacaacuacaagcugcccgacgacuucaccggcugugugauugccuggaacagcaacaaccuggacuccaaagucggcggcaacuacaauuaccuguaccggcuguuccggaaguccaaucugaagcccuucgagcgggacaucuccaccgagaucuaucaggccggcagcaccccuuguaacggcguggaaggcuucaacugcuacuucccacugcaguccuacggcuuucagcccacaaauggcgugggcuaucagcccuacagagugguggugcugagcuucgaacugcugcaugccccugccacagugugcggcccuaagaaaagcaccaaucucgugaagaacaaaugcgugaacuucaacuucaacggccugaccggcaccggcgugcugacagagagcaacaagaaguuccugccauuccagcaguuuggccgggauaucgccgauaccacagacgccguuagagauccccagacacuggaaauccuggacaucaccccuugcagcuucggcggagugucugugaucaccccuggcaccaacaccagcaaucagguggcagugcuguaccagggcgugaacuguaccgaagugcccguggccauucacgccgaucagcugacaccuacauggcggguguacuccaccggcagcaauguguuucagaccagagccggcugucugaucggagccgagcacgugaacaauagcuacgagugcgacauccccaucggcgcuggaaucugcgccagcuaccagacacagacaaacagcccucggagagccagaagcguggccagccagagcaucauugccuacacaaugucucugggcgccgagaacagcguggccuacuccaacaacucuaucgcuauccccaccaacuucaccaucagcgugaccacagagauccugccuguguccaugaccaagaccagcguggacugcaccauguacaucugcggcgauuccaccgagugcuccaaccugcugcugcaguacggcagcuucugcacccagcugaauagagcccugacagggaucgccguggaacaggacaagaacacccaagagguguucgcccaagugaagcagaucuacaagaccccuccuaucaaggacuucggcggcuucaauuucagccagauucugcccgauccuagcaagcccagcaagcggagcuucaucgaggaccugcuguucaacaaagugacacuggccgacgccggcuucaucaagcaguauggcgauugucugggcgacauugccgccagggaucugauuugcgcccagaaguuuaacggacugacagugcugccuccucugcugaccgaugagaugaucgcccaguacacaucugcccugcuggccggcacaaucacaagcggcuggacauuuggagcaggcgccgcucugcagauccccuuugcuaugcagauggccuaccgguucaacggcaucggagugacccagaaugugcuguacgagaaccagaagcugaucgccaaccaguucaacagcgccaucggcaagauccaggacagccugagcagcacagcaagcgcccugggaaagcugcaggacguggucaaccagaaugcccaggcacugaacacccuggucaagcagcuguccuccaacuucggcgccaucagcucugugcugaacgauauccugagcagacuggacaaggucgaggccgaggugcagaucgacagacugaucacaggcagacugcagagccuccagacauacgugacccagcagcugaucagagccgccgagauuagagccucugccaaucuggccgccaccaagaugucugagugugugcugggccagagcaagagaguggacuuuugcggcaagggcuaccaccugaugagcuucccucagucugccccucacggcgugguguuucugcacgugacauaugugcccgcucaagagaagaauuucaccaccgcuccagccaucugccacgacggcaaagcccacuuuccuagagaaggcguguucguguccaacggcacccauugguucgugacacagcggaacuucuacgagccccagaucaucaccaccgacaacaccuucgugucuggcaacugcgacgucgugaucggcauugugaacaauaccguguacgacccucugcagcccgagcuggacagcuucaaagaggaacuggacaaguacuuuaagaaccacacaagccccgacguggaccugggcgauaucagcggaaucaaugccagcgucgugaacauccagaaagagaucgaccggcugaacgagguggccaagaaucugaacgagagccugaucgaccugcaagaacuggggaaguacgagcaguacaucaaguggcccugguacaucuggcugggcuuuaucgccggacugauugccaucgugauggucacaaucaugcuguguugcaugaccagcugcuguagcugccugaagggcuguuguagcuguggcagcugcugcaaguucgacgaggacgauucugagcccgugcugaagggcgugaaacugcacuacacaugaggacuagucccuguucccagagcccacuuuuuuuucuuuuuuugaaauaaaauagccugucuuucagaucuaaaaaaaaaaaaaaaaaaaaaaaaaaaaaaaaaaaaaaaaaaaaaaaaaaaaaaaaaaaaaaaaaaaaaaaaaaaaaaaaaaaaaaaaaaaaaaaaaaaa

SEQ ID NO: 24826 - RNA, 4070 nt, Artificial Sequence
  SARS-CoV-2/Wuhan/WIV05/2019__EPI_ISL_402128 spike protein mRNA gc mod (1-1273)(Y453F_D614G)
aggagagucccgcagucggcguccagcggcucugcuuguucgugugugugucguugcaggccuuauucaagcuuaccauguucguguuccuggugcugcugccucugguguccagccagugugugaaccugaccaccagaacacagcugccuccagccuacaccaacagcuuuaccagaggcguguacuaccccgacaagguguucagauccagcgugcugcacucuacccaggaccuguuccugccuuucuucagcaacgugaccugguuccacgccauccacguguccggcaccaauggcaccaagagauucgacaaccccgugcugcccuucaacgacgggguguacuuugccagcaccgagaaguccaacaucaucagaggcuggaucuucggcaccacacuggacagcaagacccagagccugcugaucgugaacaacgccaccaacguggucaucaaagugugcgaguuccaguucugcaacgaccccuuccugggcgucuacuaccacaagaacaacaagagcuggauggaaagcgaguuccggguguacagcagcgccaacaacugcaccuucgaguacgugucccagccuuuccugauggaccuggaaggcaagcagggcaacuucaagaaccugcgcgaguucguguuuaagaacaucgacggcuacuucaagaucuacagcaagcacaccccuaucaaccucgugcgggaucugccucagggcuucucugcucuggaaccccugguggaucugcccaucggcaucaacaucacccgguuucagacacugcuggcccugcacagaagcuaccugacaccuggcgauagcagcagcggauggacagcuggugccgccgcuuacuaugugggcuaccugcagccuagaaccuuccugcugaaguacaacgagaacggcaccaucaccgacgccguggauugugcucuggauccucugagcgagacaaagugcacccugaaguccuucaccguggaaaagggcaucuaccagaccagcaacuuccgggugcagcccaccgaauccaucgugcgguuccccaauaucaccaaucugugccccuucggcgagguguucaaugccaccagauucgccucuguguacgccuggaaccggaagcggaucagcaauugcguggccgacuacuccgugcuguacaacuccgccagcuucagcaccuucaagugcuacggcguguccccuaccaagcugaacgaccugugcuucacaaacguguacgccgacagcuucgugauccggggagaugaagugcggcagauugccccuggacagacaggcaagaucgccgacuacaacuacaagcugcccgacgacuucaccggcugugugauugccuggaacagcaacaaccuggacuccaaagucggcggcaacuacaauuaccuguuccggcuguuccggaaguccaaucugaagcccuucgagcgggacaucuccaccgagaucuaucaggccggcagcaccccuuguaacggcguggaaggcuucaacugcuacuucccacugcaguccuacggcuuucagcccacaaauggcgugggcuaucagcccuacagagugguggugcugagcuucgaacugcugcaugccccugccacagugugcggcccuaagaaaagcaccaaucucgugaagaacaaaugcgugaacuucaacuucaacggccugaccggcaccggcgugcugacagagagcaacaagaaguuccugccauuccagcaguuuggccgggauaucgccgauaccacagacgccguuagagauccccagacacuggaaauccuggacaucaccccuugcagcuucggcggagugucugugaucaccccuggcaccaacaccagcaaucagguggcagugcuguaccagggcgugaacuguaccgaagugcccguggccauucacgccgaucagcugacaccuacauggcggguguacuccaccggcagcaauguguuucagaccagagccggcugucugaucggagccgagcacgugaacaauagcuacgagugcgacauccccaucggcgcuggaaucugcgccagcuaccagacacagacaaacagcccucggagagccagaagcguggccagccagagcaucauugccuacacaaugucucugggcgccgagaacagcguggccuacuccaacaacucuaucgcuauccccaccaacuucaccaucagcgugaccacagagauccugccuguguccaugaccaagaccagcguggacugcaccauguacaucugcggcgauuccaccgagugcuccaaccugcugcugcaguacggcagcuucugcacccagcugaauagagcccugacagggaucgccguggaacaggacaagaacacccaagagguguucgcccaagugaagcagaucuacaagaccccuccuaucaaggacuucggcggcuucaauuucagccagauucugcccgauccuagcaagcccagcaagcggagcuucaucgaggaccugcuguucaacaaagugacacuggccgacgccggcuucaucaagcaguauggcgauugucugggcgacauugccgccagggaucugauuugcgcccagaaguuuaacggacugacagugcugccuccucugcugaccgaugagaugaucgcccaguacacaucugcccugcuggccggcacaaucacaagcggcuggacauuuggagcaggcgccgcucugcagauccccuuugcuaugcagauggccuaccgguucaacggcaucggagugacccagaaugugcuguacgagaaccagaagcugaucgccaaccaguucaacagcgccaucggcaagauccaggacagccugagcagcacagcaagcgcccugggaaagcugcaggacguggucaaccagaaugcccaggcacugaacacccuggucaagcagcuguccuccaacuucggcgccaucagcucugugcugaacgauauccugagcagacuggacaaggucgaggccgaggugcagaucgacagacugaucacaggcagacugcagagccuccagacauacgugacccagcagcugaucagagccgccgagauuagagccucugccaaucuggccgccaccaagaugucugagugugugcugggccagagcaagagaguggacuuuugcggcaagggcuaccaccugaugagcuucccucagucugccccucacggcgugguguuucugcacgugacauaugugcccgcucaagagaagaauuucaccaccgcuccagccaucugccacgacggcaaagcccacuuuccuagagaaggcguguucguguccaacggcacccauugguucgugacacagcggaacuucuacgagccccagaucaucaccaccgacaacaccuucgugucuggcaacugcgacgucgugaucggcauugugaacaauaccguguacgacccucugcagcccgagcuggacagcuucaaagaggaacuggacaaguacuuuaagaaccacacaagccccgacguggaccugggcgauaucagcggaaucaaugccagcgucgugaacauccagaaagagaucgaccggcugaacgagguggccaagaaucugaacgagagccugaucgaccugcaagaacuggggaaguacgagcaguacaucaaguggcccugguacaucuggcugggcuuuaucgccggacugauugccaucgugauggucacaaucaugcuguguugcaugaccagcugcuguagcugccugaagggcuguuguagcuguggcagcugcugcaaguucgacgaggacgauucugagcccgugcugaagggcgugaaacugcacuacacaugaggacuagucccuguucccagagcccacuuuuuuuucuuuuuuugaaauaaaauagccugucuuucagaucuaaaaaaaaaaaaaaaaaaaaaaaaaaaaaaaaaaaaaaaaaaaaaaaaaaaaaaaaaaaaaaaaaaaaaaaaaaaaaaaaaaaaaaaaaaaaaaaaaaaa

SEQ ID NO: 24827 - RNA, 4070 nt, Artificial Sequence
  SARS-CoV-2/Wuhan/WIV05/2019__EPI_ISL_402128 spike protein mRNA gc mod (1-1273)(D614G_I692V)
aggagagucccgcagucggcguccagcggcucugcuuguucgugugugugucguugcaggccuuauucaagcuuaccauguucguguuccuggugcugcugccucugguguccagccagugugugaaccugaccaccagaacacagcugccuccagccuacaccaacagcuuuaccagaggcguguacuaccccgacaagguguucagauccagcgugcugcacucuacccaggaccuguuccugccuuucuucagcaacgugaccugguuccacgccauccacguguccggcaccaauggcaccaagagauucgacaaccccgugcugcccuucaacgacgggguguacuuugccagcaccgagaaguccaacaucaucagaggcuggaucuucggcaccacacuggacagcaagacccagagccugcugaucgugaacaacgccaccaacguggucaucaaagugugcgaguuccaguucugcaacgaccccuuccugggcgucuacuaccacaagaacaacaagagcuggauggaaagcgaguuccggguguacagcagcgccaacaacugcaccuucgaguacgugucccagccuuuccugauggaccuggaaggcaagcagggcaacuucaagaaccugcgcgaguucguguuuaagaacaucgacggcuacuucaagaucuacagcaagcacaccccuaucaaccucgugcgggaucugccucagggcuucucugcucuggaaccccugguggaucugcccaucggcaucaacaucacccgguuucagacacugcuggcccugcacagaagcuaccugacaccuggcgauagcagcagcggauggacagcuggugccgccgcuuacuaugugggcuaccugcagccuagaaccuuccugcugaaguacaacgagaacggcaccaucaccgacgccguggauugugcucuggauccucugagcgagacaaagugcacccugaaguccuucaccguggaaaagggcaucuaccagaccagcaacuuccgggugcagcccaccgaauccaucgugcgguuccccaauaucaccaaucugugccccuucggcgagguguucaaugccaccagauucgccucuguguacgccuggaaccggaagcggaucagcaauugcguggccgacuacuccgugcuguacaacuccgccagcuucagcaccuucaagugcuacggcguguccccuaccaagcugaacgaccugugcuucacaaacguguacgccgacagcuucgugauccggggagaugaagugcggcagauugccccuggacagacaggcaagaucgccgacuacaacuacaagcugcccgacgacuucaccggcugugugauugccuggaacagcaacaaccuggacuccaaagucggcggcaacuacaauuaccuguaccggcuguuccggaaguccaaucugaagcccuucgagcgggacaucuccaccgagaucuaucaggccggcagcaccccuuguaacggcguggaaggcuucaacugcuacuucccacugcaguccuacggcuuucagcccacaaauggcgugggcuaucagcccuacagagugguggugcugagcuucgaacugcugcaugccccugccacagugugcggcccuaagaaaagcaccaaucucgugaagaacaaaugcgugaacuucaacuucaacggccugaccggcaccggcgugcugacagagagcaacaagaaguuccugccauuccagcaguuuggccgggauaucgccgauaccacagacgccguuagagauccccagacacuggaaauccuggacaucaccccuugcagcuucggcggagugucugugaucaccccuggcaccaacaccagcaaucagguggcagugcuguaccagggcgugaacuguaccgaagugcccguggccauucacgccgaucagcugacaccuacauggcggguguacuccaccggcagcaauguguuucagaccagagccggcugucugaucggagccgagcacgugaacaauagcuacgagugcgacauccccaucggcgcuggaaucugcgccagcuaccagacacagacaaacagcccucggagagccagaagcguggccagccagagcgugauugccuacacaaugucucugggcgccgagaacagcguggccuacuccaacaacucuaucgcuauccccaccaacuucaccaucagcgugaccacagagauccugccuguguccaugaccaagaccagcguggacugcaccauguacaucugcggcgauuccaccgagugcuccaaccugcugcugcaguacggcagcuucugcacccagcugaauagagcccugacagggaucgccguggaacaggacaagaacacccaagagguguucgcccaagugaagcagaucuacaagaccccuccuaucaaggacuucggcggcuucaauuucagccagauucugcccgauccuagcaagcccagcaagcggagcuucaucgaggaccugcuguucaacaaagugacacuggccgacgccggcuucaucaagcaguauggcgauugucugggcgacauugccgccagggaucugauuugcgcccagaaguuuaacggacugacagugcugccuccucugcugaccgaugagaugaucgcccaguacacaucugcccugcuggccggcacaaucacaagcggcuggacauuuggagcaggcgccgcucugcagauccccuuugcuaugcagauggccuaccgguucaacggcaucggagugacccagaaugugcuguacgagaaccagaagcugaucgccaaccaguucaacagcgccaucggcaagauccaggacagccugagcagcacagcaagcgcccugggaaagcugcaggacguggucaaccagaaugcccaggcacugaacacccuggucaagcagcuguccuccaacuucggcgccaucagcucugugcugaacgauauccugagcagacuggacaaggucgaggccgaggugcagaucgacagacugaucacaggcagacugcagagccuccagacauacgugacccagcagcugaucagagccgccgagauuagagccucugccaaucuggccgccaccaagaugucugagugugugcugggccagagcaagagaguggacuuuugcggcaagggcuaccaccugaugagcuucccucagucugccccucacggcgugguguuucugcacgugacauaugugcccgcucaagagaagaauuucaccaccgcuccagccaucugccacgacggcaaagcccacuuuccuagagaaggcguguucguguccaacggcacccauugguucgugacacagcggaacuucuacgagccccagaucaucaccaccgacaacaccuucgugucuggcaacugcgacgucgugaucggcauugugaacaauaccguguacgacccucugcagcccgagcuggacagcuucaaagaggaacuggacaaguacuuuaagaaccacacaagccccgacguggaccugggcgauaucagcggaaucaaugccagcgucgugaacauccagaaagagaucgaccggcugaacgagguggccaagaaucugaacgagagccugaucgaccugcaagaacuggggaaguacgagcaguacaucaaguggcccugguacaucuggcugggcuuuaucgccggacugauugccaucgugauggucacaaucaugcuguguugcaugaccagcugcuguagcugccugaagggcuguuguagcuguggcagcugcugcaaguucgacgaggacgauucugagcccgugcugaagggcgugaaacugcacuacacaugaggacuagucccuguucccagagcccacuuuuuuuucuuuuuuugaaauaaaauagccugucuuucagaucuaaaaaaaaaaaaaaaaaaaaaaaaaaaaaaaaaaaaaaaaaaaaaaaaaaaaaaaaaaaaaaaaaaaaaaaaaaaaaaaaaaaaaaaaaaaaaaaaaaaa

SEQ ID NO: 24828 - RNA, 4070 nt, Artificial Sequence
  SARS-CoV-2/Wuhan/WIV05/2019__EPI_ISL_402128 spike protein mRNA gc mod (1-1273)(D614G_M1229I)
aggagagucccgcagucggcguccagcggcucugcuuguucgugugugugucguugcaggccuuauucaagcuuaccauguucguguuccuggugcugcugccucugguguccagccagugugugaaccugaccaccagaacacagcugccuccagccuacaccaacagcuuuaccagaggcguguacuaccccgacaagguguucagauccagcgugcugcacucuacccaggaccuguuccugccuuucuucagcaacgugaccugguuccacgccauccacguguccggcaccaauggcaccaagagauucgacaaccccgugcugcccuucaacgacgggguguacuuugccagcaccgagaaguccaacaucaucagaggcuggaucuucggcaccacacuggacagcaagacccagagccugcugaucgugaacaacgccaccaacguggucaucaaagugugcgaguuccaguucugcaacgaccccuuccugggcgucuacuaccacaagaacaacaagagcuggauggaaagcgaguuccggguguacagcagcgccaacaacugcaccuucgaguacgugucccagccuuuccugauggaccuggaaggcaagcagggcaacuucaagaaccugcgcgaguucguguuuaagaacaucgacggcuacuucaagaucuacagcaagcacaccccuaucaaccucgugcgggaucugccucagggcuucucugcucuggaaccccugguggaucugcccaucggcaucaacaucacccgguuucagacacugcuggcccugcacagaagcuaccugacaccuggcgauagcagcagcggauggacagcuggugccgccgcuuacuaugugggcuaccugcagccuagaaccuuccugcugaaguacaacgagaacggcaccaucaccgacgccguggauugugcucuggauccucugagcgagacaaagugcacccugaaguccuucaccguggaaaagggcaucuaccagaccagcaacuuccgggugcagcccaccgaauccaucgugcgguuccccaauaucaccaaucugugccccuucggcgagguguucaaugccaccagauucgccucuguguacgccuggaaccggaagcggaucagcaauugcguggccgacuacuccgugcuguacaacuccgccagcuucagcaccuucaagugcuacggcguguccccuaccaagcugaacgaccugugcuucacaaacguguacgccgacagcuucgugauccggggagaugaagugcggcagauugccccuggacagacaggcaagaucgccgacuacaacuacaagcugcccgacgacuucaccggcugugugauugccuggaacagcaacaaccuggacuccaaagucggcggcaacuacaauuaccuguaccggcuguuccggaaguccaaucugaagcccuucgagcgggacaucuccaccgagaucuaucaggccggcagcaccccuuguaacggcguggaaggcuucaacugcuacuucccacugcaguccuacggcuuucagcccacaaauggcgugggcuaucagcccuacagagugguggugcugagcuucgaacugcugcaugccccugccacagugugcggcccuaagaaaagcaccaaucucgugaagaacaaaugcgugaacuucaacuucaacggccugaccggcaccggcgugcugacagagagcaacaagaaguuccugccauuccagcaguuuggccgggauaucgccgauaccacagacgccguuagagauccccagacacuggaaauccuggacaucaccccuugcagcuucggcggagugucugugaucaccccuggcaccaacaccagcaaucagguggcagugcuguaccagggcgugaacuguaccgaagugcccguggccauucacgccgaucagcugacaccuacauggcggguguacuccaccggcagcaauguguuucagaccagagccggcugucugaucggagccgagcacgugaacaauagcuacgagugcgacauccccaucggcgcuggaaucugcgccagcuaccagacacagacaaacagcccucggagagccagaagcguggccagccagagcaucauugccuacacaaugucucugggcgccgagaacagcguggccuacuccaacaacucuaucgcuauccccaccaacuucaccaucagcgugaccacagagauccugccuguguccaugaccaagaccagcguggacugcaccauguacaucugcggcgauuccaccgagugcuccaaccugcugcugcaguacggcagcuucugcacccagcugaauagagcccugacagggaucgccguggaacaggacaagaacacccaagagguguucgcccaagugaagcagaucuacaagaccccuccuaucaaggacuucggcggcuucaauuucagccagauucugcccgauccuagcaagcccagcaagcggagcuucaucgaggaccugcuguucaacaaagugacacuggccgacgccggcuucaucaagcaguauggcgauugucugggcgacauugccgccagggaucugauuugcgcccagaaguuuaacggacugacagugcugccuccucugcugaccgaugagaugaucgcccaguacacaucugcccugcuggccggcacaaucacaagcggcuggacauuuggagcaggcgccgcucugcagauccccuuugcuaugcagauggccuaccgguucaacggcaucggagugacccagaaugugcuguacgagaaccagaagcugaucgccaaccaguucaacagcgccaucggcaagauccaggacagccugagcagcacagcaagcgcccugggaaagcugcaggacguggucaaccagaaugcccaggcacugaacacccuggucaagcagcuguccuccaacuucggcgccaucagcucugugcugaacgauauccugagcagacuggacaaggucgaggccgaggugcagaucgacagacugaucacaggcagacugcagagccuccagacauacgugacccagcagcugaucagagccgccgagauuagagccucugccaaucuggccgccaccaagaugucugagugugugcugggccagagcaagagaguggacuuuugcggcaagggcuaccaccugaugagcuucccucagucugccccucacggcgugguguuucugcacgugacauaugugcccgcucaagagaagaauuucaccaccgcuccagccaucugccacgacggcaaagcccacuuuccuagagaaggcguguucguguccaacggcacccauugguucgugacacagcggaacuucuacgagccccagaucaucaccaccgacaacaccuucgugucuggcaacugcgacgucgugaucggcauugugaacaauaccguguacgacccucugcagcccgagcuggacagcuucaaagaggaacuggacaaguacuuuaagaaccacacaagccccgacguggaccugggcgauaucagcggaaucaaugccagcgucgugaacauccagaaagagaucgaccggcugaacgagguggccaagaaucugaacgagagccugaucgaccugcaagaacuggggaaguacgagcaguacaucaaguggcccugguacaucuggcugggcuuuaucgccggacugauugccaucgugaucgucacaaucaugcuguguugcaugaccagcugcuguagcugccugaagggcuguuguagcuguggcagcugcugcaaguucgacgaggacgauucugagcccgugcugaagggcgugaaacugcacuacacaugaggacuagucccuguucccagagcccacuuuuuuuucuuuuuuugaaauaaaauagccugucuuucagaucuaaaaaaaaaaaaaaaaaaaaaaaaaaaaaaaaaaaaaaaaaaaaaaaaaaaaaaaaaaaaaaaaaaaaaaaaaaaaaaaaaaaaaaaaaaaaaaaaaaaa

SEQ ID NO: 24829 - RNA, 4064 nt, Artificial Sequence
  SARS-CoV-2/Wuhan/WIV05/2019__EPI_ISL_402128 spike protein mRNA gc mod (1-1273)(H69del_V70del_A222V_Y453F_S477N_D614G_I692V)
aggagagucccgcagucggcguccagcggcucugcuuguucgugugugugucguugcaggccuuauucaagcuuaccauguucguguuccuggugcugcugccucugguguccagccagugugugaaccugaccaccagaacacagcugccuccagccuacaccaacagcuuuaccagaggcguguacuaccccgacaagguguucagauccagcgugcugcacucuacccaggaccuguuccugccuuucuucagcaacgugaccugguuccacgccaucuccggcaccaauggcaccaagagauucgacaaccccgugcugcccuucaacgacgggguguacuuugccagcaccgagaaguccaacaucaucagaggcuggaucuucggcaccacacuggacagcaagacccagagccugcugaucgugaacaacgccaccaacguggucaucaaagugugcgaguuccaguucugcaacgaccccuuccugggcgucuacuaccacaagaacaacaagagcuggauggaaagcgaguuccggguguacagcagcgccaacaacugcaccuucgaguacgugucccagccuuuccugauggaccuggaaggcaagcagggcaacuucaagaaccugcgcgaguucguguuuaagaacaucgacggcuacuucaagaucuacagcaagcacaccccuaucaaccucgugcgggaucugccucagggcuucucugugcuggaaccccugguggaucugcccaucggcaucaacaucacccgguuucagacacugcuggcccugcacagaagcuaccugacaccuggcgauagcagcagcggauggacagcuggugccgccgcuuacuaugugggcuaccugcagccuagaaccuuccugcugaaguacaacgagaacggcaccaucaccgacgccguggauugugcucuggauccucugagcgagacaaagugcacccugaaguccuucaccguggaaaagggcaucuaccagaccagcaacuuccgggugcagcccaccgaauccaucgugcgguuccccaauaucaccaaucugugccccuucggcgagguguucaaugccaccagauucgccucuguguacgccuggaaccggaagcggaucagcaauugcguggccgacuacuccgugcuguacaacuccgccagcuucagcaccuucaagugcuacggcguguccccuaccaagcugaacgaccugugcuucacaaacguguacgccgacagcuucgugauccggggagaugaagugcggcagauugccccuggacagacaggcaagaucgccgacuacaacuacaagcugcccgacgacuucaccggcugugugauugccuggaacagcaacaaccuggacuccaaagucggcggcaacuacaauuaccuguuccggcuguuccggaaguccaaucugaagcccuucgagcgggacaucuccaccgagaucuaucaggccggcaacaccccuuguaacggcguggaaggcuucaacugcuacuucccacugcaguccuacggcuuucagcccacaaauggcgugggcuaucagcccuacagagugguggugcugagcuucgaacugcugcaugccccugccacagugugcggcccuaagaaaagcaccaaucucgugaagaacaaaugcgugaacuucaacuucaacggccugaccggcaccggcgugcugacagagagcaacaagaaguuccugccauuccagcaguuuggccgggauaucgccgauaccacagacgccguuagagauccccagacacuggaaauccuggacaucaccccuugcagcuucggcggagugucugugaucaccccuggcaccaacaccagcaaucagguggcagugcuguaccagggcgugaacuguaccgaagugcccguggccauucacgccgaucagcugacaccuacauggcggguguacuccaccggcagcaauguguuucagaccagagccggcugucugaucggagccgagcacgugaacaauagcuacgagugcgacauccccaucggcgcuggaaucugcgccagcuaccagacacagacaaacagcccucggagagccagaagcguggccagccagagcgugauugccuacacaaugucucugggcgccgagaacagcguggccuacuccaacaacucuaucgcuauccccaccaacuucaccaucagcgugaccacagagauccugccuguguccaugaccaagaccagcguggacugcaccauguacaucugcggcgauuccaccgagugcuccaaccugcugcugcaguacggcagcuucugcacccagcugaauagagcccugacagggaucgccguggaacaggacaagaacacccaagagguguucgcccaagugaagcagaucuacaagaccccuccuaucaaggacuucggcggcuucaauuucagccagauucugcccgauccuagcaagcccagcaagcggagcuucaucgaggaccugcuguucaacaaagugacacuggccgacgccggcuucaucaagcaguauggcgauugucugggcgacauugccgccagggaucugauuugcgcccagaaguuuaacggacugacagugcugccuccucugcugaccgaugagaugaucgcccaguacacaucugcccugcuggccggcacaaucacaagcggcuggacauuuggagcaggcgccgcucugcagauccccuuugcuaugcagauggccuaccgguucaacggcaucggagugacccagaaugugcuguacgagaaccagaagcugaucgccaaccaguucaacagcgccaucggcaagauccaggacagccugagcagcacagcaagcgcccugggaaagcugcaggacguggucaaccagaaugcccaggcacugaacacccuggucaagcagcuguccuccaacuucggcgccaucagcucugugcugaacgauauccugagcagacuggacaaggucgaggccgaggugcagaucgacagacugaucacaggcagacugcagagccuccagacauacgugacccagcagcugaucagagccgccgagauuagagccucugccaaucuggccgccaccaagaugucugagugugugcugggccagagcaagagaguggacuuuugcggcaagggcuaccaccugaugagcuucccucagucugccccucacggcgugguguuucugcacgugacauaugugcccgcucaagagaagaauuucaccaccgcuccagccaucugccacgacggcaaagcccacuuuccuagagaaggcguguucguguccaacggcacccauugguucgugacacagcggaacuucuacgagccccagaucaucaccaccgacaacaccuucgugucuggcaacugcgacgucgugaucggcauugugaacaauaccguguacgacccucugcagcccgagcuggacagcuucaaagaggaacuggacaaguacuuuaagaaccacacaagccccgacguggaccugggcgauaucagcggaaucaaugccagcgucgugaacauccagaaagagaucgaccggcugaacgagguggccaagaaucugaacgagagccugaucgaccugcaagaacuggggaaguacgagcaguacaucaaguggcccugguacaucuggcugggcuuuaucgccggacugauugccaucgugauggucacaaucaugcuguguugcaugaccagcugcuguagcugccugaagggcuguuguagcuguggcagcugcugcaaguucgacgaggacgauucugagcccgugcugaagggcgugaaacugcacuacacaugaggacuagucccuguucccagagcccacuuuuuuuucuuuuuuugaaauaaaauagccugucuuucagaucuaaaaaaaaaaaaaaaaaaaaaaaaaaaaaaaaaaaaaaaaaaaaaaaaaaaaaaaaaaaaaaaaaaaaaaaaaaaaaaaaaaaaaaaaaaaaaaaaaaaa

SEQ ID NO: 24830 - RNA, 4064 nt, Artificial Sequence
  SARS-CoV-2/Wuhan/WIV05/2019__EPI_ISL_402128 spike protein mRNA gc mod (1-1273)(H69del_V70del_Y453F_D614G_I692V_M1229I)
aggagagucccgcagucggcguccagcggcucugcuuguucgugugugugucguugcaggccuuauucaagcuuaccauguucguguuccuggugcugcugccucugguguccagccagugugugaaccugaccaccagaacacagcugccuccagccuacaccaacagcuuuaccagaggcguguacuaccccgacaagguguucagauccagcgugcugcacucuacccaggaccuguuccugccuuucuucagcaacgugaccugguuccacgccaucuccggcaccaauggcaccaagagauucgacaaccccgugcugcccuucaacgacgggguguacuuugccagcaccgagaaguccaacaucaucagaggcuggaucuucggcaccacacuggacagcaagacccagagccugcugaucgugaacaacgccaccaacguggucaucaaagugugcgaguuccaguucugcaacgaccccuuccugggcgucuacuaccacaagaacaacaagagcuggauggaaagcgaguuccggguguacagcagcgccaacaacugcaccuucgaguacgugucccagccuuuccugauggaccuggaaggcaagcagggcaacuucaagaaccugcgcgaguucguguuuaagaacaucgacggcuacuucaagaucuacagcaagcacaccccuaucaaccucgugcgggaucugccucagggcuucucugcucuggaaccccugguggaucugcccaucggcaucaacaucacccgguuucagacacugcuggcccugcacagaagcuaccugacaccuggcgauagcagcagcggauggacagcuggugccgccgcuuacuaugugggcuaccugcagccuagaaccuuccugcugaaguacaacgagaacggcaccaucaccgacgccguggauugugcucuggauccucugagcgagacaaagugcacccugaaguccuucaccguggaaaagggcaucuaccagaccagcaacuuccgggugcagcccaccgaauccaucgugcgguuccccaauaucaccaaucugugccccuucggcgagguguucaaugccaccagauucgccucuguguacgccuggaaccggaagcggaucagcaauugcguggccgacuacuccgugcuguacaacuccgccagcuucagcaccuucaagugcuacggcguguccccuaccaagcugaacgaccugugcuucacaaacguguacgccgacagcuucgugauccggggagaugaagugcggcagauugccccuggacagacaggcaagaucgccgacuacaacuacaagcugcccgacgacuucaccggcugugugauugccuggaacagcaacaaccuggacuccaaagucggcggcaacuacaauuaccuguuccggcuguuccggaaguccaaucugaagcccuucgagcgggacaucuccaccgagaucuaucaggccggcagcaccccuuguaacggcguggaaggcuucaacugcuacuucccacugcaguccuacggcuuucagcccacaaauggcgugggcuaucagcccuacagagugguggugcugagcuucgaacugcugcaugccccugccacagugugcggcccuaagaaaagcaccaaucucgugaagaacaaaugcgugaacuucaacuucaacggccugaccggcaccggcgugcugacagagagcaacaagaaguuccugccauuccagcaguuuggccgggauaucgccgauaccacagacgccguuagagauccccagacacuggaaauccuggacaucaccccuugcagcuucggcggagugucugugaucaccccuggcaccaacaccagcaaucagguggcagugcuguaccagggcgugaacuguaccgaagugcccguggccauucacgccgaucagcugacaccuacauggcggguguacuccaccggcagcaauguguuucagaccagagccggcugucugaucggagccgagcacgugaacaauagcuacgagugcgacauccccaucggcgcuggaaucugcgccagcuaccagacacagacaaacagcccucggagagccagaagcguggccagccagagcgugauugccuacacaaugucucugggcgccgagaacagcguggccuacuccaacaacucuaucgcuauccccaccaacuucaccaucagcgugaccacagagauccugccuguguccaugaccaagaccagcguggacugcaccauguacaucugcggcgauuccaccgagugcuccaaccugcugcugcaguacggcagcuucugcacccagcugaauagagcccugacagggaucgccguggaacaggacaagaacacccaagagguguucgcccaagugaagcagaucuacaagaccccuccuaucaaggacuucggcggcuucaauuucagccagauucugcccgauccuagcaagcccagcaagcggagcuucaucgaggaccugcuguucaacaaagugacacuggccgacgccggcuucaucaagcaguauggcgauugucugggcgacauugccgccagggaucugauuugcgcccagaaguuuaacggacugacagugcugccuccucugcugaccgaugagaugaucgcccaguacacaucugcccugcuggccggcacaaucacaagcggcuggacauuuggagcaggcgccgcucugcagauccccuuugcuaugcagauggccuaccgguucaacggcaucggagugacccagaaugugcuguacgagaaccagaagcugaucgccaaccaguucaacagcgccaucggcaagauccaggacagccugagcagcacagcaagcgcccugggaaagcugcaggacguggucaaccagaaugcccaggcacugaacacccuggucaagcagcuguccuccaacuucggcgccaucagcucugugcugaacgauauccugagcagacuggacaaggucgaggccgaggugcagaucgacagacugaucacaggcagacugcagagccuccagacauacgugacccagcagcugaucagagccgccgagauuagagccucugccaaucuggccgccaccaagaugucugagugugugcugggccagagcaagagaguggacuuuugcggcaagggcuaccaccugaugagcuucccucagucugccccucacggcgugguguuucugcacgugacauaugugcccgcucaagagaagaauuucaccaccgcuccagccaucugccacgacggcaaagcccacuuuccuagagaaggcguguucguguccaacggcacccauugguucgugacacagcggaacuucuacgagccccagaucaucaccaccgacaacaccuucgugucuggcaacugcgacgucgugaucggcauugugaacaauaccguguacgacccucugcagcccgagcuggacagcuucaaagaggaacuggacaaguacuuuaagaaccacacaagccccgacguggaccugggcgauaucagcggaaucaaugccagcgucgugaacauccagaaagagaucgaccggcugaacgagguggccaagaaucugaacgagagccugaucgaccugcaagaacuggggaaguacgagcaguacaucaaguggcccugguacaucuggcugggcuuuaucgccggacugauugccaucgugaucgucacaaucaugcuguguugcaugaccagcugcuguagcugccugaagggcuguuguagcuguggcagcugcugcaaguucgacgaggacgauucugagcccgugcugaagggcgugaaacugcacuacacaugaggacuagucccuguucccagagcccacuuuuuuuucuuuuuuugaaauaaaauagccugucuuucagaucuaaaaaaaaaaaaaaaaaaaaaaaaaaaaaaaaaaaaaaaaaaaaaaaaaaaaaaaaaaaaaaaaaaaaaaaaaaaaaaaaaaaaaaaaaaaaaaaaaaaa

SEQ ID NO: 24831 - RNA, 4061 nt, Artificial Sequence
  SARS-CoV-2/Wuhan/WIV05/2019__EPI_ISL_402128 spike protein mRNA gc mod (1-1273)(H69del_V70del_Y144del_N501Y_A570D_D614G_P681H_T716I_S982 A_D1118H)
aggagagucccgcagucggcguccagcggcucugcuuguucgugugugugucguugcaggccuuauucaagcuuaccauguucguguuccuggugcugcugccucugguguccagccagugugugaaccugaccaccagaacacagcugccuccagccuacaccaacagcuuuaccagaggcguguacuaccccgacaagguguucagauccagcgugcugcacucuacccaggaccuguuccugccuuucuucagcaacgugaccugguuccacgccaucuccggcaccaauggcaccaagagauucgacaaccccgugcugcccuucaacgacgggguguacuuugccagcaccgagaaguccaacaucaucagaggcuggaucuucggcaccacacuggacagcaagacccagagccugcugaucgugaacaacgccaccaacguggucaucaaagugugcgaguuccaguucugcaacgaccccuuccugggcgucuaccacaagaacaacaagagcuggauggaaagcgaguuccggguguacagcagcgccaacaacugcaccuucgaguacgugucccagccuuuccugauggaccuggaaggcaagcagggcaacuucaagaaccugcgcgaguucguguuuaagaacaucgacggcuacuucaagaucuacagcaagcacaccccuaucaaccucgugcgggaucugccucagggcuucucugcucuggaaccccugguggaucugcccaucggcaucaacaucacccgguuucagacacugcuggcccugcacagaagcuaccugacaccuggcgauagcagcagcggauggacagcuggugccgccgcuuacuaugugggcuaccugcagccuagaaccuuccugcugaaguacaacgagaacggcaccaucaccgacgccguggauugugcucuggauccucugagcgagacaaagugcacccugaaguccuucaccguggaaaagggcaucuaccagaccagcaacuuccgggugcagcccaccgaauccaucgugcgguuccccaauaucaccaaucugugccccuucggcgagguguucaaugccaccagauucgccucuguguacgccuggaaccggaagcggaucagcaauugcguggccgacuacuccgugcuguacaacuccgccagcuucagcaccuucaagugcuacggcguguccccuaccaagcugaacgaccugugcuucacaaacguguacgccgacagcuucgugauccggggagaugaagugcggcagauugccccuggacagacaggcaagaucgccgacuacaacuacaagcugcccgacgacuucaccggcugugugauugccuggaacagcaacaaccuggacuccaaagucggcggcaacuacaauuaccuguaccggcuguuccggaaguccaaucugaagcccuucgagcgggacaucuccaccgagaucuaucaggccggcagcaccccuuguaacggcguggaaggcuucaacugcuacuucccacugcaguccuacggcuuucagcccacauacggcgugggcuaucagcccuacagagugguggugcugagcuucgaacugcugcaugccccugccacagugugcggcccuaagaaaagcaccaaucucgugaagaacaaaugcgugaacuucaacuucaacggccugaccggcaccggcgugcugacagagagcaacaagaaguuccugccauuccagcaguuuggccgggauaucgacgauaccacagacgccguuagagauccccagacacuggaaauccuggacaucaccccuugcagcuucggcggagugucugugaucaccccuggcaccaacaccagcaaucagguggcagugcuguaccagggcgugaacuguaccgaagugcccguggccauucacgccgaucagcugacaccuacauggcggguguacuccaccggcagcaauguguuucagaccagagccggcugucugaucggagccgagcacgugaacaauagcuacgagugcgacauccccaucggcgcuggaaucugcgccagcuaccagacacagacaaacagccaccggagagccagaagcguggccagccagagcaucauugccuacacaaugucucugggcgccgagaacagcguggccuacuccaacaacucuaucgcuauccccaucaacuucaccaucagcgugaccacagagauccugccuguguccaugaccaagaccagcguggacugcaccauguacaucugcggcgauuccaccgagugcuccaaccugcugcugcaguacggcagcuucugcacccagcugaauagagcccugacagggaucgccguggaacaggacaagaacacccaagagguguucgcccaagugaagcagaucuacaagaccccuccuaucaaggacuucggcggcuucaauuucagccagauucugcccgauccuagcaagcccagcaagcggagcuucaucgaggaccugcuguucaacaaagugacacuggccgacgccggcuucaucaagcaguauggcgauugucugggcgacauugccgccagggaucugauuugcgcccagaaguuuaacggacugacagugcugccuccucugcugaccgaugagaugaucgcccaguacacaucugcccugcuggccggcacaaucacaagcggcuggacauuuggagcaggcgccgcucugcagauccccuuugcuaugcagauggccuaccgguucaacggcaucggagugacccagaaugugcuguacgagaaccagaagcugaucgccaaccaguucaacagcgccaucggcaagauccaggacagccugagcagcacagcaagcgcccugggaaagcugcaggacguggucaaccagaaugcccaggcacugaacacccuggucaagcagcuguccuccaacuucggcgccaucagcucugugcugaacgauauccuggccagacuggacaaggucgaggccgaggugcagaucgacagacugaucacaggcagacugcagagccuccagacauacgugacccagcagcugaucagagccgccgagauuagagccucugccaaucuggccgccaccaagaugucugagugugugcugggccagagcaagagaguggacuuuugcggcaagggcuaccaccugaugagcuucccucagucugccccucacggcgugguguuucugcacgugacauaugugcccgcucaagagaagaauuucaccaccgcuccagccaucugccacgacggcaaagcccacuuuccuagagaaggcguguucguguccaacggcacccauugguucgugacacagcggaacuucuacgagccccagaucaucaccacccacaacaccuucgugucuggcaacugcgacgucgugaucggcauugugaacaauaccguguacgacccucugcagcccgagcuggacagcuucaaagaggaacuggacaaguacuuuaagaaccacacaagccccgacguggaccugggcgauaucagcggaaucaaugccagcgucgugaacauccagaaagagaucgaccggcugaacgagguggccaagaaucugaacgagagccugaucgaccugcaagaacuggggaaguacgagcaguacaucaaguggcccugguacaucuggcugggcuuuaucgccggacugauugccaucgugauggucacaaucaugcuguguugcaugaccagcugcuguagcugccugaagggcuguuguagcuguggcagcugcugcaaguucgacgaggacgauucugagcccgugcugaagggcgugaaacugcacuacacaugaggacuagucccuguucccagagcccacuuuuuuuucuuuuuuugaaauaaaauagccugucuuucagaucuaaaaaaaaaaaaaaaaaaaaaaaaaaaaaaaaaaaaaaaaaaaaaaaaaaaaaaaaaaaaaaaaaaaaaaaaaaaaaaaaaaaaaaaaaaaaaaaaaaaa

SEQ ID NO: 24832 - RNA, 4070 nt, Artificial Sequence
  SARS-CoV-2/Wuhan/WIV05/2019__EPI_ISL_402128 spike protein mRNA gc mod (1-1273)(K417N_E484K_N501Y_D614G)
aggagagucccgcagucggcguccagcggcucugcuuguucgugugugugucguugcaggccuuauucaagcuuaccauguucguguuccuggugcugcugccucugguguccagccagugugugaaccugaccaccagaacacagcugccuccagccuacaccaacagcuuuaccagaggcguguacuaccccgacaagguguucagauccagcgugcugcacucuacccaggaccuguuccugccuuucuucagcaacgugaccugguuccacgccauccacguguccggcaccaauggcaccaagagauucgacaaccccgugcugcccuucaacgacgggguguacuuugccagcaccgagaaguccaacaucaucagaggcuggaucuucggcaccacacuggacagcaagacccagagccugcugaucgugaacaacgccaccaacguggucaucaaagugugcgaguuccaguucugcaacgaccccuuccugggcgucuacuaccacaagaacaacaagagcuggauggaaagcgaguuccggguguacagcagcgccaacaacugcaccuucgaguacgugucccagccuuuccugauggaccuggaaggcaagcagggcaacuucaagaaccugcgcgaguucguguuuaagaacaucgacggcuacuucaagaucuacagcaagcacaccccuaucaaccucgugcgggaucugccucagggcuucucugcucuggaaccccugguggaucugcccaucggcaucaacaucacccgguuucagacacugcuggcccugcacagaagcuaccugacaccuggcgauagcagcagcggauggacagcuggugccgccgcuuacuaugugggcuaccugcagccuagaaccuuccugcugaaguacaacgagaacggcaccaucaccgacgccguggauugugcucuggauccucugagcgagacaaagugcacccugaaguccuucaccguggaaaagggcaucuaccagaccagcaacuuccgggugcagcccaccgaauccaucgugcgguuccccaauaucaccaaucugugccccuucggcgagguguucaaugccaccagauucgccucuguguacgccuggaaccggaagcggaucagcaauugcguggccgacuacuccgugcuguacaacuccgccagcuucagcaccuucaagugcuacggcguguccccuaccaagcugaacgaccugugcuucacaaacguguacgccgacagcuucgugauccggggagaugaagugcggcagauugccccuggacagacaggcaacaucgccgacuacaacuacaagcugcccgacgacuucaccggcugugugauugccuggaacagcaacaaccuggacuccaaagucggcggcaacuacaauuaccuguaccggcuguuccggaaguccaaucugaagcccuucgagcgggacaucuccaccgagaucuaucaggccggcagcaccccuuguaacggcgugaagggcuucaacugcuacuucccacugcaguccuacggcuuucagcccacauacggcgugggcuaucagcccuacagagugguggugcugagcuucgaacugcugcaugccccugccacagugugcggcccuaagaaaagcaccaaucucgugaagaacaaaugcgugaacuucaacuucaacggccugaccggcaccggcgugcugacagagagcaacaagaaguuccugccauuccagcaguuuggccgggauaucgccgauaccacagacgccguuagagauccccagacacuggaaauccuggacaucaccccuugcagcuucggcggagugucugugaucaccccuggcaccaacaccagcaaucagguggcagugcuguaccagggcgugaacuguaccgaagugcccguggccauucacgccgaucagcugacaccuacauggcggguguacuccaccggcagcaauguguuucagaccagagccggcugucugaucggagccgagcacgugaacaauagcuacgagugcgacauccccaucggcgcuggaaucugcgccagcuaccagacacagacaaacagcccucggagagccagaagcguggccagccagagcaucauugccuacacaaugucucugggcgccgagaacagcguggccuacuccaacaacucuaucgcuauccccaccaacuucaccaucagcgugaccacagagauccugccuguguccaugaccaagaccagcguggacugcaccauguacaucugcggcgauuccaccgagugcuccaaccugcugcugcaguacggcagcuucugcacccagcugaauagagcccugacagggaucgccguggaacaggacaagaacacccaagagguguucgcccaagugaagcagaucuacaagaccccuccuaucaaggacuucggcggcuucaauuucagccagauucugcccgauccuagcaagcccagcaagcggagcuucaucgaggaccugcuguucaacaaagugacacuggccgacgccggcuucaucaagcaguauggcgauugucugggcgacauugccgccagggaucugauuugcgcccagaaguuuaacggacugacagugcugccuccucugcugaccgaugagaugaucgcccaguacacaucugcccugcuggccggcacaaucacaagcggcuggacauuuggagcaggcgccgcucugcagauccccuuugcuaugcagauggccuaccgguucaacggcaucggagugacccagaaugugcuguacgagaaccagaagcugaucgccaaccaguucaacagcgccaucggcaagauccaggacagccugagcagcacagcaagcgcccugggaaagcugcaggacguggucaaccagaaugcccaggcacugaacacccuggucaagcagcuguccuccaacuucggcgccaucagcucugugcugaacgauauccugagcagacuggacaaggucgaggccgaggugcagaucgacagacugaucacaggcagacugcagagccuccagacauacgugacccagcagcugaucagagccgccgagauuagagccucugccaaucuggccgccaccaagaugucugagugugugcugggccagagcaagagaguggacuuuugcggcaagggcuaccaccugaugagcuucccucagucugccccucacggcgugguguuucugcacgugacauaugugcccgcucaagagaagaauuucaccaccgcuccagccaucugccacgacggcaaagcccacuuuccuagagaaggcguguucguguccaacggcacccauugguucgugacacagcggaacuucuacgagccccagaucaucaccaccgacaacaccuucgugucuggcaacugcgacgucgugaucggcauugugaacaauaccguguacgacccucugcagcccgagcuggacagcuucaaagaggaacuggacaaguacuuuaagaaccacacaagccccgacguggaccugggcgauaucagcggaaucaaugccagcgucgugaacauccagaaagagaucgaccggcugaacgagguggccaagaaucugaacgagagccugaucgaccugcaagaacuggggaaguacgagcaguacaucaaguggcccugguacaucuggcugggcuuuaucgccggacugauugccaucgugauggucacaaucaugcuguguugcaugaccagcugcuguagcugccugaagggcuguuguagcuguggcagcugcugcaaguucgacgaggacgauucugagcccgugcugaagggcgugaaacugcacuacacaugaggacuagucccuguucccagagcccacuuuuuuuucuuuuuuugaaauaaaauagccugucuuucagaucuaaaaaaaaaaaaaaaaaaaaaaaaaaaaaaaaaaaaaaaaaaaaaaaaaaaaaaaaaaaaaaaaaaaaaaaaaaaaaaaaaaaaaaaaaaaaaaaaaaaa

SEQ ID NO: 24833 - RNA, 4061 nt, Artificial Sequence
  SARS-CoV-2/Wuhan/WIV05/2019__EPI_ISL_402128 spike protein mRNA gc mod (1-1273)(L18F_D80A_D215G_L242del_A243del_L244del_R246I_K417N_E484 K_N501Y_D614G_A701V)
aggagagucccgcagucggcguccagcggcucugcuuguucgugugugugucguugcaggccuuauucaagcuuaccauguucguguuccuggugcugcugccucugguguccagccagugugugaacuucaccaccagaacacagcugccuccagccuacaccaacagcuuuaccagaggcguguacuaccccgacaagguguucagauccagcgugcugcacucuacccaggaccuguuccugccuuucuucagcaacgugaccugguuccacgccauccacguguccggcaccaauggcaccaagagauucgccaaccccgugcugcccuucaacgacgggguguacuuugccagcaccgagaaguccaacaucaucagaggcuggaucuucggcaccacacuggacagcaagacccagagccugcugaucgugaacaacgccaccaacguggucaucaaagugugcgaguuccaguucugcaacgaccccuuccugggcgucuacuaccacaagaacaacaagagcuggauggaaagcgaguuccggguguacagcagcgccaacaacugcaccuucgaguacgugucccagccuuuccugauggaccuggaaggcaagcagggcaacuucaagaaccugcgcgaguucguguuuaagaacaucgacggcuacuucaagaucuacagcaagcacaccccuaucaaccucgugcggggccugccucagggcuucucugcucuggaaccccugguggaucugcccaucggcaucaacaucacccgguuucagacacugcacaucagcuaccugacaccuggcgauagcagcagcggauggacagcuggugccgccgcuuacuaugugggcuaccugcagccuagaaccuuccugcugaaguacaacgagaacggcaccaucaccgacgccguggauugugcucuggauccucugagcgagacaaagugcacccugaaguccuucaccguggaaaagggcaucuaccagaccagcaacuuccgggugcagcccaccgaauccaucgugcgguuccccaauaucaccaaucugugccccuucggcgagguguucaaugccaccagauucgccucuguguacgccuggaaccggaagcggaucagcaauugcguggccgacuacuccgugcuguacaacuccgccagcuucagcaccuucaagugcuacggcguguccccuaccaagcugaacgaccugugcuucacaaacguguacgccgacagcuucgugauccggggagaugaagugcggcagauugccccuggacagacaggcaacaucgccgacuacaacuacaagcugcccgacgacuucaccggcugugugauugccuggaacagcaacaaccuggacuccaaagucggcggcaacuacaauuaccuguaccggcuguuccggaaguccaaucugaagcccuucgagcgggacaucuccaccgagaucuaucaggccggcagcaccccuuguaacggcgugaagggcuucaacugcuacuucccacugcaguccuacggcuuucagcccacauacggcgugggcuaucagcccuacagagugguggugcugagcuucgaacugcugcaugccccugccacagugugcggcccuaagaaaagcaccaaucucgugaagaacaaaugcgugaacuucaacuucaacggccugaccggcaccggcgugcugacagagagcaacaagaaguuccugccauuccagcaguuuggccgggauaucgccgauaccacagacgccguuagagauccccagacacuggaaauccuggacaucaccccuugcagcuucggcggagugucugugaucaccccuggcaccaacaccagcaaucagguggcagugcuguaccagggcgugaacuguaccgaagugcccguggccauucacgccgaucagcugacaccuacauggcggguguacuccaccggcagcaauguguuucagaccagagccggcugucugaucggagccgagcacgugaacaauagcuacgagugcgacauccccaucggcgcuggaaucugcgccagcuaccagacacagacaaacagcccucggagagccagaagcguggccagccagagcaucauugccuacacaaugucucugggcguggagaacagcguggccuacuccaacaacucuaucgcuauccccaccaacuucaccaucagcgugaccacagagauccugccuguguccaugaccaagaccagcguggacugcaccauguacaucugcggcgauuccaccgagugcuccaaccugcugcugcaguacggcagcuucugcacccagcugaauagagcccugacagggaucgccguggaacaggacaagaacacccaagagguguucgcccaagugaagcagaucuacaagaccccuccuaucaaggacuucggcggcuucaauuucagccagauucugcccgauccuagcaagcccagcaagcggagcuucaucgaggaccugcuguucaacaaagugacacuggccgacgccggcuucaucaagcaguauggcgauugucugggcgacauugccgccagggaucugauuugcgcccagaaguuuaacggacugacagugcugccuccucugcugaccgaugagaugaucgcccaguacacaucugcccugcuggccggcacaaucacaagcggcuggacauuuggagcaggcgccgcucugcagauccccuuugcuaugcagauggccuaccgguucaacggcaucggagugacccagaaugugcuguacgagaaccagaagcugaucgccaaccaguucaacagcgccaucggcaagauccaggacagccugagcagcacagcaagcgcccugggaaagcugcaggacguggucaaccagaaugcccaggcacugaacacccuggucaagcagcuguccuccaacuucggcgccaucagcucugugcugaacgauauccugagcagacuggacaaggucgaggccgaggugcagaucgacagacugaucacaggcagacugcagagccuccagacauacgugacccagcagcugaucagagccgccgagauuagagccucugccaaucuggccgccaccaagaugucugagugugugcugggccagagcaagagaguggacuuuugcggcaagggcuaccaccugaugagcuucccucagucugccccucacggcgugguguuucugcacgugacauaugugcccgcucaagagaagaauuucaccaccgcuccagccaucugccacgacggcaaagcccacuuuccuagagaaggcguguucguguccaacggcacccauugguucgugacacagcggaacuucuacgagccccagaucaucaccaccgacaacaccuucgugucuggcaacugcgacgucgugaucggcauugugaacaauaccguguacgacccucugcagcccgagcuggacagcuucaaagaggaacuggacaaguacuuuaagaaccacacaagccccgacguggaccugggcgauaucagcggaaucaaugccagcgucgugaacauccagaaagagaucgaccggcugaacgagguggccaagaaucugaacgagagccugaucgaccugcaagaacuggggaaguacgagcaguacaucaaguggcccugguacaucuggcugggcuuuaucgccggacugauugccaucgugauggucacaaucaugcuguguugcaugaccagcugcuguagcugccugaagggcuguuguagcuguggcagcugcugcaaguucgacgaggacgauucugagcccgugcugaagggcgugaaacugcacuacacaugaggacuagucccuguucccagagcccacuuuuuuuucuuuuuuugaaauaaaauagccugucuuucagaucuaaaaaaaaaaaaaaaaaaaaaaaaaaaaaaaaaaaaaaaaaaaaaaaaaaaaaaaaaaaaaaaaaaaaaaaaaaaaaaaaaaaaaaaaaaaaaaaaaaaa

SEQ ID NO: 24834 - RNA, 4070 nt, Artificial Sequence
  SARS-CoV-2/Wuhan/WIV05/2019__EPI_ISL_402128 spike protein mRNA gc mod (1-1273)(E484K_D614G)
aggagagucccgcagucggcguccagcggcucugcuuguucgugugugugucguugcaggccuuauucaagcuuaccauguucguguuccuggugcugcugccucugguguccagccagugugugaaccugaccaccagaacacagcugccuccagccuacaccaacagcuuuaccagaggcguguacuaccccgacaagguguucagauccagcgugcugcacucuacccaggaccuguuccugccuuucuucagcaacgugaccugguuccacgccauccacguguccggcaccaauggcaccaagagauucgacaaccccgugcugcccuucaacgacgggguguacuuugccagcaccgagaaguccaacaucaucagaggcuggaucuucggcaccacacuggacagcaagacccagagccugcugaucgugaacaacgccaccaacguggucaucaaagugugcgaguuccaguucugcaacgaccccuuccugggcgucuacuaccacaagaacaacaagagcuggauggaaagcgaguuccggguguacagcagcgccaacaacugcaccuucgaguacgugucccagccuuuccugauggaccuggaaggcaagcagggcaacuucaagaaccugcgcgaguucguguuuaagaacaucgacggcuacuucaagaucuacagcaagcacaccccuaucaaccucgugcgggaucugccucagggcuucucugcucuggaaccccugguggaucugcccaucggcaucaacaucacccgguuucagacacugcuggcccugcacagaagcuaccugacaccuggcgauagcagcagcggauggacagcuggugccgccgcuuacuaugugggcuaccugcagccuagaaccuuccugcugaaguacaacgagaacggcaccaucaccgacgccguggauugugcucuggauccucugagcgagacaaagugcacccugaaguccuucaccguggaaaagggcaucuaccagaccagcaacuuccgggugcagcccaccgaauccaucgugcgguuccccaauaucaccaaucugugccccuucggcgagguguucaaugccaccagauucgccucuguguacgccuggaaccggaagcggaucagcaauugcguggccgacuacuccgugcuguacaacuccgccagcuucagcaccuucaagugcuacggcguguccccuaccaagcugaacgaccugugcuucacaaacguguacgccgacagcuucgugauccggggagaugaagugcggcagauugccccuggacagacaggcaagaucgccgacuacaacuacaagcugcccgacgacuucaccggcugugugauugccuggaacagcaacaaccuggacuccaaagucggcggcaacuacaauuaccuguaccggcuguuccggaaguccaaucugaagcccuucgagcgggacaucuccaccgagaucuaucaggccggcagcaccccuuguaacggcgugaagggcuucaacugcuacuucccacugcaguccuacggcuuucagcccacaaauggcgugggcuaucagcccuacagagugguggugcugagcuucgaacugcugcaugccccugccacagugugcggcccuaagaaaagcaccaaucucgugaagaacaaaugcgugaacuucaacuucaacggccugaccggcaccggcgugcugacagagagcaacaagaaguuccugccauuccagcaguuuggccgggauaucgccgauaccacagacgccguuagagauccccagacacuggaaauccuggacaucaccccuugcagcuucggcggagugucugugaucaccccuggcaccaacaccagcaaucagguggcagugcuguaccagggcgugaacuguaccgaagugcccguggccauucacgccgaucagcugacaccuacauggcggguguacuccaccggcagcaauguguuucagaccagagccggcugucugaucggagccgagcacgugaacaauagcuacgagugcgacauccccaucggcgcuggaaucugcgccagcuaccagacacagacaaacagcccucggagagccagaagcguggccagccagagcaucauugccuacacaaugucucugggcgccgagaacagcguggccuacuccaacaacucuaucgcuauccccaccaacuucaccaucagcgugaccacagagauccugccuguguccaugaccaagaccagcguggacugcaccauguacaucugcggcgauuccaccgagugcuccaaccugcugcugcaguacggcagcuucugcacccagcugaauagagcccugacagggaucgccguggaacaggacaagaacacccaagagguguucgcccaagugaagcagaucuacaagaccccuccuaucaaggacuucggcggcuucaauuucagccagauucugcccgauccuagcaagcccagcaagcggagcuucaucgaggaccugcuguucaacaaagugacacuggccgacgccggcuucaucaagcaguauggcgauugucugggcgacauugccgccagggaucugauuugcgcccagaaguuuaacggacugacagugcugccuccucugcugaccgaugagaugaucgcccaguacacaucugcccugcuggccggcacaaucacaagcggcuggacauuuggagcaggcgccgcucugcagauccccuuugcuaugcagauggccuaccgguucaacggcaucggagugacccagaaugugcuguacgagaaccagaagcugaucgccaaccaguucaacagcgccaucggcaagauccaggacagccugagcagcacagcaagcgcccugggaaagcugcaggacguggucaaccagaaugcccaggcacugaacacccuggucaagcagcuguccuccaacuucggcgccaucagcucugugcugaacgauauccugagcagacuggacaaggucgaggccgaggugcagaucgacagacugaucacaggcagacugcagagccuccagacauacgugacccagcagcugaucagagccgccgagauuagagccucugccaaucuggccgccaccaagaugucugagugugugcugggccagagcaagagaguggacuuuugcggcaagggcuaccaccugaugagcuucccucagucugccccucacggcgugguguuucugcacgugacauaugugcccgcucaagagaagaauuucaccaccgcuccagccaucugccacgacggcaaagcccacuuuccuagagaaggcguguucguguccaacggcacccauugguucgugacacagcggaacuucuacgagccccagaucaucaccaccgacaacaccuucgugucuggcaacugcgacgucgugaucggcauugugaacaauaccguguacgacccucugcagcccgagcuggacagcuucaaagaggaacuggacaaguacuuuaagaaccacacaagccccgacguggaccugggcgauaucagcggaaucaaugccagcgucgugaacauccagaaagagaucgaccggcugaacgagguggccaagaaucugaacgagagccugaucgaccugcaagaacuggggaaguacgagcaguacaucaaguggcccugguacaucuggcugggcuuuaucgccggacugauugccaucgugauggucacaaucaugcuguguugcaugaccagcugcuguagcugccugaagggcuguuguagcuguggcagcugcugcaaguucgacgaggacgauucugagcccgugcugaagggcgugaaacugcacuacacaugaggacuagucccuguucccagagcccacuuuuuuuucuuuuuuugaaauaaaauagccugucuuucagaucuaaaaaaaaaaaaaaaaaaaaaaaaaaaaaaaaaaaaaaaaaaaaaaaaaaaaaaaaaaaaaaaaaaaaaaaaaaaaaaaaaaaaaaaaaaaaaaaaaaaa

SEQ ID NO: 24835 - RNA, 4070 nt, Artificial Sequence
  SARS-CoV-2/Wuhan/WIV05/2019__EPI_ISL_402128 spike protein mRNA gc mod (1-1273)(L18F_T20N_P26S_D138Y_R190S_K417T_E484K_N501Y_D614G_H655Y _T1027I)
aggagagucccgcagucggcguccagcggcucugcuuguucgugugugugucguugcaggccuuauucaagcuuaccauguucguguuccuggugcugcugccucugguguccagccagugugugaacuucaccaacagaacacagcugccuagcgccuacaccaacagcuuuaccagaggcguguacuaccccgacaagguguucagauccagcgugcugcacucuacccaggaccuguuccugccuuucuucagcaacgugaccugguuccacgccauccacguguccggcaccaauggcaccaagagauucgacaaccccgugcugcccuucaacgacgggguguacuuugccagcaccgagaaguccaacaucaucagaggcuggaucuucggcaccacacuggacagcaagacccagagccugcugaucgugaacaacgccaccaacguggucaucaaagugugcgaguuccaguucugcaacuaccccuuccugggcgucuacuaccacaagaacaacaagagcuggauggaaagcgaguuccggguguacagcagcgccaacaacugcaccuucgaguacgugucccagccuuuccugauggaccuggaaggcaagcagggcaacuucaagaaccugagcgaguucguguuuaagaacaucgacggcuacuucaagaucuacagcaagcacaccccuaucaaccucgugcgggaucugccucagggcuucucugcucuggaaccccugguggaucugcccaucggcaucaacaucacccgguuucagacacugcuggcccugcacagaagcuaccugacaccuggcgauagcagcagcggauggacagcuggugccgccgcuuacuaugugggcuaccugcagccuagaaccuuccugcugaaguacaacgagaacggcaccaucaccgacgccguggauugugcucuggauccucugagcgagacaaagugcacccugaaguccuucaccguggaaaagggcaucuaccagaccagcaacuuccgggugcagcccaccgaauccaucgugcgguuccccaauaucaccaaucugugccccuucggcgagguguucaaugccaccagauucgccucuguguacgccuggaaccggaagcggaucagcaauugcguggccgacuacuccgugcuguacaacuccgccagcuucagcaccuucaagugcuacggcguguccccuaccaagcugaacgaccugugcuucacaaacguguacgccgacagcuucgugauccggggagaugaagugcggcagauugccccuggacagacaggcaccaucgccgacuacaacuacaagcugcccgacgacuucaccggcugugugauugccuggaacagcaacaaccuggacuccaaagucggcggcaacuacaauuaccuguaccggcuguuccggaaguccaaucugaagcccuucgagcgggacaucuccaccgagaucuaucaggccggcagcaccccuuguaacggcgugaagggcuucaacugcuacuucccacugcaguccuacggcuuucagcccacauacggcgugggcuaucagcccuacagagugguggugcugagcuucgaacugcugcaugccccugccacagugugcggcccuaagaaaagcaccaaucucgugaagaacaaaugcgugaacuucaacuucaacggccugaccggcaccggcgugcugacagagagcaacaagaaguuccugccauuccagcaguuuggccgggauaucgccgauaccacagacgccguuagagauccccagacacuggaaauccuggacaucaccccuugcagcuucggcggagugucugugaucaccccuggcaccaacaccagcaaucagguggcagugcuguaccagggcgugaacuguaccgaagugcccguggccauucacgccgaucagcugacaccuacauggcggguguacuccaccggcagcaauguguuucagaccagagccggcugucugaucggagccgaguacgugaacaauagcuacgagugcgacauccccaucggcgcuggaaucugcgccagcuaccagacacagacaaacagcccucggagagccagaagcguggccagccagagcaucauugccuacacaaugucucugggcgccgagaacagcguggccuacuccaacaacucuaucgcuauccccaccaacuucaccaucagcgugaccacagagauccugccuguguccaugaccaagaccagcguggacugcaccauguacaucugcggcgauuccaccgagugcuccaaccugcugcugcaguacggcagcuucugcacccagcugaauagagcccugacagggaucgccguggaacaggacaagaacacccaagagguguucgcccaagugaagcagaucuacaagaccccuccuaucaaggacuucggcggcuucaauuucagccagauucugcccgauccuagcaagcccagcaagcggagcuucaucgaggaccugcuguucaacaaagugacacuggccgacgccggcuucaucaagcaguauggcgauugucugggcgacauugccgccagggaucugauuugcgcccagaaguuuaacggacugacagugcugccuccucugcugaccgaugagaugaucgcccaguacacaucugcccugcuggccggcacaaucacaagcggcuggacauuuggagcaggcgccgcucugcagauccccuuugcuaugcagauggccuaccgguucaacggcaucggagugacccagaaugugcuguacgagaaccagaagcugaucgccaaccaguucaacagcgccaucggcaagauccaggacagccugagcagcacagcaagcgcccugggaaagcugcaggacguggucaaccagaaugcccaggcacugaacacccuggucaagcagcuguccuccaacuucggcgccaucagcucugugcugaacgauauccugagcagacuggacaaggucgaggccgaggugcagaucgacagacugaucacaggcagacugcagagccuccagacauacgugacccagcagcugaucagagccgccgagauuagagccucugccaaucuggccgccaucaagaugucugagugugugcugggccagagcaagagaguggacuuuugcggcaagggcuaccaccugaugagcuucccucagucugccccucacggcgugguguuucugcacgugacauaugugcccgcucaagagaagaauuucaccaccgcuccagccaucugccacgacggcaaagcccacuuuccuagagaaggcguguucguguccaacggcacccauugguucgugacacagcggaacuucuacgagccccagaucaucaccaccgacaacaccuucgugucuggcaacugcgacgucgugaucggcauugugaacaauaccguguacgacccucugcagcccgagcuggacagcuucaaagaggaacuggacaaguacuuuaagaaccacacaagccccgacguggaccugggcgauaucagcggaaucaaugccagcgucgugaacauccagaaagagaucgaccggcugaacgagguggccaagaaucugaacgagagccugaucgaccugcaagaacuggggaaguacgagcaguacaucaaguggcccugguacaucuggcugggcuuuaucgccggacugauugccaucgugauggucacaaucaugcuguguugcaugaccagcugcuguagcugccugaagggcuguuguagcuguggcagcugcugcaaguucgacgaggacgauucugagcccgugcugaagggcgugaaacugcacuacacaugaggacuagucccuguucccagagcccacuuuuuuuucuuuuuuugaaauaaaauagccugucuuucagaucuaaaaaaaaaaaaaaaaaaaaaaaaaaaaaaaaaaaaaaaaaaaaaaaaaaaaaaaaaaaaaaaaaaaaaaaaaaaaaaaaaaaaaaaaaaaaaaaaaaaa

SEQ ID NO: 24836 - RNA, 4070 nt, Artificial Sequence
  SARS-CoV-2/Wuhan/WIV05/2019__EPI_ISL_402128 spike protein mRNA gc mod (1-1273)(S13I_W152C_L452R_D614G)
aggagagucccgcagucggcguccagcggcucugcuuguucgugugugugucguugcaggccuuauucaagcuuaccauguucguguuccuggugcugcugccucugguguccauccagugugugaaccugaccaccagaacacagcugccuccagccuacaccaacagcuuuaccagaggcguguacuaccccgacaagguguucagauccagcgugcugcacucuacccaggaccuguuccugccuuucuucagcaacgugaccugguuccacgccauccacguguccggcaccaauggcaccaagagauucgacaaccccgugcugcccuucaacgacgggguguacuuugccagcaccgagaaguccaacaucaucagaggcuggaucuucggcaccacacuggacagcaagacccagagccugcugaucgugaacaacgccaccaacguggucaucaaagugugcgaguuccaguucugcaacgaccccuuccugggcgucuacuaccacaagaacaacaagagcugcauggaaagcgaguuccggguguacagcagcgccaacaacugcaccuucgaguacgugucccagccuuuccugauggaccuggaaggcaagcagggcaacuucaagaaccugcgcgaguucguguuuaagaacaucgacggcuacuucaagaucuacagcaagcacaccccuaucaaccucgugcgggaucugccucagggcuucucugcucuggaaccccugguggaucugcccaucggcaucaacaucacccgguuucagacacugcuggcccugcacagaagcuaccugacaccuggcgauagcagcagcggauggacagcuggugccgccgcuuacuaugugggcuaccugcagccuagaaccuuccugcugaaguacaacgagaacggcaccaucaccgacgccguggauugugcucuggauccucugagcgagacaaagugcacccugaaguccuucaccguggaaaagggcaucuaccagaccagcaacuuccgggugcagcccaccgaauccaucgugcgguuccccaauaucaccaaucugugccccuucggcgagguguucaaugccaccagauucgccucuguguacgccuggaaccggaagcggaucagcaauugcguggccgacuacuccgugcuguacaacuccgccagcuucagcaccuucaagugcuacggcguguccccuaccaagcugaacgaccugugcuucacaaacguguacgccgacagcuucgugauccggggagaugaagugcggcagauugccccuggacagacaggcaagaucgccgacuacaacuacaagcugcccgacgacuucaccggcugugugauugccuggaacagcaacaaccuggacuccaaagucggcggcaacuacaauuaccgcuaccggcuguuccggaaguccaaucugaagcccuucgagcgggacaucuccaccgagaucuaucaggccggcagcaccccuuguaacggcguggaaggcuucaacugcuacuucccacugcaguccuacggcuuucagcccacaaauggcgugggcuaucagcccuacagagugguggugcugagcuucgaacugcugcaugccccugccacagugugcggcccuaagaaaagcaccaaucucgugaagaacaaaugcgugaacuucaacuucaacggccugaccggcaccggcgugcugacagagagcaacaagaaguuccugccauuccagcaguuuggccgggauaucgccgauaccacagacgccguuagagauccccagacacuggaaauccuggacaucaccccuugcagcuucggcggagugucugugaucaccccuggcaccaacaccagcaaucagguggcagugcuguaccagggcgugaacuguaccgaagugcccguggccauucacgccgaucagcugacaccuacauggcggguguacuccaccggcagcaauguguuucagaccagagccggcugucugaucggagccgagcacgugaacaauagcuacgagugcgacauccccaucggcgcuggaaucugcgccagcuaccagacacagacaaacagcccucggagagccagaagcguggccagccagagcaucauugccuacacaaugucucugggcgccgagaacagcguggccuacuccaacaacucuaucgcuauccccaccaacuucaccaucagcgugaccacagagauccugccuguguccaugaccaagaccagcguggacugcaccauguacaucugcggcgauuccaccgagugcuccaaccugcugcugcaguacggcagcuucugcacccagcugaauagagcccugacagggaucgccguggaacaggacaagaacacccaagagguguucgcccaagugaagcagaucuacaagaccccuccuaucaaggacuucggcggcuucaauuucagccagauucugcccgauccuagcaagcccagcaagcggagcuucaucgaggaccugcuguucaacaaagugacacuggccgacgccggcuucaucaagcaguauggcgauugucugggcgacauugccgccagggaucugauuugcgcccagaaguuuaacggacugacagugcugccuccucugcugaccgaugagaugaucgcccaguacacaucugcccugcuggccggcacaaucacaagcggcuggacauuuggagcaggcgccgcucugcagauccccuuugcuaugcagauggccuaccgguucaacggcaucggagugacccagaaugugcuguacgagaaccagaagcugaucgccaaccaguucaacagcgccaucggcaagauccaggacagccugagcagcacagcaagcgcccugggaaagcugcaggacguggucaaccagaaugcccaggcacugaacacccuggucaagcagcuguccuccaacuucggcgccaucagcucugugcugaacgauauccugagcagacuggacaaggucgaggccgaggugcagaucgacagacugaucacaggcagacugcagagccuccagacauacgugacccagcagcugaucagagccgccgagauuagagccucugccaaucuggccgccaccaagaugucugagugugugcugggccagagcaagagaguggacuuuugcggcaagggcuaccaccugaugagcuucccucagucugccccucacggcgugguguuucugcacgugacauaugugcccgcucaagagaagaauuucaccaccgcuccagccaucugccacgacggcaaagcccacuuuccuagagaaggcguguucguguccaacggcacccauugguucgugacacagcggaacuucuacgagccccagaucaucaccaccgacaacaccuucgugucuggcaacugcgacgucgugaucggcauugugaacaauaccguguacgacccucugcagcccgagcuggacagcuucaaagaggaacuggacaaguacuuuaagaaccacacaagccccgacguggaccugggcgauaucagcggaaucaaugccagcgucgugaacauccagaaagagaucgaccggcugaacgagguggccaagaaucugaacgagagccugaucgaccugcaagaacuggggaaguacgagcaguacaucaaguggcccugguacaucuggcugggcuuuaucgccggacugauugccaucgugauggucacaaucaugcuguguugcaugaccagcugcuguagcugccugaagggcuguuguagcuguggcagcugcugcaaguucgacgaggacgauucugagcccgugcugaagggcgugaaacugcacuacacaugaggacuagucccuguucccagagcccacuuuuuuuucuuuuuuugaaauaaaauagccugucuuucagaucuaaaaaaaaaaaaaaaaaaaaaaaaaaaaaaaaaaaaaaaaaaaaaaaaaaaaaaaaaaaaaaaaaaaaaaaaaaaaaaaaaaaaaaaaaaaaaaaaaaaa

SEQ ID NO: 24837 - RNA, 4070 nt, Artificial Sequence
  SARS-CoV-2/Wuhan/WIV05/2019__EPI_ISL_402128 spike protein mRNA gc (1-1273)(K986P_V987P) R10153
aggagagucccgcagucggcguccagcggcucugcuuguucgugugugugucguugcaggccuuauucaagcuuaccauguucguguuccugguccuccugccccuggugagcucccagugcgugaaccucaccacccgcacgcagcugccgcccgccuacaccaacagcuucacccggggcgucuacuaccccgacaagguguuccgcuccagcgugcugcacuccacccaggaccucuuccugcccuucuucagcaacgucacgugguuccacgccauccacguguccgggaccaacggcaccaagcgguucgacaacccggugcugcccuucaacgacggggucuacuucgcgagcaccgagaaguccaacaucauccgcggcuggaucuucgggacgacccucgacagcaagacccagucccugcugaucgugaacaacgccaccaacguggucaucaaggugugcgaguuccaguucugcaacgaccccuuccucggcguguacuaccacaagaacaacaagagcuggauggaguccgaguuccgggucuacagcuccgccaacaacugcacguucgaguacgugagccagcccuuccugauggaccuggagggcaagcaggggaacuucaagaaccuccgcgaguucguguucaagaacaucgacggcuacuucaagaucuacuccaagcacaccccgaucaaccugguccgggaccugccccagggguucagcgcccucgagccccugguggaccugcccaucggcaucaacaucacccgcuuccagacccuccuggcccugcaccgguccuaccucacgccgggggacagcagcuccggcuggaccgcgggcgccgccgccuacuacgugggguaccugcagccccgcaccuuccugcucaaguacaacgagaacggcaccaucacggacgcggucgacugcgcccuggacccccugagcgagaccaagugcacccucaaguccuucaccguggagaaggggaucuaccagacgagcaacuuccgggugcagcccaccgaguccaucguccgcuucccgaacaucaccaaccugugccccuucggcgagguguucaacgccacccgguucgccagcgucuacgccuggaaccgcaagcggaucuccaacugcguggcggacuacagcgugcuguacaacuccgccagcuucuccacguucaagugcuacggcgucagccccaccaagcucaacgaccugugcuucaccaacguguacgccgacuccuucgugauccgcggggacgagguccggcagaucgcccccggccagaccgggaagaucgccgacuacaacuacaagcugccggacgacuucacgggcugcgugaucgcguggaacagcaacaaccucgacuccaaggucgggggcaacuacaacuaccuguaccgccuguuccgcaagagcaaccucaagcccuucgagcgggacaucuccaccgagaucuaccaggccggcagcacccccugcaacgggguggagggcuucaacugcuacuucccccugcaguccuacggguuccagccgaccaacggcgugggguaccagcccuaccggguggucgugcugagcuucgagcuccugcacgcccccgccacggugugcggccccaagaaguccaccaaccuggucaagaacaagugcgugaacuucaacuucaacggccucaccgggaccggcgugcugaccgagagcaacaagaaguuccugccguuccagcaguucgggcgcgacaucgccgacacgaccgacgcgguccgcgacccccagacccuggagauccucgacaucacccccugcagcuucggcgggguguccgugaucacgccgggcaccaacaccagcaaccaggucgccgugcuguaccaggacgugaacugcaccgagguccccguggccauccacgccgaccagcugacgcccaccuggcggguguacuccaccggcagcaacgucuuccagacccgcgccgggugccucaucggcgcggagcacgugaacaacuccuacgagugcgacauccccaucggggccggcaucugcgccagcuaccagacgcagaccaacuccccgcggcgcgcccggagcguggcgucccagagcaucaucgccuacaccaugucccugggcgccgagaacagcgucgccuacuccaacaacagcaucgccauccccaccaacuucacgaucuccgugaccaccgagauccugcccgugagcaugaccaagacgagcgucgacugcaccauguacaucugcggggacuccaccgagugcagcaaccuccugcugcaguacggcuccuucugcacccagcucaaccgcgcgcugacggggaucgccguggagcaggacaagaacacccaggagguguucgcccaggucaagcagaucuacaagacgcccccgaucaaggacuucggcggguucaacuucagccagauccugcccgaccccuccaagcccagcaagcgguccuucaucgaggaccuccuguucaacaaggugacccuggccgacgccggcuucaucaagcaguacggcgacugccucggggacaucgcggcccgcgaccugaucugcgcccagaaguucaacggccugaccgugcucccgccccugcugaccgacgagaugaucgcccaguacaccagcgcccuccuggcggggaccaucacguccggcuggaccuucggggccggcgccgcccugcagauccccuucgcgaugcagauggccuaccgguucaacggcaucggggucacccagaacgugcucuacgagaaccagaagcugaucgccaaccaguucaacagcgccaucggcaagauccaggacucccugagcuccaccgccagcgcgcucgggaagcugcaggacguggucaaccagaacgcccaggcccugaacacgcucgugaagcagcuguccagcaacuucggcgccaucuccagcgugcugaacgacauccucucccgccuggacccgcccgaggccgaggugcagaucgaccggcugaucaccgggcgccuccagagccugcagaccuacgugacccagcagcugauccgggcggccgagauccgcgccagcgccaaccucgccgcgaccaagauguccgagugcguccugggccagagcaagcggguggacuucugcggcaagggguaccaccugauguccuucccccagagcgccccgcacggcguggucuuccuccacgugacguacguccccgcccaggagaagaacuucaccaccgcccccgcgaucugccacgacgggaaggcccacuucccccgcgagggcguguucguguccaacgggacccacugguucgucacgcagcggaacuucuacgagccgcagaucaucaccaccgacaacaccuucgugagcggcaacugcgacguggucaucggcaucgugaacaacacgguguacgacccccugcagcccgagcuggacuccuucaaggaggagcucgacaaguacuucaagaaccacaccagccccgacgucgaccugggggacaucuccggcaucaacgccagcguggugaacauccagaaggagaucgaccgccugaacgaggucgccaagaaccucaacgagucccugaucgaccugcaggagcucgggaaguacgagcaguacaucaaguggccgugguacaucuggcugggcuucaucgccggccugaucgcgaucgugauggugaccaucaugcucugcugcaugaccagcugcugcuccugccugaaggggugcugcagcugcggcuccugcugcaaguucgacgaggacgacagcgagcccguccugaagggggugaagcuccacuacacgugaggacuagucccuguucccagagcccacuuuuuuuucuuuuuuugaaauaaaauagccugucuuucagaucuaaaaaaaaaaaaaaaaaaaaaaaaaaaaaaaaaaaaaaaaaaaaaaaaaaaaaaaaaaaaaaaaaaaaaaaaaaaaaaaaaaaaaaaaaaaaaaaaaaaa

SEQ ID NO: 24838 - RNA, 4070 nt, Artificial Sequence
  SARS-CoV-2/Wuhan/WIV05/2019__EPI_ISL_402128 spike protein mRNA gc (1-1273)(K986P_V987P_ D614G)
aggagagucccgcagucggcguccagcggcucugcuuguucgugugugugucguugcaggccuuauucaagcuuaccauguucguguuccugguccuccugccccuggugagcucccagugcgugaaccucaccacccgcacgcagcugccgcccgccuacaccaacagcuucacccggggcgucuacuaccccgacaagguguuccgcuccagcgugcugcacuccacccaggaccucuuccugcccuucuucagcaacgucacgugguuccacgccauccacguguccgggaccaacggcaccaagcgguucgacaacccggugcugcccuucaacgacggggucuacuucgcgagcaccgagaaguccaacaucauccgcggcuggaucuucgggacgacccucgacagcaagacccagucccugcugaucgugaacaacgccaccaacguggucaucaaggugugcgaguuccaguucugcaacgaccccuuccucggcguguacuaccacaagaacaacaagagcuggauggaguccgaguuccgggucuacagcuccgccaacaacugcacguucgaguacgugagccagcccuuccugauggaccuggagggcaagcaggggaacuucaagaaccuccgcgaguucguguucaagaacaucgacggcuacuucaagaucuacuccaagcacaccccgaucaaccugguccgggaccugccccagggguucagcgcccucgagccccugguggaccugcccaucggcaucaacaucacccgcuuccagacccuccuggcccugcaccgguccuaccucacgccgggggacagcagcuccggcuggaccgcgggcgccgccgccuacuacgugggguaccugcagccccgcaccuuccugcucaaguacaacgagaacggcaccaucacggacgcggucgacugcgcccuggacccccugagcgagaccaagugcacccucaaguccuucaccguggagaaggggaucuaccagacgagcaacuuccgggugcagcccaccgaguccaucguccgcuucccgaacaucaccaaccugugccccuucggcgagguguucaacgccacccgguucgccagcgucuacgccuggaaccgcaagcggaucuccaacugcguggcggacuacagcgugcuguacaacuccgccagcuucuccacguucaagugcuacggcgucagccccaccaagcucaacgaccugugcuucaccaacguguacgccgacuccuucgugauccgcggggacgagguccggcagaucgcccccggccagaccgggaagaucgccgacuacaacuacaagcugccggacgacuucacgggcugcgugaucgcguggaacagcaacaaccucgacuccaaggucgggggcaacuacaacuaccuguaccgccuguuccgcaagagcaaccucaagcccuucgagcgggacaucuccaccgagaucuaccaggccggcagcacccccugcaacgggguggagggcuucaacugcuacuucccccugcaguccuacggguuccagccgaccaacggcgugggguaccagcccuaccggguggucgugcugagcuucgagcuccugcacgcccccgccacggugugcggccccaagaaguccaccaaccuggucaagaacaagugcgugaacuucaacuucaacggccucaccgggaccggcgugcugaccgagagcaacaagaaguuccugccguuccagcaguucgggcgcgacaucgccgacacgaccgacgcgguccgcgacccccagacccuggagauccucgacaucacccccugcagcuucggcgggguguccgugaucacgccgggcaccaacaccagcaaccaggucgccgugcuguaccagggcgugaacugcaccgagguccccguggccauccacgccgaccagcugacgcccaccuggcggguguacuccaccggcagcaacgucuuccagacccgcgccgggugccucaucggcgcggagcacgugaacaacuccuacgagugcgacauccccaucggggccggcaucugcgccagcuaccagacgcagaccaacuccccgcggcgcgcccggagcguggcgucccagagcaucaucgccuacaccaugucccugggcgccgagaacagcgucgccuacuccaacaacagcaucgccauccccaccaacuucacgaucuccgugaccaccgagauccugcccgugagcaugaccaagacgagcgucgacugcaccauguacaucugcggggacuccaccgagugcagcaaccuccugcugcaguacggcuccuucugcacccagcucaaccgcgcgcugacggggaucgccguggagcaggacaagaacacccaggagguguucgcccaggucaagcagaucuacaagacgcccccgaucaaggacuucggcggguucaacuucagccagauccugcccgaccccuccaagcccagcaagcgguccuucaucgaggaccuccuguucaacaaggugacccuggccgacgccggcuucaucaagcaguacggcgacugccucggggacaucgcggcccgcgaccugaucugcgcccagaaguucaacggccugaccgugcucccgccccugcugaccgacgagaugaucgcccaguacaccagcgcccuccuggcggggaccaucacguccggcuggaccuucggggccggcgccgcccugcagauccccuucgcgaugcagauggccuaccgguucaacggcaucggggucacccagaacgugcucuacgagaaccagaagcugaucgccaaccaguucaacagcgccaucggcaagauccaggacucccugagcuccaccgccagcgcgcucgggaagcugcaggacguggucaaccagaacgcccaggcccugaacacgcucgugaagcagcuguccagcaacuucggcgccaucuccagcgugcugaacgacauccucucccgccuggacccgcccgaggccgaggugcagaucgaccggcugaucaccgggcgccuccagagccugcagaccuacgugacccagcagcugauccgggcggccgagauccgcgccagcgccaaccucgccgcgaccaagauguccgagugcguccugggccagagcaagcggguggacuucugcggcaagggguaccaccugauguccuucccccagagcgccccgcacggcguggucuuccuccacgugacguacguccccgcccaggagaagaacuucaccaccgcccccgcgaucugccacgacgggaaggcccacuucccccgcgagggcguguucguguccaacgggacccacugguucgucacgcagcggaacuucuacgagccgcagaucaucaccaccgacaacaccuucgugagcggcaacugcgacguggucaucggcaucgugaacaacacgguguacgacccccugcagcccgagcuggacuccuucaaggaggagcucgacaaguacuucaagaaccacaccagccccgacgucgaccugggggacaucuccggcaucaacgccagcguggugaacauccagaaggagaucgaccgccugaacgaggucgccaagaaccucaacgagucccugaucgaccugcaggagcucgggaaguacgagcaguacaucaaguggccgugguacaucuggcugggcuucaucgccggccugaucgcgaucgugauggugaccaucaugcucugcugcaugaccagcugcugcuccugccugaaggggugcugcagcugcggcuccugcugcaaguucgacgaggacgacagcgagcccguccugaagggggugaagcuccacuacacgugaggacuagucccuguucccagagcccacuuuuuuuucuuuuuuugaaauaaaauagccugucuuucagaucuaaaaaaaaaaaaaaaaaaaaaaaaaaaaaaaaaaaaaaaaaaaaaaaaaaaaaaaaaaaaaaaaaaaaaaaaaaaaaaaaaaaaaaaaaaaaaaaaaaaa

SEQ ID NO: 24839 - RNA, 4070 nt, Artificial Sequence
  SARS-CoV-2/Wuhan/WIV05/2019__EPI_ISL_402128 spike protein mRNA gc (1-1273)(K986P_V987P_A222V_D614G)
aggagagucccgcagucggcguccagcggcucugcuuguucgugugugugucguugcaggccuuauucaagcuuaccauguucguguuccugguccuccugccccuggugagcucccagugcgugaaccucaccacccgcacgcagcugccgcccgccuacaccaacagcuucacccggggcgucuacuaccccgacaagguguuccgcuccagcgugcugcacuccacccaggaccucuuccugcccuucuucagcaacgucacgugguuccacgccauccacguguccgggaccaacggcaccaagcgguucgacaacccggugcugcccuucaacgacggggucuacuucgcgagcaccgagaaguccaacaucauccgcggcuggaucuucgggacgacccucgacagcaagacccagucccugcugaucgugaacaacgccaccaacguggucaucaaggugugcgaguuccaguucugcaacgaccccuuccucggcguguacuaccacaagaacaacaagagcuggauggaguccgaguuccgggucuacagcuccgccaacaacugcacguucgaguacgugagccagcccuuccugauggaccuggagggcaagcaggggaacuucaagaaccuccgcgaguucguguucaagaacaucgacggcuacuucaagaucuacuccaagcacaccccgaucaaccugguccgggaccugccccagggguucagcguccucgagccccugguggaccugcccaucggcaucaacaucacccgcuuccagacccuccuggcccugcaccgguccuaccucacgccgggggacagcagcuccggcuggaccgcgggcgccgccgccuacuacgugggguaccugcagccccgcaccuuccugcucaaguacaacgagaacggcaccaucacggacgcggucgacugcgcccuggacccccugagcgagaccaagugcacccucaaguccuucaccguggagaaggggaucuaccagacgagcaacuuccgggugcagcccaccgaguccaucguccgcuucccgaacaucaccaaccugugccccuucggcgagguguucaacgccacccgguucgccagcgucuacgccuggaaccgcaagcggaucuccaacugcguggcggacuacagcgugcuguacaacuccgccagcuucuccacguucaagugcuacggcgucagccccaccaagcucaacgaccugugcuucaccaacguguacgccgacuccuucgugauccgcggggacgagguccggcagaucgcccccggccagaccgggaagaucgccgacuacaacuacaagcugccggacgacuucacgggcugcgugaucgcguggaacagcaacaaccucgacuccaaggucgggggcaacuacaacuaccuguaccgccuguuccgcaagagcaaccucaagcccuucgagcgggacaucuccaccgagaucuaccaggccggcagcacccccugcaacgggguggagggcuucaacugcuacuucccccugcaguccuacggguuccagccgaccaacggcgugggguaccagcccuaccggguggucgugcugagcuucgagcuccugcacgcccccgccacggugugcggccccaagaaguccaccaaccuggucaagaacaagugcgugaacuucaacuucaacggccucaccgggaccggcgugcugaccgagagcaacaagaaguuccugccguuccagcaguucgggcgcgacaucgccgacacgaccgacgcgguccgcgacccccagacccuggagauccucgacaucacccccugcagcuucggcgggguguccgugaucacgccgggcaccaacaccagcaaccaggucgccgugcuguaccagggcgugaacugcaccgagguccccguggccauccacgccgaccagcugacgcccaccuggcggguguacuccaccggcagcaacgucuuccagacccgcgccgggugccucaucggcgcggagcacgugaacaacuccuacgagugcgacauccccaucggggccggcaucugcgccagcuaccagacgcagaccaacuccccgcggcgcgcccggagcguggcgucccagagcaucaucgccuacaccaugucccugggcgccgagaacagcgucgccuacuccaacaacagcaucgccauccccaccaacuucacgaucuccgugaccaccgagauccugcccgugagcaugaccaagacgagcgucgacugcaccauguacaucugcggggacuccaccgagugcagcaaccuccugcugcaguacggcuccuucugcacccagcucaaccgcgcgcugacggggaucgccguggagcaggacaagaacacccaggagguguucgcccaggucaagcagaucuacaagacgcccccgaucaaggacuucggcggguucaacuucagccagauccugcccgaccccuccaagcccagcaagcgguccuucaucgaggaccuccuguucaacaaggugacccuggccgacgccggcuucaucaagcaguacggcgacugccucggggacaucgcggcccgcgaccugaucugcgcccagaaguucaacggccugaccgugcucccgccccugcugaccgacgagaugaucgcccaguacaccagcgcccuccuggcggggaccaucacguccggcuggaccuucggggccggcgccgcccugcagauccccuucgcgaugcagauggccuaccgguucaacggcaucggggucacccagaacgugcucuacgagaaccagaagcugaucgccaaccaguucaacagcgccaucggcaagauccaggacucccugagcuccaccgccagcgcgcucgggaagcugcaggacguggucaaccagaacgcccaggcccugaacacgcucgugaagcagcuguccagcaacuucggcgccaucuccagcgugcugaacgacauccucucccgccuggacccgcccgaggccgaggugcagaucgaccggcugaucaccgggcgccuccagagccugcagaccuacgugacccagcagcugauccgggcggccgagauccgcgccagcgccaaccucgccgcgaccaagauguccgagugcguccugggccagagcaagcggguggacuucugcggcaagggguaccaccugauguccuucccccagagcgccccgcacggcguggucuuccuccacgugacguacguccccgcccaggagaagaacuucaccaccgcccccgcgaucugccacgacgggaaggcccacuucccccgcgagggcguguucguguccaacgggacccacugguucgucacgcagcggaacuucuacgagccgcagaucaucaccaccgacaacaccuucgugagcggcaacugcgacguggucaucggcaucgugaacaacacgguguacgacccccugcagcccgagcuggacuccuucaaggaggagcucgacaaguacuucaagaaccacaccagccccgacgucgaccugggggacaucuccggcaucaacgccagcguggugaacauccagaaggagaucgaccgccugaacgaggucgccaagaaccucaacgagucccugaucgaccugcaggagcucgggaaguacgagcaguacaucaaguggccgugguacaucuggcugggcuucaucgccggccugaucgcgaucgugauggugaccaucaugcucugcugcaugaccagcugcugcuccugccugaaggggugcugcagcugcggcuccugcugcaaguucgacgaggacgacagcgagcccguccugaagggggugaagcuccacuacacgugaggacuagucccuguucccagagcccacuuuuuuuucuuuuuuugaaauaaaauagccugucuuucagaucuaaaaaaaaaaaaaaaaaaaaaaaaaaaaaaaaaaaaaaaaaaaaaaaaaaaaaaaaaaaaaaaaaaaaaaaaaaaaaaaaaaaaaaaaaaaaaaaaaaaa

SEQ ID NO: 24840 - RNA, 4070 nt, Artificial Sequence
  SARS-CoV-2/Wuhan/WIV05/2019__EPI_ISL_402128 spike protein mRNA gc (1-1273)(K986P_V987P_N439K_D614G)
aggagagucccgcagucggcguccagcggcucugcuuguucgugugugugucguugcaggccuuauucaagcuuaccauguucguguuccugguccuccugccccuggugagcucccagugcgugaaccucaccacccgcacgcagcugccgcccgccuacaccaacagcuucacccggggcgucuacuaccccgacaagguguuccgcuccagcgugcugcacuccacccaggaccucuuccugcccuucuucagcaacgucacgugguuccacgccauccacguguccgggaccaacggcaccaagcgguucgacaacccggugcugcccuucaacgacggggucuacuucgcgagcaccgagaaguccaacaucauccgcggcuggaucuucgggacgacccucgacagcaagacccagucccugcugaucgugaacaacgccaccaacguggucaucaaggugugcgaguuccaguucugcaacgaccccuuccucggcguguacuaccacaagaacaacaagagcuggauggaguccgaguuccgggucuacagcuccgccaacaacugcacguucgaguacgugagccagcccuuccugauggaccuggagggcaagcaggggaacuucaagaaccuccgcgaguucguguucaagaacaucgacggcuacuucaagaucuacuccaagcacaccccgaucaaccugguccgggaccugccccagggguucagcgcccucgagccccugguggaccugcccaucggcaucaacaucacccgcuuccagacccuccuggcccugcaccgguccuaccucacgccgggggacagcagcuccggcuggaccgcgggcgccgccgccuacuacgugggguaccugcagccccgcaccuuccugcucaaguacaacgagaacggcaccaucacggacgcggucgacugcgcccuggacccccugagcgagaccaagugcacccucaaguccuucaccguggagaaggggaucuaccagacgagcaacuuccgggugcagcccaccgaguccaucguccgcuucccgaacaucaccaaccugugccccuucggcgagguguucaacgccacccgguucgccagcgucuacgccuggaaccgcaagcggaucuccaacugcguggcggacuacagcgugcuguacaacuccgccagcuucuccacguucaagugcuacggcgucagccccaccaagcucaacgaccugugcuucaccaacguguacgccgacuccuucgugauccgcggggacgagguccggcagaucgcccccggccagaccgggaagaucgccgacuacaacuacaagcugccggacgacuucacgggcugcgugaucgcguggaacagcaagaaccucgacuccaaggucgggggcaacuacaacuaccuguaccgccuguuccgcaagagcaaccucaagcccuucgagcgggacaucuccaccgagaucuaccaggccggcagcacccccugcaacgggguggagggcuucaacugcuacuucccccugcaguccuacggguuccagccgaccaacggcgugggguaccagcccuaccggguggucgugcugagcuucgagcuccugcacgcccccgccacggugugcggccccaagaaguccaccaaccuggucaagaacaagugcgugaacuucaacuucaacggccucaccgggaccggcgugcugaccgagagcaacaagaaguuccugccguuccagcaguucgggcgcgacaucgccgacacgaccgacgcgguccgcgacccccagacccuggagauccucgacaucacccccugcagcuucggcgggguguccgugaucacgccgggcaccaacaccagcaaccaggucgccgugcuguaccagggcgugaacugcaccgagguccccguggccauccacgccgaccagcugacgcccaccuggcggguguacuccaccggcagcaacgucuuccagacccgcgccgggugccucaucggcgcggagcacgugaacaacuccuacgagugcgacauccccaucggggccggcaucugcgccagcuaccagacgcagaccaacuccccgcggcgcgcccggagcguggcgucccagagcaucaucgccuacaccaugucccugggcgccgagaacagcgucgccuacuccaacaacagcaucgccauccccaccaacuucacgaucuccgugaccaccgagauccugcccgugagcaugaccaagacgagcgucgacugcaccauguacaucugcggggacuccaccgagugcagcaaccuccugcugcaguacggcuccuucugcacccagcucaaccgcgcgcugacggggaucgccguggagcaggacaagaacacccaggagguguucgcccaggucaagcagaucuacaagacgcccccgaucaaggacuucggcggguucaacuucagccagauccugcccgaccccuccaagcccagcaagcgguccuucaucgaggaccuccuguucaacaaggugacccuggccgacgccggcuucaucaagcaguacggcgacugccucggggacaucgcggcccgcgaccugaucugcgcccagaaguucaacggccugaccgugcucccgccccugcugaccgacgagaugaucgcccaguacaccagcgcccuccuggcggggaccaucacguccggcuggaccuucggggccggcgccgcccugcagauccccuucgcgaugcagauggccuaccgguucaacggcaucggggucacccagaacgugcucuacgagaaccagaagcugaucgccaaccaguucaacagcgccaucggcaagauccaggacucccugagcuccaccgccagcgcgcucgggaagcugcaggacguggucaaccagaacgcccaggcccugaacacgcucgugaagcagcuguccagcaacuucggcgccaucuccagcgugcugaacgacauccucucccgccuggacccgcccgaggccgaggugcagaucgaccggcugaucaccgggcgccuccagagccugcagaccuacgugacccagcagcugauccgggcggccgagauccgcgccagcgccaaccucgccgcgaccaagauguccgagugcguccugggccagagcaagcggguggacuucugcggcaagggguaccaccugauguccuucccccagagcgccccgcacggcguggucuuccuccacgugacguacguccccgcccaggagaagaacuucaccaccgcccccgcgaucugccacgacgggaaggcccacuucccccgcgagggcguguucguguccaacgggacccacugguucgucacgcagcggaacuucuacgagccgcagaucaucaccaccgacaacaccuucgugagcggcaacugcgacguggucaucggcaucgugaacaacacgguguacgacccccugcagcccgagcuggacuccuucaaggaggagcucgacaaguacuucaagaaccacaccagccccgacgucgaccugggggacaucuccggcaucaacgccagcguggugaacauccagaaggagaucgaccgccugaacgaggucgccaagaaccucaacgagucccugaucgaccugcaggagcucgggaaguacgagcaguacaucaaguggccgugguacaucuggcugggcuucaucgccggccugaucgcgaucgugauggugaccaucaugcucugcugcaugaccagcugcugcuccugccugaaggggugcugcagcugcggcuccugcugcaaguucgacgaggacgacagcgagcccguccugaagggggugaagcuccacuacacgugaggacuagucccuguucccagagcccacuuuuuuuucuuuuuuugaaauaaaauagccugucuuucagaucuaaaaaaaaaaaaaaaaaaaaaaaaaaaaaaaaaaaaaaaaaaaaaaaaaaaaaaaaaaaaaaaaaaaaaaaaaaaaaaaaaaaaaaaaaaaaaaaaaaaa

SEQ ID NO: 24841 - RNA, 4070 nt, Artificial Sequence
  SARS-CoV-2/Wuhan/WIV05/2019__EPI_ISL_402128 spike protein mRNA gc (1-1273)(K986P_V987P_S477N_D614G)
aggagagucccgcagucggcguccagcggcucugcuuguucgugugugugucguugcaggccuuauucaagcuuaccauguucguguuccugguccuccugccccuggugagcucccagugcgugaaccucaccacccgcacgcagcugccgcccgccuacaccaacagcuucacccggggcgucuacuaccccgacaagguguuccgcuccagcgugcugcacuccacccaggaccucuuccugcccuucuucagcaacgucacgugguuccacgccauccacguguccgggaccaacggcaccaagcgguucgacaacccggugcugcccuucaacgacggggucuacuucgcgagcaccgagaaguccaacaucauccgcggcuggaucuucgggacgacccucgacagcaagacccagucccugcugaucgugaacaacgccaccaacguggucaucaaggugugcgaguuccaguucugcaacgaccccuuccucggcguguacuaccacaagaacaacaagagcuggauggaguccgaguuccgggucuacagcuccgccaacaacugcacguucgaguacgugagccagcccuuccugauggaccuggagggcaagcaggggaacuucaagaaccuccgcgaguucguguucaagaacaucgacggcuacuucaagaucuacuccaagcacaccccgaucaaccugguccgggaccugccccagggguucagcgcccucgagccccugguggaccugcccaucggcaucaacaucacccgcuuccagacccuccuggcccugcaccgguccuaccucacgccgggggacagcagcuccggcuggaccgcgggcgccgccgccuacuacgugggguaccugcagccccgcaccuuccugcucaaguacaacgagaacggcaccaucacggacgcggucgacugcgcccuggacccccugagcgagaccaagugcacccucaaguccuucaccguggagaaggggaucuaccagacgagcaacuuccgggugcagcccaccgaguccaucguccgcuucccgaacaucaccaaccugugccccuucggcgagguguucaacgccacccgguucgccagcgucuacgccuggaaccgcaagcggaucuccaacugcguggcggacuacagcgugcuguacaacuccgccagcuucuccacguucaagugcuacggcgucagccccaccaagcucaacgaccugugcuucaccaacguguacgccgacuccuucgugauccgcggggacgagguccggcagaucgcccccggccagaccgggaagaucgccgacuacaacuacaagcugccggacgacuucacgggcugcgugaucgcguggaacagcaacaaccucgacuccaaggucgggggcaacuacaacuaccuguaccgccuguuccgcaagagcaaccucaagcccuucgagcgggacaucuccaccgagaucuaccaggccggcaacacccccugcaacgggguggagggcuucaacugcuacuucccccugcaguccuacggguuccagccgaccaacggcgugggguaccagcccuaccggguggucgugcugagcuucgagcuccugcacgcccccgccacggugugcggccccaagaaguccaccaaccuggucaagaacaagugcgugaacuucaacuucaacggccucaccgggaccggcgugcugaccgagagcaacaagaaguuccugccguuccagcaguucgggcgcgacaucgccgacacgaccgacgcgguccgcgacccccagacccuggagauccucgacaucacccccugcagcuucggcgggguguccgugaucacgccgggcaccaacaccagcaaccaggucgccgugcuguaccagggcgugaacugcaccgagguccccguggccauccacgccgaccagcugacgcccaccuggcggguguacuccaccggcagcaacgucuuccagacccgcgccgggugccucaucggcgcggagcacgugaacaacuccuacgagugcgacauccccaucggggccggcaucugcgccagcuaccagacgcagaccaacuccccgcggcgcgcccggagcguggcgucccagagcaucaucgccuacaccaugucccugggcgccgagaacagcgucgccuacuccaacaacagcaucgccauccccaccaacuucacgaucuccgugaccaccgagauccugcccgugagcaugaccaagacgagcgucgacugcaccauguacaucugcggggacuccaccgagugcagcaaccuccugcugcaguacggcuccuucugcacccagcucaaccgcgcgcugacggggaucgccguggagcaggacaagaacacccaggagguguucgcccaggucaagcagaucuacaagacgcccccgaucaaggacuucggcggguucaacuucagccagauccugcccgaccccuccaagcccagcaagcgguccuucaucgaggaccuccuguucaacaaggugacccuggccgacgccggcuucaucaagcaguacggcgacugccucggggacaucgcggcccgcgaccugaucugcgcccagaaguucaacggccugaccgugcucccgccccugcugaccgacgagaugaucgcccaguacaccagcgcccuccuggcggggaccaucacguccggcuggaccuucggggccggcgccgcccugcagauccccuucgcgaugcagauggccuaccgguucaacggcaucggggucacccagaacgugcucuacgagaaccagaagcugaucgccaaccaguucaacagcgccaucggcaagauccaggacucccugagcuccaccgccagcgcgcucgggaagcugcaggacguggucaaccagaacgcccaggcccugaacacgcucgugaagcagcuguccagcaacuucggcgccaucuccagcgugcugaacgacauccucucccgccuggacccgcccgaggccgaggugcagaucgaccggcugaucaccgggcgccuccagagccugcagaccuacgugacccagcagcugauccgggcggccgagauccgcgccagcgccaaccucgccgcgaccaagauguccgagugcguccugggccagagcaagcggguggacuucugcggcaagggguaccaccugauguccuucccccagagcgccccgcacggcguggucuuccuccacgugacguacguccccgcccaggagaagaacuucaccaccgcccccgcgaucugccacgacgggaaggcccacuucccccgcgagggcguguucguguccaacgggacccacugguucgucacgcagcggaacuucuacgagccgcagaucaucaccaccgacaacaccuucgugagcggcaacugcgacguggucaucggcaucgugaacaacacgguguacgacccccugcagcccgagcuggacuccuucaaggaggagcucgacaaguacuucaagaaccacaccagccccgacgucgaccugggggacaucuccggcaucaacgccagcguggugaacauccagaaggagaucgaccgccugaacgaggucgccaagaaccucaacgagucccugaucgaccugcaggagcucgggaaguacgagcaguacaucaaguggccgugguacaucuggcugggcuucaucgccggccugaucgcgaucgugauggugaccaucaugcucugcugcaugaccagcugcugcuccugccugaaggggugcugcagcugcggcuccugcugcaaguucgacgaggacgacagcgagcccguccugaagggggugaagcuccacuacacgugaggacuagucccuguucccagagcccacuuuuuuuucuuuuuuugaaauaaaauagccugucuuucagaucuaaaaaaaaaaaaaaaaaaaaaaaaaaaaaaaaaaaaaaaaaaaaaaaaaaaaaaaaaaaaaaaaaaaaaaaaaaaaaaaaaaaaaaaaaaaaaaaaaaaa

SEQ ID NO: 24842 - RNA, 4070 nt, Artificial Sequence
  SARS-CoV-2/Wuhan/WIV05/2019__EPI_ISL_402128 spike protein mRNA gc (1-1273)(K986P_V987P_N501Y_D614G)
aggagagucccgcagucggcguccagcggcucugcuuguucgugugugugucguugcaggccuuauucaagcuuaccauguucguguuccugguccuccugccccuggugagcucccagugcgugaaccucaccacccgcacgcagcugccgcccgccuacaccaacagcuucacccggggcgucuacuaccccgacaagguguuccgcuccagcgugcugcacuccacccaggaccucuuccugcccuucuucagcaacgucacgugguuccacgccauccacguguccgggaccaacggcaccaagcgguucgacaacccggugcugcccuucaacgacggggucuacuucgcgagcaccgagaaguccaacaucauccgcggcuggaucuucgggacgacccucgacagcaagacccagucccugcugaucgugaacaacgccaccaacguggucaucaaggugugcgaguuccaguucugcaacgaccccuuccucggcguguacuaccacaagaacaacaagagcuggauggaguccgaguuccgggucuacagcuccgccaacaacugcacguucgaguacgugagccagcccuuccugauggaccuggagggcaagcaggggaacuucaagaaccuccgcgaguucguguucaagaacaucgacggcuacuucaagaucuacuccaagcacaccccgaucaaccugguccgggaccugccccagggguucagcgcccucgagccccugguggaccugcccaucggcaucaacaucacccgcuuccagacccuccuggcccugcaccgguccuaccucacgccgggggacagcagcuccggcuggaccgcgggcgccgccgccuacuacgugggguaccugcagccccgcaccuuccugcucaaguacaacgagaacggcaccaucacggacgcggucgacugcgcccuggacccccugagcgagaccaagugcacccucaaguccuucaccguggagaaggggaucuaccagacgagcaacuuccgggugcagcccaccgaguccaucguccgcuucccgaacaucaccaaccugugccccuucggcgagguguucaacgccacccgguucgccagcgucuacgccuggaaccgcaagcggaucuccaacugcguggcggacuacagcgugcuguacaacuccgccagcuucuccacguucaagugcuacggcgucagccccaccaagcucaacgaccugugcuucaccaacguguacgccgacuccuucgugauccgcggggacgagguccggcagaucgcccccggccagaccgggaagaucgccgacuacaacuacaagcugccggacgacuucacgggcugcgugaucgcguggaacagcaacaaccucgacuccaaggucgggggcaacuacaacuaccuguaccgccuguuccgcaagagcaaccucaagcccuucgagcgggacaucuccaccgagaucuaccaggccggcagcacccccugcaacgggguggagggcuucaacugcuacuucccccugcaguccuacggguuccagccgaccuacggcgugggguaccagcccuaccggguggucgugcugagcuucgagcuccugcacgcccccgccacggugugcggccccaagaaguccaccaaccuggucaagaacaagugcgugaacuucaacuucaacggccucaccgggaccggcgugcugaccgagagcaacaagaaguuccugccguuccagcaguucgggcgcgacaucgccgacacgaccgacgcgguccgcgacccccagacccuggagauccucgacaucacccccugcagcuucggcgggguguccgugaucacgccgggcaccaacaccagcaaccaggucgccgugcuguaccagggcgugaacugcaccgagguccccguggccauccacgccgaccagcugacgcccaccuggcggguguacuccaccggcagcaacgucuuccagacccgcgccgggugccucaucggcgcggagcacgugaacaacuccuacgagugcgacauccccaucggggccggcaucugcgccagcuaccagacgcagaccaacuccccgcggcgcgcccggagcguggcgucccagagcaucaucgccuacaccaugucccugggcgccgagaacagcgucgccuacuccaacaacagcaucgccauccccaccaacuucacgaucuccgugaccaccgagauccugcccgugagcaugaccaagacgagcgucgacugcaccauguacaucugcggggacuccaccgagugcagcaaccuccugcugcaguacggcuccuucugcacccagcucaaccgcgcgcugacggggaucgccguggagcaggacaagaacacccaggagguguucgcccaggucaagcagaucuacaagacgcccccgaucaaggacuucggcggguucaacuucagccagauccugcccgaccccuccaagcccagcaagcgguccuucaucgaggaccuccuguucaacaaggugacccuggccgacgccggcuucaucaagcaguacggcgacugccucggggacaucgcggcccgcgaccugaucugcgcccagaaguucaacggccugaccgugcucccgccccugcugaccgacgagaugaucgcccaguacaccagcgcccuccuggcggggaccaucacguccggcuggaccuucggggccggcgccgcccugcagauccccuucgcgaugcagauggccuaccgguucaacggcaucggggucacccagaacgugcucuacgagaaccagaagcugaucgccaaccaguucaacagcgccaucggcaagauccaggacucccugagcuccaccgccagcgcgcucgggaagcugcaggacguggucaaccagaacgcccaggcccugaacacgcucgugaagcagcuguccagcaacuucggcgccaucuccagcgugcugaacgacauccucucccgccuggacccgcccgaggccgaggugcagaucgaccggcugaucaccgggcgccuccagagccugcagaccuacgugacccagcagcugauccgggcggccgagauccgcgccagcgccaaccucgccgcgaccaagauguccgagugcguccugggccagagcaagcggguggacuucugcggcaagggguaccaccugauguccuucccccagagcgccccgcacggcguggucuuccuccacgugacguacguccccgcccaggagaagaacuucaccaccgcccccgcgaucugccacgacgggaaggcccacuucccccgcgagggcguguucguguccaacgggacccacugguucgucacgcagcggaacuucuacgagccgcagaucaucaccaccgacaacaccuucgugagcggcaacugcgacguggucaucggcaucgugaacaacacgguguacgacccccugcagcccgagcuggacuccuucaaggaggagcucgacaaguacuucaagaaccacaccagccccgacgucgaccugggggacaucuccggcaucaacgccagcguggugaacauccagaaggagaucgaccgccugaacgaggucgccaagaaccucaacgagucccugaucgaccugcaggagcucgggaaguacgagcaguacaucaaguggccgugguacaucuggcugggcuucaucgccggccugaucgcgaucgugauggugaccaucaugcucugcugcaugaccagcugcugcuccugccugaaggggugcugcagcugcggcuccugcugcaaguucgacgaggacgacagcgagcccguccugaagggggugaagcuccacuacacgugaggacuagucccuguucccagagcccacuuuuuuuucuuuuuuugaaauaaaauagccugucuuucagaucuaaaaaaaaaaaaaaaaaaaaaaaaaaaaaaaaaaaaaaaaaaaaaaaaaaaaaaaaaaaaaaaaaaaaaaaaaaaaaaaaaaaaaaaaaaaaaaaaaaaa

SEQ ID NO: 24843 - RNA, 4064 nt, Artificial Sequence
  SARS-CoV-2/Wuhan/WIV05/2019__EPI_ISL_402128 spike protein mRNA gc (1-1273)(K986P_V987P_H69del_V70del_D614G)
aggagagucccgcagucggcguccagcggcucugcuuguucgugugugugucguugcaggccuuauucaagcuuaccauguucguguuccugguccuccugccccuggugagcucccagugcgugaaccucaccacccgcacgcagcugccgcccgccuacaccaacagcuucacccggggcgucuacuaccccgacaagguguuccgcuccagcgugcugcacuccacccaggaccucuuccugcccuucuucagcaacgucacgugguuccacgccaucuccgggaccaacggcaccaagcgguucgacaacccggugcugcccuucaacgacggggucuacuucgcgagcaccgagaaguccaacaucauccgcggcuggaucuucgggacgacccucgacagcaagacccagucccugcugaucgugaacaacgccaccaacguggucaucaaggugugcgaguuccaguucugcaacgaccccuuccucggcguguacuaccacaagaacaacaagagcuggauggaguccgaguuccgggucuacagcuccgccaacaacugcacguucgaguacgugagccagcccuuccugauggaccuggagggcaagcaggggaacuucaagaaccuccgcgaguucguguucaagaacaucgacggcuacuucaagaucuacuccaagcacaccccgaucaaccugguccgggaccugccccagggguucagcgcccucgagccccugguggaccugcccaucggcaucaacaucacccgcuuccagacccuccuggcccugcaccgguccuaccucacgccgggggacagcagcuccggcuggaccgcgggcgccgccgccuacuacgugggguaccugcagccccgcaccuuccugcucaaguacaacgagaacggcaccaucacggacgcggucgacugcgcccuggacccccugagcgagaccaagugcacccucaaguccuucaccguggagaaggggaucuaccagacgagcaacuuccgggugcagcccaccgaguccaucguccgcuucccgaacaucaccaaccugugccccuucggcgagguguucaacgccacccgguucgccagcgucuacgccuggaaccgcaagcggaucuccaacugcguggcggacuacagcgugcuguacaacuccgccagcuucuccacguucaagugcuacggcgucagccccaccaagcucaacgaccugugcuucaccaacguguacgccgacuccuucgugauccgcggggacgagguccggcagaucgcccccggccagaccgggaagaucgccgacuacaacuacaagcugccggacgacuucacgggcugcgugaucgcguggaacagcaacaaccucgacuccaaggucgggggcaacuacaacuaccuguaccgccuguuccgcaagagcaaccucaagcccuucgagcgggacaucuccaccgagaucuaccaggccggcagcacccccugcaacgggguggagggcuucaacugcuacuucccccugcaguccuacggguuccagccgaccaacggcgugggguaccagcccuaccggguggucgugcugagcuucgagcuccugcacgcccccgccacggugugcggccccaagaaguccaccaaccuggucaagaacaagugcgugaacuucaacuucaacggccucaccgggaccggcgugcugaccgagagcaacaagaaguuccugccguuccagcaguucgggcgcgacaucgccgacacgaccgacgcgguccgcgacccccagacccuggagauccucgacaucacccccugcagcuucggcgggguguccgugaucacgccgggcaccaacaccagcaaccaggucgccgugcuguaccagggcgugaacugcaccgagguccccguggccauccacgccgaccagcugacgcccaccuggcggguguacuccaccggcagcaacgucuuccagacccgcgccgggugccucaucggcgcggagcacgugaacaacuccuacgagugcgacauccccaucggggccggcaucugcgccagcuaccagacgcagaccaacuccccgcggcgcgcccggagcguggcgucccagagcaucaucgccuacaccaugucccugggcgccgagaacagcgucgccuacuccaacaacagcaucgccauccccaccaacuucacgaucuccgugaccaccgagauccugcccgugagcaugaccaagacgagcgucgacugcaccauguacaucugcggggacuccaccgagugcagcaaccuccugcugcaguacggcuccuucugcacccagcucaaccgcgcgcugacggggaucgccguggagcaggacaagaacacccaggagguguucgcccaggucaagcagaucuacaagacgcccccgaucaaggacuucggcggguucaacuucagccagauccugcccgaccccuccaagcccagcaagcgguccuucaucgaggaccuccuguucaacaaggugacccuggccgacgccggcuucaucaagcaguacggcgacugccucggggacaucgcggcccgcgaccugaucugcgcccagaaguucaacggccugaccgugcucccgccccugcugaccgacgagaugaucgcccaguacaccagcgcccuccuggcggggaccaucacguccggcuggaccuucggggccggcgccgcccugcagauccccuucgcgaugcagauggccuaccgguucaacggcaucggggucacccagaacgugcucuacgagaaccagaagcugaucgccaaccaguucaacagcgccaucggcaagauccaggacucccugagcuccaccgccagcgcgcucgggaagcugcaggacguggucaaccagaacgcccaggcccugaacacgcucgugaagcagcuguccagcaacuucggcgccaucuccagcgugcugaacgacauccucucccgccuggacccgcccgaggccgaggugcagaucgaccggcugaucaccgggcgccuccagagccugcagaccuacgugacccagcagcugauccgggcggccgagauccgcgccagcgccaaccucgccgcgaccaagauguccgagugcguccugggccagagcaagcggguggacuucugcggcaagggguaccaccugauguccuucccccagagcgccccgcacggcguggucuuccuccacgugacguacguccccgcccaggagaagaacuucaccaccgcccccgcgaucugccacgacgggaaggcccacuucccccgcgagggcguguucguguccaacgggacccacugguucgucacgcagcggaacuucuacgagccgcagaucaucaccaccgacaacaccuucgugagcggcaacugcgacguggucaucggcaucgugaacaacacgguguacgacccccugcagcccgagcuggacuccuucaaggaggagcucgacaaguacuucaagaaccacaccagccccgacgucgaccugggggacaucuccggcaucaacgccagcguggugaacauccagaaggagaucgaccgccugaacgaggucgccaagaaccucaacgagucccugaucgaccugcaggagcucgggaaguacgagcaguacaucaaguggccgugguacaucuggcugggcuucaucgccggccugaucgcgaucgugauggugaccaucaugcucugcugcaugaccagcugcugcuccugccugaaggggugcugcagcugcggcuccugcugcaaguucgacgaggacgacagcgagcccguccugaagggggugaagcuccacuacacgugaggacuagucccuguucccagagcccacuuuuuuuucuuuuuuugaaauaaaauagccugucuuucagaucuaaaaaaaaaaaaaaaaaaaaaaaaaaaaaaaaaaaaaaaaaaaaaaaaaaaaaaaaaaaaaaaaaaaaaaaaaaaaaaaaaaaaaaaaaaaaaaaaaaaa

SEQ ID NO: 24844 - RNA, 4070 nt, Artificial Sequence
  SARS-CoV-2/Wuhan/WIV05/2019__EPI_ISL_402128 spike protein mRNA gc (1-1273)(K986P_V987P_Y453F_D614G)
aggagagucccgcagucggcguccagcggcucugcuuguucgugugugugucguugcaggccuuauucaagcuuaccauguucguguuccugguccuccugccccuggugagcucccagugcgugaaccucaccacccgcacgcagcugccgcccgccuacaccaacagcuucacccggggcgucuacuaccccgacaagguguuccgcuccagcgugcugcacuccacccaggaccucuuccugcccuucuucagcaacgucacgugguuccacgccauccacguguccgggaccaacggcaccaagcgguucgacaacccggugcugcccuucaacgacggggucuacuucgcgagcaccgagaaguccaacaucauccgcggcuggaucuucgggacgacccucgacagcaagacccagucccugcugaucgugaacaacgccaccaacguggucaucaaggugugcgaguuccaguucugcaacgaccccuuccucggcguguacuaccacaagaacaacaagagcuggauggaguccgaguuccgggucuacagcuccgccaacaacugcacguucgaguacgugagccagcccuuccugauggaccuggagggcaagcaggggaacuucaagaaccuccgcgaguucguguucaagaacaucgacggcuacuucaagaucuacuccaagcacaccccgaucaaccugguccgggaccugccccagggguucagcgcccucgagccccugguggaccugcccaucggcaucaacaucacccgcuuccagacccuccuggcccugcaccgguccuaccucacgccgggggacagcagcuccggcuggaccgcgggcgccgccgccuacuacgugggguaccugcagccccgcaccuuccugcucaaguacaacgagaacggcaccaucacggacgcggucgacugcgcccuggacccccugagcgagaccaagugcacccucaaguccuucaccguggagaaggggaucuaccagacgagcaacuuccgggugcagcccaccgaguccaucguccgcuucccgaacaucaccaaccugugccccuucggcgagguguucaacgccacccgguucgccagcgucuacgccuggaaccgcaagcggaucuccaacugcguggcggacuacagcgugcuguacaacuccgccagcuucuccacguucaagugcuacggcgucagccccaccaagcucaacgaccugugcuucaccaacguguacgccgacuccuucgugauccgcggggacgagguccggcagaucgcccccggccagaccgggaagaucgccgacuacaacuacaagcugccggacgacuucacgggcugcgugaucgcguggaacagcaacaaccucgacuccaaggucgggggcaacuacaacuaccuguuccgccuguuccgcaagagcaaccucaagcccuucgagcgggacaucuccaccgagaucuaccaggccggcagcacccccugcaacgggguggagggcuucaacugcuacuucccccugcaguccuacggguuccagccgaccaacggcgugggguaccagcccuaccggguggucgugcugagcuucgagcuccugcacgcccccgccacggugugcggccccaagaaguccaccaaccuggucaagaacaagugcgugaacuucaacuucaacggccucaccgggaccggcgugcugaccgagagcaacaagaaguuccugccguuccagcaguucgggcgcgacaucgccgacacgaccgacgcgguccgcgacccccagacccuggagauccucgacaucacccccugcagcuucggcgggguguccgugaucacgccgggcaccaacaccagcaaccaggucgccgugcuguaccagggcgugaacugcaccgagguccccguggccauccacgccgaccagcugacgcccaccuggcggguguacuccaccggcagcaacgucuuccagacccgcgccgggugccucaucggcgcggagcacgugaacaacuccuacgagugcgacauccccaucggggccggcaucugcgccagcuaccagacgcagaccaacuccccgcggcgcgcccggagcguggcgucccagagcaucaucgccuacaccaugucccugggcgccgagaacagcgucgccuacuccaacaacagcaucgccauccccaccaacuucacgaucuccgugaccaccgagauccugcccgugagcaugaccaagacgagcgucgacugcaccauguacaucugcggggacuccaccgagugcagcaaccuccugcugcaguacggcuccuucugcacccagcucaaccgcgcgcugacggggaucgccguggagcaggacaagaacacccaggagguguucgcccaggucaagcagaucuacaagacgcccccgaucaaggacuucggcggguucaacuucagccagauccugcccgaccccuccaagcccagcaagcgguccuucaucgaggaccuccuguucaacaaggugacccuggccgacgccggcuucaucaagcaguacggcgacugccucggggacaucgcggcccgcgaccugaucugcgcccagaaguucaacggccugaccgugcucccgccccugcugaccgacgagaugaucgcccaguacaccagcgcccuccuggcggggaccaucacguccggcuggaccuucggggccggcgccgcccugcagauccccuucgcgaugcagauggccuaccgguucaacggcaucggggucacccagaacgugcucuacgagaaccagaagcugaucgccaaccaguucaacagcgccaucggcaagauccaggacucccugagcuccaccgccagcgcgcucgggaagcugcaggacguggucaaccagaacgcccaggcccugaacacgcucgugaagcagcuguccagcaacuucggcgccaucuccagcgugcugaacgacauccucucccgccuggacccgcccgaggccgaggugcagaucgaccggcugaucaccgggcgccuccagagccugcagaccuacgugacccagcagcugauccgggcggccgagauccgcgccagcgccaaccucgccgcgaccaagauguccgagugcguccugggccagagcaagcggguggacuucugcggcaagggguaccaccugauguccuucccccagagcgccccgcacggcguggucuuccuccacgugacguacguccccgcccaggagaagaacuucaccaccgcccccgcgaucugccacgacgggaaggcccacuucccccgcgagggcguguucguguccaacgggacccacugguucgucacgcagcggaacuucuacgagccgcagaucaucaccaccgacaacaccuucgugagcggcaacugcgacguggucaucggcaucgugaacaacacgguguacgacccccugcagcccgagcuggacuccuucaaggaggagcucgacaaguacuucaagaaccacaccagccccgacgucgaccugggggacaucuccggcaucaacgccagcguggugaacauccagaaggagaucgaccgccugaacgaggucgccaagaaccucaacgagucccugaucgaccugcaggagcucgggaaguacgagcaguacaucaaguggccgugguacaucuggcugggcuucaucgccggccugaucgcgaucgugauggugaccaucaugcucugcugcaugaccagcugcugcuccugccugaaggggugcugcagcugcggcuccugcugcaaguucgacgaggacgacagcgagcccguccugaagggggugaagcuccacuacacgugaggacuagucccuguucccagagcccacuuuuuuuucuuuuuuugaaauaaaauagccugucuuucagaucuaaaaaaaaaaaaaaaaaaaaaaaaaaaaaaaaaaaaaaaaaaaaaaaaaaaaaaaaaaaaaaaaaaaaaaaaaaaaaaaaaaaaaaaaaaaaaaaaaaaa

SEQ ID NO: 24845 - RNA, 4070 nt, Artificial Sequence
  SARS-CoV-2/Wuhan/WIV05/2019__EPI_ISL_402128 spike protein mRNA gc (1-1273)(K986P_V987P_D614G_I692V)
aggagagucccgcagucggcguccagcggcucugcuuguucgugugugugucguugcaggccuuauucaagcuuaccauguucguguuccugguccuccugccccuggugagcucccagugcgugaaccucaccacccgcacgcagcugccgcccgccuacaccaacagcuucacccggggcgucuacuaccccgacaagguguuccgcuccagcgugcugcacuccacccaggaccucuuccugcccuucuucagcaacgucacgugguuccacgccauccacguguccgggaccaacggcaccaagcgguucgacaacccggugcugcccuucaacgacggggucuacuucgcgagcaccgagaaguccaacaucauccgcggcuggaucuucgggacgacccucgacagcaagacccagucccugcugaucgugaacaacgccaccaacguggucaucaaggugugcgaguuccaguucugcaacgaccccuuccucggcguguacuaccacaagaacaacaagagcuggauggaguccgaguuccgggucuacagcuccgccaacaacugcacguucgaguacgugagccagcccuuccugauggaccuggagggcaagcaggggaacuucaagaaccuccgcgaguucguguucaagaacaucgacggcuacuucaagaucuacuccaagcacaccccgaucaaccugguccgggaccugccccagggguucagcgcccucgagccccugguggaccugcccaucggcaucaacaucacccgcuuccagacccuccuggcccugcaccgguccuaccucacgccgggggacagcagcuccggcuggaccgcgggcgccgccgccuacuacgugggguaccugcagccccgcaccuuccugcucaaguacaacgagaacggcaccaucacggacgcggucgacugcgcccuggacccccugagcgagaccaagugcacccucaaguccuucaccguggagaaggggaucuaccagacgagcaacuuccgggugcagcccaccgaguccaucguccgcuucccgaacaucaccaaccugugccccuucggcgagguguucaacgccacccgguucgccagcgucuacgccuggaaccgcaagcggaucuccaacugcguggcggacuacagcgugcuguacaacuccgccagcuucuccacguucaagugcuacggcgucagccccaccaagcucaacgaccugugcuucaccaacguguacgccgacuccuucgugauccgcggggacgagguccggcagaucgcccccggccagaccgggaagaucgccgacuacaacuacaagcugccggacgacuucacgggcugcgugaucgcguggaacagcaacaaccucgacuccaaggucgggggcaacuacaacuaccuguaccgccuguuccgcaagagcaaccucaagcccuucgagcgggacaucuccaccgagaucuaccaggccggcagcacccccugcaacgggguggagggcuucaacugcuacuucccccugcaguccuacggguuccagccgaccaacggcgugggguaccagcccuaccggguggucgugcugagcuucgagcuccugcacgcccccgccacggugugcggccccaagaaguccaccaaccuggucaagaacaagugcgugaacuucaacuucaacggccucaccgggaccggcgugcugaccgagagcaacaagaaguuccugccguuccagcaguucgggcgcgacaucgccgacacgaccgacgcgguccgcgacccccagacccuggagauccucgacaucacccccugcagcuucggcgggguguccgugaucacgccgggcaccaacaccagcaaccaggucgccgugcuguaccagggcgugaacugcaccgagguccccguggccauccacgccgaccagcugacgcccaccuggcggguguacuccaccggcagcaacgucuuccagacccgcgccgggugccucaucggcgcggagcacgugaacaacuccuacgagugcgacauccccaucggggccggcaucugcgccagcuaccagacgcagaccaacuccccgcggcgcgcccggagcguggcgucccagagcgucaucgccuacaccaugucccugggcgccgagaacagcgucgccuacuccaacaacagcaucgccauccccaccaacuucacgaucuccgugaccaccgagauccugcccgugagcaugaccaagacgagcgucgacugcaccauguacaucugcggggacuccaccgagugcagcaaccuccugcugcaguacggcuccuucugcacccagcucaaccgcgcgcugacggggaucgccguggagcaggacaagaacacccaggagguguucgcccaggucaagcagaucuacaagacgcccccgaucaaggacuucggcggguucaacuucagccagauccugcccgaccccuccaagcccagcaagcgguccuucaucgaggaccuccuguucaacaaggugacccuggccgacgccggcuucaucaagcaguacggcgacugccucggggacaucgcggcccgcgaccugaucugcgcccagaaguucaacggccugaccgugcucccgccccugcugaccgacgagaugaucgcccaguacaccagcgcccuccuggcggggaccaucacguccggcuggaccuucggggccggcgccgcccugcagauccccuucgcgaugcagauggccuaccgguucaacggcaucggggucacccagaacgugcucuacgagaaccagaagcugaucgccaaccaguucaacagcgccaucggcaagauccaggacucccugagcuccaccgccagcgcgcucgggaagcugcaggacguggucaaccagaacgcccaggcccugaacacgcucgugaagcagcuguccagcaacuucggcgccaucuccagcgugcugaacgacauccucucccgccuggacccgcccgaggccgaggugcagaucgaccggcugaucaccgggcgccuccagagccugcagaccuacgugacccagcagcugauccgggcggccgagauccgcgccagcgccaaccucgccgcgaccaagauguccgagugcguccugggccagagcaagcggguggacuucugcggcaagggguaccaccugauguccuucccccagagcgccccgcacggcguggucuuccuccacgugacguacguccccgcccaggagaagaacuucaccaccgcccccgcgaucugccacgacgggaaggcccacuucccccgcgagggcguguucguguccaacgggacccacugguucgucacgcagcggaacuucuacgagccgcagaucaucaccaccgacaacaccuucgugagcggcaacugcgacguggucaucggcaucgugaacaacacgguguacgacccccugcagcccgagcuggacuccuucaaggaggagcucgacaaguacuucaagaaccacaccagccccgacgucgaccugggggacaucuccggcaucaacgccagcguggugaacauccagaaggagaucgaccgccugaacgaggucgccaagaaccucaacgagucccugaucgaccugcaggagcucgggaaguacgagcaguacaucaaguggccgugguacaucuggcugggcuucaucgccggccugaucgcgaucgugauggugaccaucaugcucugcugcaugaccagcugcugcuccugccugaaggggugcugcagcugcggcuccugcugcaaguucgacgaggacgacagcgagcccguccugaagggggugaagcuccacuacacgugaggacuagucccuguucccagagcccacuuuuuuuucuuuuuuugaaauaaaauagccugucuuucagaucuaaaaaaaaaaaaaaaaaaaaaaaaaaaaaaaaaaaaaaaaaaaaaaaaaaaaaaaaaaaaaaaaaaaaaaaaaaaaaaaaaaaaaaaaaaaaaaaaaaaa

SEQ ID NO: 24846 - RNA, 4070 nt, Artificial Sequence
  SARS-CoV-2/Wuhan/WIV05/2019__EPI_ISL_402128 spike protein mRNA gc (1-1273)(K986P_V987P_D614G_M1229I)
aggagagucccgcagucggcguccagcggcucugcuuguucgugugugugucguugcaggccuuauucaagcuuaccauguucguguuccugguccuccugccccuggugagcucccagugcgugaaccucaccacccgcacgcagcugccgcccgccuacaccaacagcuucacccggggcgucuacuaccccgacaagguguuccgcuccagcgugcugcacuccacccaggaccucuuccugcccuucuucagcaacgucacgugguuccacgccauccacguguccgggaccaacggcaccaagcgguucgacaacccggugcugcccuucaacgacggggucuacuucgcgagcaccgagaaguccaacaucauccgcggcuggaucuucgggacgacccucgacagcaagacccagucccugcugaucgugaacaacgccaccaacguggucaucaaggugugcgaguuccaguucugcaacgaccccuuccucggcguguacuaccacaagaacaacaagagcuggauggaguccgaguuccgggucuacagcuccgccaacaacugcacguucgaguacgugagccagcccuuccugauggaccuggagggcaagcaggggaacuucaagaaccuccgcgaguucguguucaagaacaucgacggcuacuucaagaucuacuccaagcacaccccgaucaaccugguccgggaccugccccagggguucagcgcccucgagccccugguggaccugcccaucggcaucaacaucacccgcuuccagacccuccuggcccugcaccgguccuaccucacgccgggggacagcagcuccggcuggaccgcgggcgccgccgccuacuacgugggguaccugcagccccgcaccuuccugcucaaguacaacgagaacggcaccaucacggacgcggucgacugcgcccuggacccccugagcgagaccaagugcacccucaaguccuucaccguggagaaggggaucuaccagacgagcaacuuccgggugcagcccaccgaguccaucguccgcuucccgaacaucaccaaccugugccccuucggcgagguguucaacgccacccgguucgccagcgucuacgccuggaaccgcaagcggaucuccaacugcguggcggacuacagcgugcuguacaacuccgccagcuucuccacguucaagugcuacggcgucagccccaccaagcucaacgaccugugcuucaccaacguguacgccgacuccuucgugauccgcggggacgagguccggcagaucgcccccggccagaccgggaagaucgccgacuacaacuacaagcugccggacgacuucacgggcugcgugaucgcguggaacagcaacaaccucgacuccaaggucgggggcaacuacaacuaccuguaccgccuguuccgcaagagcaaccucaagcccuucgagcgggacaucuccaccgagaucuaccaggccggcagcacccccugcaacgggguggagggcuucaacugcuacuucccccugcaguccuacggguuccagccgaccaacggcgugggguaccagcccuaccggguggucgugcugagcuucgagcuccugcacgcccccgccacggugugcggccccaagaaguccaccaaccuggucaagaacaagugcgugaacuucaacuucaacggccucaccgggaccggcgugcugaccgagagcaacaagaaguuccugccguuccagcaguucgggcgcgacaucgccgacacgaccgacgcgguccgcgacccccagacccuggagauccucgacaucacccccugcagcuucggcgggguguccgugaucacgccgggcaccaacaccagcaaccaggucgccgugcuguaccagggcgugaacugcaccgagguccccguggccauccacgccgaccagcugacgcccaccuggcggguguacuccaccggcagcaacgucuuccagacccgcgccgggugccucaucggcgcggagcacgugaacaacuccuacgagugcgacauccccaucggggccggcaucugcgccagcuaccagacgcagaccaacuccccgcggcgcgcccggagcguggcgucccagagcaucaucgccuacaccaugucccugggcgccgagaacagcgucgccuacuccaacaacagcaucgccauccccaccaacuucacgaucuccgugaccaccgagauccugcccgugagcaugaccaagacgagcgucgacugcaccauguacaucugcggggacuccaccgagugcagcaaccuccugcugcaguacggcuccuucugcacccagcucaaccgcgcgcugacggggaucgccguggagcaggacaagaacacccaggagguguucgcccaggucaagcagaucuacaagacgcccccgaucaaggacuucggcggguucaacuucagccagauccugcccgaccccuccaagcccagcaagcgguccuucaucgaggaccuccuguucaacaaggugacccuggccgacgccggcuucaucaagcaguacggcgacugccucggggacaucgcggcccgcgaccugaucugcgcccagaaguucaacggccugaccgugcucccgccccugcugaccgacgagaugaucgcccaguacaccagcgcccuccuggcggggaccaucacguccggcuggaccuucggggccggcgccgcccugcagauccccuucgcgaugcagauggccuaccgguucaacggcaucggggucacccagaacgugcucuacgagaaccagaagcugaucgccaaccaguucaacagcgccaucggcaagauccaggacucccugagcuccaccgccagcgcgcucgggaagcugcaggacguggucaaccagaacgcccaggcccugaacacgcucgugaagcagcuguccagcaacuucggcgccaucuccagcgugcugaacgacauccucucccgccuggacccgcccgaggccgaggugcagaucgaccggcugaucaccgggcgccuccagagccugcagaccuacgugacccagcagcugauccgggcggccgagauccgcgccagcgccaaccucgccgcgaccaagauguccgagugcguccugggccagagcaagcggguggacuucugcggcaagggguaccaccugauguccuucccccagagcgccccgcacggcguggucuuccuccacgugacguacguccccgcccaggagaagaacuucaccaccgcccccgcgaucugccacgacgggaaggcccacuucccccgcgagggcguguucguguccaacgggacccacugguucgucacgcagcggaacuucuacgagccgcagaucaucaccaccgacaacaccuucgugagcggcaacugcgacguggucaucggcaucgugaacaacacgguguacgacccccugcagcccgagcuggacuccuucaaggaggagcucgacaaguacuucaagaaccacaccagccccgacgucgaccugggggacaucuccggcaucaacgccagcguggugaacauccagaaggagaucgaccgccugaacgaggucgccaagaaccucaacgagucccugaucgaccugcaggagcucgggaaguacgagcaguacaucaaguggccgugguacaucuggcugggcuucaucgccggccugaucgcgaucgugaucgugaccaucaugcucugcugcaugaccagcugcugcuccugccugaaggggugcugcagcugcggcuccugcugcaaguucgacgaggacgacagcgagcccguccugaagggggugaagcuccacuacacgugaggacuagucccuguucccagagcccacuuuuuuuucuuuuuuugaaauaaaauagccugucuuucagaucuaaaaaaaaaaaaaaaaaaaaaaaaaaaaaaaaaaaaaaaaaaaaaaaaaaaaaaaaaaaaaaaaaaaaaaaaaaaaaaaaaaaaaaaaaaaaaaaaaaaa

SEQ ID NO: 24847 - RNA, 4064 nt, Artificial Sequence
  SARS-CoV-2/Wuhan/WIV05/2019__EPI_ISL_402128 spike protein mRNA gc (1-1273)(K986P_V987P_H69del_V70del_A222V_Y453F_S477N_D614G_I692V)
aggagagucccgcagucggcguccagcggcucugcuuguucgugugugugucguugcaggccuuauucaagcuuaccauguucguguuccugguccuccugccccuggugagcucccagugcgugaaccucaccacccgcacgcagcugccgcccgccuacaccaacagcuucacccggggcgucuacuaccccgacaagguguuccgcuccagcgugcugcacuccacccaggaccucuuccugcccuucuucagcaacgucacgugguuccacgccaucuccgggaccaacggcaccaagcgguucgacaacccggugcugcccuucaacgacggggucuacuucgcgagcaccgagaaguccaacaucauccgcggcuggaucuucgggacgacccucgacagcaagacccagucccugcugaucgugaacaacgccaccaacguggucaucaaggugugcgaguuccaguucugcaacgaccccuuccucggcguguacuaccacaagaacaacaagagcuggauggaguccgaguuccgggucuacagcuccgccaacaacugcacguucgaguacgugagccagcccuuccugauggaccuggagggcaagcaggggaacuucaagaaccuccgcgaguucguguucaagaacaucgacggcuacuucaagaucuacuccaagcacaccccgaucaaccugguccgggaccugccccagggguucagcguccucgagccccugguggaccugcccaucggcaucaacaucacccgcuuccagacccuccuggcccugcaccgguccuaccucacgccgggggacagcagcuccggcuggaccgcgggcgccgccgccuacuacgugggguaccugcagccccgcaccuuccugcucaaguacaacgagaacggcaccaucacggacgcggucgacugcgcccuggacccccugagcgagaccaagugcacccucaaguccuucaccguggagaaggggaucuaccagacgagcaacuuccgggugcagcccaccgaguccaucguccgcuucccgaacaucaccaaccugugccccuucggcgagguguucaacgccacccgguucgccagcgucuacgccuggaaccgcaagcggaucuccaacugcguggcggacuacagcgugcuguacaacuccgccagcuucuccacguucaagugcuacggcgucagccccaccaagcucaacgaccugugcuucaccaacguguacgccgacuccuucgugauccgcggggacgagguccggcagaucgcccccggccagaccgggaagaucgccgacuacaacuacaagcugccggacgacuucacgggcugcgugaucgcguggaacagcaacaaccucgacuccaaggucgggggcaacuacaacuaccuguuccgccuguuccgcaagagcaaccucaagcccuucgagcgggacaucuccaccgagaucuaccaggccggcaacacccccugcaacgggguggagggcuucaacugcuacuucccccugcaguccuacggguuccagccgaccaacggcgugggguaccagcccuaccggguggucgugcugagcuucgagcuccugcacgcccccgccacggugugcggccccaagaaguccaccaaccuggucaagaacaagugcgugaacuucaacuucaacggccucaccgggaccggcgugcugaccgagagcaacaagaaguuccugccguuccagcaguucgggcgcgacaucgccgacacgaccgacgcgguccgcgacccccagacccuggagauccucgacaucacccccugcagcuucggcgggguguccgugaucacgccgggcaccaacaccagcaaccaggucgccgugcuguaccagggcgugaacugcaccgagguccccguggccauccacgccgaccagcugacgcccaccuggcggguguacuccaccggcagcaacgucuuccagacccgcgccgggugccucaucggcgcggagcacgugaacaacuccuacgagugcgacauccccaucggggccggcaucugcgccagcuaccagacgcagaccaacuccccgcggcgcgcccggagcguggcgucccagagcgucaucgccuacaccaugucccugggcgccgagaacagcgucgccuacuccaacaacagcaucgccauccccaccaacuucacgaucuccgugaccaccgagauccugcccgugagcaugaccaagacgagcgucgacugcaccauguacaucugcggggacuccaccgagugcagcaaccuccugcugcaguacggcuccuucugcacccagcucaaccgcgcgcugacggggaucgccguggagcaggacaagaacacccaggagguguucgcccaggucaagcagaucuacaagacgcccccgaucaaggacuucggcggguucaacuucagccagauccugcccgaccccuccaagcccagcaagcgguccuucaucgaggaccuccuguucaacaaggugacccuggccgacgccggcuucaucaagcaguacggcgacugccucggggacaucgcggcccgcgaccugaucugcgcccagaaguucaacggccugaccgugcucccgccccugcugaccgacgagaugaucgcccaguacaccagcgcccuccuggcggggaccaucacguccggcuggaccuucggggccggcgccgcccugcagauccccuucgcgaugcagauggccuaccgguucaacggcaucggggucacccagaacgugcucuacgagaaccagaagcugaucgccaaccaguucaacagcgccaucggcaagauccaggacucccugagcuccaccgccagcgcgcucgggaagcugcaggacguggucaaccagaacgcccaggcccugaacacgcucgugaagcagcuguccagcaacuucggcgccaucuccagcgugcugaacgacauccucucccgccuggacccgcccgaggccgaggugcagaucgaccggcugaucaccgggcgccuccagagccugcagaccuacgugacccagcagcugauccgggcggccgagauccgcgccagcgccaaccucgccgcgaccaagauguccgagugcguccugggccagagcaagcggguggacuucugcggcaagggguaccaccugauguccuucccccagagcgccccgcacggcguggucuuccuccacgugacguacguccccgcccaggagaagaacuucaccaccgcccccgcgaucugccacgacgggaaggcccacuucccccgcgagggcguguucguguccaacgggacccacugguucgucacgcagcggaacuucuacgagccgcagaucaucaccaccgacaacaccuucgugagcggcaacugcgacguggucaucggcaucgugaacaacacgguguacgacccccugcagcccgagcuggacuccuucaaggaggagcucgacaaguacuucaagaaccacaccagccccgacgucgaccugggggacaucuccggcaucaacgccagcguggugaacauccagaaggagaucgaccgccugaacgaggucgccaagaaccucaacgagucccugaucgaccugcaggagcucgggaaguacgagcaguacaucaaguggccgugguacaucuggcugggcuucaucgccggccugaucgcgaucgugauggugaccaucaugcucugcugcaugaccagcugcugcuccugccugaaggggugcugcagcugcggcuccugcugcaaguucgacgaggacgacagcgagcccguccugaagggggugaagcuccacuacacgugaggacuagucccuguucccagagcccacuuuuuuuucuuuuuuugaaauaaaauagccugucuuucagaucuaaaaaaaaaaaaaaaaaaaaaaaaaaaaaaaaaaaaaaaaaaaaaaaaaaaaaaaaaaaaaaaaaaaaaaaaaaaaaaaaaaaaaaaaaaaaaaaaaaaa

SEQ ID NO: 24848 - RNA, 4064 nt, Artificial Sequence
  SARS-CoV-2/Wuhan/WIV05/2019__EPI_ISL_402128 spike protein mRNA gc (1-1273)(K986P_V987P_H69del_V70del_Y453F_D614G_I692V_M1229I)
aggagagucccgcagucggcguccagcggcucugcuuguucgugugugugucguugcaggccuuauucaagcuuaccauguucguguuccugguccuccugccccuggugagcucccagugcgugaaccucaccacccgcacgcagcugccgcccgccuacaccaacagcuucacccggggcgucuacuaccccgacaagguguuccgcuccagcgugcugcacuccacccaggaccucuuccugcccuucuucagcaacgucacgugguuccacgccaucuccgggaccaacggcaccaagcgguucgacaacccggugcugcccuucaacgacggggucuacuucgcgagcaccgagaaguccaacaucauccgcggcuggaucuucgggacgacccucgacagcaagacccagucccugcugaucgugaacaacgccaccaacguggucaucaaggugugcgaguuccaguucugcaacgaccccuuccucggcguguacuaccacaagaacaacaagagcuggauggaguccgaguuccgggucuacagcuccgccaacaacugcacguucgaguacgugagccagcccuuccugauggaccuggagggcaagcaggggaacuucaagaaccuccgcgaguucguguucaagaacaucgacggcuacuucaagaucuacuccaagcacaccccgaucaaccugguccgggaccugccccagggguucagcgcccucgagccccugguggaccugcccaucggcaucaacaucacccgcuuccagacccuccuggcccugcaccgguccuaccucacgccgggggacagcagcuccggcuggaccgcgggcgccgccgccuacuacgugggguaccugcagccccgcaccuuccugcucaaguacaacgagaacggcaccaucacggacgcggucgacugcgcccuggacccccugagcgagaccaagugcacccucaaguccuucaccguggagaaggggaucuaccagacgagcaacuuccgggugcagcccaccgaguccaucguccgcuucccgaacaucaccaaccugugccccuucggcgagguguucaacgccacccgguucgccagcgucuacgccuggaaccgcaagcggaucuccaacugcguggcggacuacagcgugcuguacaacuccgccagcuucuccacguucaagugcuacggcgucagccccaccaagcucaacgaccugugcuucaccaacguguacgccgacuccuucgugauccgcggggacgagguccggcagaucgcccccggccagaccgggaagaucgccgacuacaacuacaagcugccggacgacuucacgggcugcgugaucgcguggaacagcaacaaccucgacuccaaggucgggggcaacuacaacuaccuguuccgccuguuccgcaagagcaaccucaagcccuucgagcgggacaucuccaccgagaucuaccaggccggcagcacccccugcaacgggguggagggcuucaacugcuacuucccccugcaguccuacggguuccagccgaccaacggcgugggguaccagcccuaccggguggucgugcugagcuucgagcuccugcacgcccccgccacggugugcggccccaagaaguccaccaaccuggucaagaacaagugcgugaacuucaacuucaacggccucaccgggaccggcgugcugaccgagagcaacaagaaguuccugccguuccagcaguucgggcgcgacaucgccgacacgaccgacgcgguccgcgacccccagacccuggagauccucgacaucacccccugcagcuucggcgggguguccgugaucacgccgggcaccaacaccagcaaccaggucgccgugcuguaccagggcgugaacugcaccgagguccccguggccauccacgccgaccagcugacgcccaccuggcggguguacuccaccggcagcaacgucuuccagacccgcgccgggugccucaucggcgcggagcacgugaacaacuccuacgagugcgacauccccaucggggccggcaucugcgccagcuaccagacgcagaccaacuccccgcggcgcgcccggagcguggcgucccagagcgugaucgccuacaccaugucccugggcgccgagaacagcgucgccuacuccaacaacagcaucgccauccccaccaacuucacgaucuccgugaccaccgagauccugcccgugagcaugaccaagacgagcgucgacugcaccauguacaucugcggggacuccaccgagugcagcaaccuccugcugcaguacggcuccuucugcacccagcucaaccgcgcgcugacggggaucgccguggagcaggacaagaacacccaggagguguucgcccaggucaagcagaucuacaagacgcccccgaucaaggacuucggcggguucaacuucagccagauccugcccgaccccuccaagcccagcaagcgguccuucaucgaggaccuccuguucaacaaggugacccuggccgacgccggcuucaucaagcaguacggcgacugccucggggacaucgcggcccgcgaccugaucugcgcccagaaguucaacggccugaccgugcucccgccccugcugaccgacgagaugaucgcccaguacaccagcgcccuccuggcggggaccaucacguccggcuggaccuucggggccggcgccgcccugcagauccccuucgcgaugcagauggccuaccgguucaacggcaucggggucacccagaacgugcucuacgagaaccagaagcugaucgccaaccaguucaacagcgccaucggcaagauccaggacucccugagcuccaccgccagcgcgcucgggaagcugcaggacguggucaaccagaacgcccaggcccugaacacgcucgugaagcagcuguccagcaacuucggcgccaucuccagcgugcugaacgacauccucucccgccuggacccgcccgaggccgaggugcagaucgaccggcugaucaccgggcgccuccagagccugcagaccuacgugacccagcagcugauccgggcggccgagauccgcgccagcgccaaccucgccgcgaccaagauguccgagugcguccugggccagagcaagcggguggacuucugcggcaagggguaccaccugauguccuucccccagagcgccccgcacggcguggucuuccuccacgugacguacguccccgcccaggagaagaacuucaccaccgcccccgcgaucugccacgacgggaaggcccacuucccccgcgagggcguguucguguccaacgggacccacugguucgucacgcagcggaacuucuacgagccgcagaucaucaccaccgacaacaccuucgugagcggcaacugcgacguggucaucggcaucgugaacaacacgguguacgacccccugcagcccgagcuggacuccuucaaggaggagcucgacaaguacuucaagaaccacaccagccccgacgucgaccugggggacaucuccggcaucaacgccagcguggugaacauccagaaggagaucgaccgccugaacgaggucgccaagaaccucaacgagucccugaucgaccugcaggagcucgggaaguacgagcaguacaucaaguggccgugguacaucuggcugggcuucaucgccggccugaucgcgaucgugaucgugaccaucaugcucugcugcaugaccagcugcugcuccugccugaaggggugcugcagcugcggcuccugcugcaaguucgacgaggacgacagcgagcccguccugaagggggugaagcuccacuacacgugaggacuagucccuguucccagagcccacuuuuuuuucuuuuuuugaaauaaaauagccugucuuucagaucuaaaaaaaaaaaaaaaaaaaaaaaaaaaaaaaaaaaaaaaaaaaaaaaaaaaaaaaaaaaaaaaaaaaaaaaaaaaaaaaaaaaaaaaaaaaaaaaaaaaa

SEQ ID NO: 24849 - RNA, 4061 nt, Artificial Sequence
  SARS-CoV-2/Wuhan/WIV05/2019__EPI_ISL_402128 spike protein mRNA gc (1-1273)(K986P_V987P_K986P_V987P_H69del_V70del_Y144del_N501Y_A570 D_D614G_P681H_T716I_S982A_D1118H)
aggagagucccgcagucggcguccagcggcucugcuuguucgugugugugucguugcaggccuuauucaagcuuaccauguucguguuccugguccuccugccccuggugagcucccagugcgugaaccucaccacccgcacgcagcugccgcccgccuacaccaacagcuucacccggggcgucuacuaccccgacaagguguuccgcuccagcgugcugcacuccacccaggaccucuuccugcccuucuucagcaacgucacgugguuccacgccaucuccgggaccaacggcaccaagcgguucgacaacccggugcugcccuucaacgacggggucuacuucgcgagcaccgagaaguccaacaucauccgcggcuggaucuucgggacgacccucgacagcaagacccagucccugcugaucgugaacaacgccaccaacguggucaucaaggugugcgaguuccaguucugcaacgaccccuuccucggcguguaccacaagaacaacaagagcuggauggaguccgaguuccgggucuacagcuccgccaacaacugcacguucgaguacgugagccagcccuuccugauggaccuggagggcaagcaggggaacuucaagaaccuccgcgaguucguguucaagaacaucgacggcuacuucaagaucuacuccaagcacaccccgaucaaccugguccgggaccugccccagggguucagcgcccucgagccccugguggaccugcccaucggcaucaacaucacccgcuuccagacccuccuggcccugcaccgguccuaccucacgccgggggacagcagcuccggcuggaccgcgggcgccgccgccuacuacgugggguaccugcagccccgcaccuuccugcucaaguacaacgagaacggcaccaucacggacgcggucgacugcgcccuggacccccugagcgagaccaagugcacccucaaguccuucaccguggagaaggggaucuaccagacgagcaacuuccgggugcagcccaccgaguccaucguccgcuucccgaacaucaccaaccugugccccuucggcgagguguucaacgccacccgguucgccagcgucuacgccuggaaccgcaagcggaucuccaacugcguggcggacuacagcgugcuguacaacuccgccagcuucuccacguucaagugcuacggcgucagccccaccaagcucaacgaccugugcuucaccaacguguacgccgacuccuucgugauccgcggggacgagguccggcagaucgcccccggccagaccgggaagaucgccgacuacaacuacaagcugccggacgacuucacgggcugcgugaucgcguggaacagcaacaaccucgacuccaaggucgggggcaacuacaacuaccuguaccgccuguuccgcaagagcaaccucaagcccuucgagcgggacaucuccaccgagaucuaccaggccggcagcacccccugcaacgggguggagggcuucaacugcuacuucccccugcaguccuacggguuccagccgaccuacggcgugggguaccagcccuaccggguggucgugcugagcuucgagcuccugcacgcccccgccacggugugcggccccaagaaguccaccaaccuggucaagaacaagugcgugaacuucaacuucaacggccucaccgggaccggcgugcugaccgagagcaacaagaaguuccugccguuccagcaguucgggcgcgacaucgacgacacgaccgacgcgguccgcgacccccagacccuggagauccucgacaucacccccugcagcuucggcgggguguccgugaucacgccgggcaccaacaccagcaaccaggucgccgugcuguaccagggcgugaacugcaccgagguccccguggccauccacgccgaccagcugacgcccaccuggcggguguacuccaccggcagcaacgucuuccagacccgcgccgggugccucaucggcgcggagcacgugaacaacuccuacgagugcgacauccccaucggggccggcaucugcgccagcuaccagacgcagaccaacucccaccggcgcgcccggagcguggcgucccagagcaucaucgccuacaccaugucccugggcgccgagaacagcgucgccuacuccaacaacagcaucgccauccccaucaacuucacgaucuccgugaccaccgagauccugcccgugagcaugaccaagacgagcgucgacugcaccauguacaucugcggggacuccaccgagugcagcaaccuccugcugcaguacggcuccuucugcacccagcucaaccgcgcgcugacggggaucgccguggagcaggacaagaacacccaggagguguucgcccaggucaagcagaucuacaagacgcccccgaucaaggacuucggcggguucaacuucagccagauccugcccgaccccuccaagcccagcaagcgguccuucaucgaggaccuccuguucaacaaggugacccuggccgacgccggcuucaucaagcaguacggcgacugccucggggacaucgcggcccgcgaccugaucugcgcccagaaguucaacggccugaccgugcucccgccccugcugaccgacgagaugaucgcccaguacaccagcgcccuccuggcggggaccaucacguccggcuggaccuucggggccggcgccgcccugcagauccccuucgcgaugcagauggccuaccgguucaacggcaucggggucacccagaacgugcucuacgagaaccagaagcugaucgccaaccaguucaacagcgccaucggcaagauccaggacucccugagcuccaccgccagcgcgcucgggaagcugcaggacguggucaaccagaacgcccaggcccugaacacgcucgugaagcagcuguccagcaacuucggcgccaucuccagcgugcugaacgacauccucgcccgccuggacccgcccgaggccgaggugcagaucgaccggcugaucaccgggcgccuccagagccugcagaccuacgugacccagcagcugauccgggcggccgagauccgcgccagcgccaaccucgccgcgaccaagauguccgagugcguccugggccagagcaagcggguggacuucugcggcaagggguaccaccugauguccuucccccagagcgccccgcacggcguggucuuccuccacgugacguacguccccgcccaggagaagaacuucaccaccgcccccgcgaucugccacgacgggaaggcccacuucccccgcgagggcguguucguguccaacgggacccacugguucgucacgcagcggaacuucuacgagccgcagaucaucaccacccacaacaccuucgugagcggcaacugcgacguggucaucggcaucgugaacaacacgguguacgacccccugcagcccgagcuggacuccuucaaggaggagcucgacaaguacuucaagaaccacaccagccccgacgucgaccugggggacaucuccggcaucaacgccagcguggugaacauccagaaggagaucgaccgccugaacgaggucgccaagaaccucaacgagucccugaucgaccugcaggagcucgggaaguacgagcaguacaucaaguggccgugguacaucuggcugggcuucaucgccggccugaucgcgaucgugauggugaccaucaugcucugcugcaugaccagcugcugcuccugccugaaggggugcugcagcugcggcuccugcugcaaguucgacgaggacgacagcgagcccguccugaagggggugaagcuccacuacacgugaggacuagucccuguucccagagcccacuuuuuuuucuuuuuuugaaauaaaauagccugucuuucagaucuaaaaaaaaaaaaaaaaaaaaaaaaaaaaaaaaaaaaaaaaaaaaaaaaaaaaaaaaaaaaaaaaaaaaaaaaaaaaaaaaaaaaaaaaaaaaaaaaaaaa

SEQ ID NO: 24850 - RNA, 4070 nt, Artificial Sequence
  SARS-CoV-2/Wuhan/WIV05/2019__EPI_ISL_402128 spike protein mRNA gc (1-1273)(K986P_V987P_K986P_V987P_K417N_E484K_N501Y_D614G)
aggagagucccgcagucggcguccagcggcucugcuuguucgugugugugucguugcaggccuuauucaagcuuaccauguucguguuccugguccuccugccccuggugagcucccagugcgugaaccucaccacccgcacgcagcugccgcccgccuacaccaacagcuucacccggggcgucuacuaccccgacaagguguuccgcuccagcgugcugcacuccacccaggaccucuuccugcccuucuucagcaacgucacgugguuccacgccauccacguguccgggaccaacggcaccaagcgguucgacaacccggugcugcccuucaacgacggggucuacuucgcgagcaccgagaaguccaacaucauccgcggcuggaucuucgggacgacccucgacagcaagacccagucccugcugaucgugaacaacgccaccaacguggucaucaaggugugcgaguuccaguucugcaacgaccccuuccucggcguguacuaccacaagaacaacaagagcuggauggaguccgaguuccgggucuacagcuccgccaacaacugcacguucgaguacgugagccagcccuuccugauggaccuggagggcaagcaggggaacuucaagaaccuccgcgaguucguguucaagaacaucgacggcuacuucaagaucuacuccaagcacaccccgaucaaccugguccgggaccugccccagggguucagcgcccucgagccccugguggaccugcccaucggcaucaacaucacccgcuuccagacccuccuggcccugcaccgguccuaccucacgccgggggacagcagcuccggcuggaccgcgggcgccgccgccuacuacgugggguaccugcagccccgcaccuuccugcucaaguacaacgagaacggcaccaucacggacgcggucgacugcgcccuggacccccugagcgagaccaagugcacccucaaguccuucaccguggagaaggggaucuaccagacgagcaacuuccgggugcagcccaccgaguccaucguccgcuucccgaacaucaccaaccugugccccuucggcgagguguucaacgccacccgguucgccagcgucuacgccuggaaccgcaagcggaucuccaacugcguggcggacuacagcgugcuguacaacuccgccagcuucuccacguucaagugcuacggcgucagccccaccaagcucaacgaccugugcuucaccaacguguacgccgacuccuucgugauccgcggggacgagguccggcagaucgcccccggccagaccgggaacaucgccgacuacaacuacaagcugccggacgacuucacgggcugcgugaucgcguggaacagcaacaaccucgacuccaaggucgggggcaacuacaacuaccuguaccgccuguuccgcaagagcaaccucaagcccuucgagcgggacaucuccaccgagaucuaccaggccggcagcacccccugcaacggggugaagggcuucaacugcuacuucccccugcaguccuacggguuccagccgaccuacggcgugggguaccagcccuaccggguggucgugcugagcuucgagcuccugcacgcccccgccacggugugcggccccaagaaguccaccaaccuggucaagaacaagugcgugaacuucaacuucaacggccucaccgggaccggcgugcugaccgagagcaacaagaaguuccugccguuccagcaguucgggcgcgacaucgccgacacgaccgacgcgguccgcgacccccagacccuggagauccucgacaucacccccugcagcuucggcgggguguccgugaucacgccgggcaccaacaccagcaaccaggucgccgugcuguaccagggcgugaacugcaccgagguccccguggccauccacgccgaccagcugacgcccaccuggcggguguacuccaccggcagcaacgucuuccagacccgcgccgggugccucaucggcgcggagcacgugaacaacuccuacgagugcgacauccccaucggggccggcaucugcgccagcuaccagacgcagaccaacuccccgcggcgcgcccggagcguggcgucccagagcaucaucgccuacaccaugucccugggcgccgagaacagcgucgccuacuccaacaacagcaucgccauccccaccaacuucacgaucuccgugaccaccgagauccugcccgugagcaugaccaagacgagcgucgacugcaccauguacaucugcggggacuccaccgagugcagcaaccuccugcugcaguacggcuccuucugcacccagcucaaccgcgcgcugacggggaucgccguggagcaggacaagaacacccaggagguguucgcccaggucaagcagaucuacaagacgcccccgaucaaggacuucggcggguucaacuucagccagauccugcccgaccccuccaagcccagcaagcgguccuucaucgaggaccuccuguucaacaaggugacccuggccgacgccggcuucaucaagcaguacggcgacugccucggggacaucgcggcccgcgaccugaucugcgcccagaaguucaacggccugaccgugcucccgccccugcugaccgacgagaugaucgcccaguacaccagcgcccuccuggcggggaccaucacguccggcuggaccuucggggccggcgccgcccugcagauccccuucgcgaugcagauggccuaccgguucaacggcaucggggucacccagaacgugcucuacgagaaccagaagcugaucgccaaccaguucaacagcgccaucggcaagauccaggacucccugagcuccaccgccagcgcgcucgggaagcugcaggacguggucaaccagaacgcccaggcccugaacacgcucgugaagcagcuguccagcaacuucggcgccaucuccagcgugcugaacgacauccucucccgccuggacccgcccgaggccgaggugcagaucgaccggcugaucaccgggcgccuccagagccugcagaccuacgugacccagcagcugauccgggcggccgagauccgcgccagcgccaaccucgccgcgaccaagauguccgagugcguccugggccagagcaagcggguggacuucugcggcaagggguaccaccugauguccuucccccagagcgccccgcacggcguggucuuccuccacgugacguacguccccgcccaggagaagaacuucaccaccgcccccgcgaucugccacgacgggaaggcccacuucccccgcgagggcguguucguguccaacgggacccacugguucgucacgcagcggaacuucuacgagccgcagaucaucaccaccgacaacaccuucgugagcggcaacugcgacguggucaucggcaucgugaacaacacgguguacgacccccugcagcccgagcuggacuccuucaaggaggagcucgacaaguacuucaagaaccacaccagccccgacgucgaccugggggacaucuccggcaucaacgccagcguggugaacauccagaaggagaucgaccgccugaacgaggucgccaagaaccucaacgagucccugaucgaccugcaggagcucgggaaguacgagcaguacaucaaguggccgugguacaucuggcugggcuucaucgccggccugaucgcgaucgugauggugaccaucaugcucugcugcaugaccagcugcugcuccugccugaaggggugcugcagcugcggcuccugcugcaaguucgacgaggacgacagcgagcccguccugaagggggugaagcuccacuacacgugaggacuagucccuguucccagagcccacuuuuuuuucuuuuuuugaaauaaaauagccugucuuucagaucuaaaaaaaaaaaaaaaaaaaaaaaaaaaaaaaaaaaaaaaaaaaaaaaaaaaaaaaaaaaaaaaaaaaaaaaaaaaaaaaaaaaaaaaaaaaaaaaaaaaa

SEQ ID NO: 24851 - RNA, 4061 nt, Artificial Sequence
  SARS-CoV-2/Wuhan/WIV05/2019__EPI_ISL_402128 spike protein mRNA gc (1-1273)(K986P_V987P_K986P_V987P_L18F_D80A_D215G_L242del_A243del_ L244del_R246I_K417N_E484K_N501Y_D614G_A701V)
aggagagucccgcagucggcguccagcggcucugcuuguucgugugugugucguugcaggccuuauucaagcuuaccauguucguguuccugguccuccugccccuggugagcucccagugcgugaacuucaccacccgcacgcagcugccgcccgccuacaccaacagcuucacccggggcgucuacuaccccgacaagguguuccgcuccagcgugcugcacuccacccaggaccucuuccugcccuucuucagcaacgucacgugguuccacgccauccacguguccgggaccaacggcaccaagcgguucgccaacccggugcugcccuucaacgacggggucuacuucgcgagcaccgagaaguccaacaucauccgcggcuggaucuucgggacgacccucgacagcaagacccagucccugcugaucgugaacaacgccaccaacguggucaucaaggugugcgaguuccaguucugcaacgaccccuuccucggcguguacuaccacaagaacaacaagagcuggauggaguccgaguuccgggucuacagcuccgccaacaacugcacguucgaguacgugagccagcccuuccugauggaccuggagggcaagcaggggaacuucaagaaccuccgcgaguucguguucaagaacaucgacggcuacuucaagaucuacuccaagcacaccccgaucaaccugguccggggccugccccagggguucagcgcccucgagccccugguggaccugcccaucggcaucaacaucacccgcuuccagacccuccacaucuccuaccucacgccgggggacagcagcuccggcuggaccgcgggcgccgccgccuacuacgugggguaccugcagccccgcaccuuccugcucaaguacaacgagaacggcaccaucacggacgcggucgacugcgcccuggacccccugagcgagaccaagugcacccucaaguccuucaccguggagaaggggaucuaccagacgagcaacuuccgggugcagcccaccgaguccaucguccgcuucccgaacaucaccaaccugugccccuucggcgagguguucaacgccacccgguucgccagcgucuacgccuggaaccgcaagcggaucuccaacugcguggcggacuacagcgugcuguacaacuccgccagcuucuccacguucaagugcuacggcgucagccccaccaagcucaacgaccugugcuucaccaacguguacgccgacuccuucgugauccgcggggacgagguccggcagaucgcccccggccagaccgggaacaucgccgacuacaacuacaagcugccggacgacuucacgggcugcgugaucgcguggaacagcaacaaccucgacuccaaggucgggggcaacuacaacuaccuguaccgccuguuccgcaagagcaaccucaagcccuucgagcgggacaucuccaccgagaucuaccaggccggcagcacccccugcaacggggugaagggcuucaacugcuacuucccccugcaguccuacggguuccagccgaccuacggcgugggguaccagcccuaccggguggucgugcugagcuucgagcuccugcacgcccccgccacggugugcggccccaagaaguccaccaaccuggucaagaacaagugcgugaacuucaacuucaacggccucaccgggaccggcgugcugaccgagagcaacaagaaguuccugccguuccagcaguucgggcgcgacaucgccgacacgaccgacgcgguccgcgacccccagacccuggagauccucgacaucacccccugcagcuucggcgggguguccgugaucacgccgggcaccaacaccagcaaccaggucgccgugcuguaccagggcgugaacugcaccgagguccccguggccauccacgccgaccagcugacgcccaccuggcggguguacuccaccggcagcaacgucuuccagacccgcgccgggugccucaucggcgcggagcacgugaacaacuccuacgagugcgacauccccaucggggccggcaucugcgccagcuaccagacgcagaccaacuccccgcggcgcgcccggagcguggcgucccagagcaucaucgccuacaccaugucccugggcguggagaacagcgucgccuacuccaacaacagcaucgccauccccaccaacuucacgaucuccgugaccaccgagauccugcccgugagcaugaccaagacgagcgucgacugcaccauguacaucugcggggacuccaccgagugcagcaaccuccugcugcaguacggcuccuucugcacccagcucaaccgcgcgcugacggggaucgccguggagcaggacaagaacacccaggagguguucgcccaggucaagcagaucuacaagacgcccccgaucaaggacuucggcggguucaacuucagccagauccugcccgaccccuccaagcccagcaagcgguccuucaucgaggaccuccuguucaacaaggugacccuggccgacgccggcuucaucaagcaguacggcgacugccucggggacaucgcggcccgcgaccugaucugcgcccagaaguucaacggccugaccgugcucccgccccugcugaccgacgagaugaucgcccaguacaccagcgcccuccuggcggggaccaucacguccggcuggaccuucggggccggcgccgcccugcagauccccuucgcgaugcagauggccuaccgguucaacggcaucggggucacccagaacgugcucuacgagaaccagaagcugaucgccaaccaguucaacagcgccaucggcaagauccaggacucccugagcuccaccgccagcgcgcucgggaagcugcaggacguggucaaccagaacgcccaggcccugaacacgcucgugaagcagcuguccagcaacuucggcgccaucuccagcgugcugaacgacauccucucccgccuggacccgcccgaggccgaggugcagaucgaccggcugaucaccgggcgccuccagagccugcagaccuacgugacccagcagcugauccgggcggccgagauccgcgccagcgccaaccucgccgcgaccaagauguccgagugcguccugggccagagcaagcggguggacuucugcggcaagggguaccaccugauguccuucccccagagcgccccgcacggcguggucuuccuccacgugacguacguccccgcccaggagaagaacuucaccaccgcccccgcgaucugccacgacgggaaggcccacuucccccgcgagggcguguucguguccaacgggacccacugguucgucacgcagcggaacuucuacgagccgcagaucaucaccaccgacaacaccuucgugagcggcaacugcgacguggucaucggcaucgugaacaacacgguguacgacccccugcagcccgagcuggacuccuucaaggaggagcucgacaaguacuucaagaaccacaccagccccgacgucgaccugggggacaucuccggcaucaacgccagcguggugaacauccagaaggagaucgaccgccugaacgaggucgccaagaaccucaacgagucccugaucgaccugcaggagcucgggaaguacgagcaguacaucaaguggccgugguacaucuggcugggcuucaucgccggccugaucgcgaucgugauggugaccaucaugcucugcugcaugaccagcugcugcuccugccugaaggggugcugcagcugcggcuccugcugcaaguucgacgaggacgacagcgagcccguccugaagggggugaagcuccacuacacgugaggacuagucccuguucccagagcccacuuuuuuuucuuuuuuugaaauaaaauagccugucuuucagaucuaaaaaaaaaaaaaaaaaaaaaaaaaaaaaaaaaaaaaaaaaaaaaaaaaaaaaaaaaaaaaaaaaaaaaaaaaaaaaaaaaaaaaaaaaaaaaaaaaaaa

SEQ ID NO: 24852 - RNA, 4070 nt, Artificial Sequence
  SARS-CoV-2/Wuhan/WIV05/2019__EPI_ISL_402128 spike protein mRNA gc (1-1273)(K986P_V987P_K986P_V987P_E484K_D614G)
aggagagucccgcagucggcguccagcggcucugcuuguucgugugugugucguugcaggccuuauucaagcuuaccauguucguguuccugguccuccugccccuggugagcucccagugcgugaaccucaccacccgcacgcagcugccgcccgccuacaccaacagcuucacccggggcgucuacuaccccgacaagguguuccgcuccagcgugcugcacuccacccaggaccucuuccugcccuucuucagcaacgucacgugguuccacgccauccacguguccgggaccaacggcaccaagcgguucgacaacccggugcugcccuucaacgacggggucuacuucgcgagcaccgagaaguccaacaucauccgcggcuggaucuucgggacgacccucgacagcaagacccagucccugcugaucgugaacaacgccaccaacguggucaucaaggugugcgaguuccaguucugcaacgaccccuuccucggcguguacuaccacaagaacaacaagagcuggauggaguccgaguuccgggucuacagcuccgccaacaacugcacguucgaguacgugagccagcccuuccugauggaccuggagggcaagcaggggaacuucaagaaccuccgcgaguucguguucaagaacaucgacggcuacuucaagaucuacuccaagcacaccccgaucaaccugguccgggaccugccccagggguucagcgcccucgagccccugguggaccugcccaucggcaucaacaucacccgcuuccagacccuccuggcccugcaccgguccuaccucacgccgggggacagcagcuccggcuggaccgcgggcgccgccgccuacuacgugggguaccugcagccccgcaccuuccugcucaaguacaacgagaacggcaccaucacggacgcggucgacugcgcccuggacccccugagcgagaccaagugcacccucaaguccuucaccguggagaaggggaucuaccagacgagcaacuuccgggugcagcccaccgaguccaucguccgcuucccgaacaucaccaaccugugccccuucggcgagguguucaacgccacccgguucgccagcgucuacgccuggaaccgcaagcggaucuccaacugcguggcggacuacagcgugcuguacaacuccgccagcuucuccacguucaagugcuacggcgucagccccaccaagcucaacgaccugugcuucaccaacguguacgccgacuccuucgugauccgcggggacgagguccggcagaucgcccccggccagaccgggaagaucgccgacuacaacuacaagcugccggacgacuucacgggcugcgugaucgcguggaacagcaacaaccucgacuccaaggucgggggcaacuacaacuaccuguaccgccuguuccgcaagagcaaccucaagcccuucgagcgggacaucuccaccgagaucuaccaggccggcagcacccccugcaacggggugaagggcuucaacugcuacuucccccugcaguccuacggguuccagccgaccaacggcgugggguaccagcccuaccggguggucgugcugagcuucgagcuccugcacgcccccgccacggugugcggccccaagaaguccaccaaccuggucaagaacaagugcgugaacuucaacuucaacggccucaccgggaccggcgugcugaccgagagcaacaagaaguuccugccguuccagcaguucgggcgcgacaucgccgacacgaccgacgcgguccgcgacccccagacccuggagauccucgacaucacccccugcagcuucggcgggguguccgugaucacgccgggcaccaacaccagcaaccaggucgccgugcuguaccagggcgugaacugcaccgagguccccguggccauccacgccgaccagcugacgcccaccuggcggguguacuccaccggcagcaacgucuuccagacccgcgccgggugccucaucggcgcggagcacgugaacaacuccuacgagugcgacauccccaucggggccggcaucugcgccagcuaccagacgcagaccaacuccccgcggcgcgcccggagcguggcgucccagagcaucaucgccuacaccaugucccugggcgccgagaacagcgucgccuacuccaacaacagcaucgccauccccaccaacuucacgaucuccgugaccaccgagauccugcccgugagcaugaccaagacgagcgucgacugcaccauguacaucugcggggacuccaccgagugcagcaaccuccugcugcaguacggcuccuucugcacccagcucaaccgcgcgcugacggggaucgccguggagcaggacaagaacacccaggagguguucgcccaggucaagcagaucuacaagacgcccccgaucaaggacuucggcggguucaacuucagccagauccugcccgaccccuccaagcccagcaagcgguccuucaucgaggaccuccuguucaacaaggugacccuggccgacgccggcuucaucaagcaguacggcgacugccucggggacaucgcggcccgcgaccugaucugcgcccagaaguucaacggccugaccgugcucccgccccugcugaccgacgagaugaucgcccaguacaccagcgcccuccuggcggggaccaucacguccggcuggaccuucggggccggcgccgcccugcagauccccuucgcgaugcagauggccuaccgguucaacggcaucggggucacccagaacgugcucuacgagaaccagaagcugaucgccaaccaguucaacagcgccaucggcaagauccaggacucccugagcuccaccgccagcgcgcucgggaagcugcaggacguggucaaccagaacgcccaggcccugaacacgcucgugaagcagcuguccagcaacuucggcgccaucuccagcgugcugaacgacauccucucccgccuggacccgcccgaggccgaggugcagaucgaccggcugaucaccgggcgccuccagagccugcagaccuacgugacccagcagcugauccgggcggccgagauccgcgccagcgccaaccucgccgcgaccaagauguccgagugcguccugggccagagcaagcggguggacuucugcggcaagggguaccaccugauguccuucccccagagcgccccgcacggcguggucuuccuccacgugacguacguccccgcccaggagaagaacuucaccaccgcccccgcgaucugccacgacgggaaggcccacuucccccgcgagggcguguucguguccaacgggacccacugguucgucacgcagcggaacuucuacgagccgcagaucaucaccaccgacaacaccuucgugagcggcaacugcgacguggucaucggcaucgugaacaacacgguguacgacccccugcagcccgagcuggacuccuucaaggaggagcucgacaaguacuucaagaaccacaccagccccgacgucgaccugggggacaucuccggcaucaacgccagcguggugaacauccagaaggagaucgaccgccugaacgaggucgccaagaaccucaacgagucccugaucgaccugcaggagcucgggaaguacgagcaguacaucaaguggccgugguacaucuggcugggcuucaucgccggccugaucgcgaucgugauggugaccaucaugcucugcugcaugaccagcugcugcuccugccugaaggggugcugcagcugcggcuccugcugcaaguucgacgaggacgacagcgagcccguccugaagggggugaagcuccacuacacgugaggacuagucccuguucccagagcccacuuuuuuuucuuuuuuugaaauaaaauagccugucuuucagaucuaaaaaaaaaaaaaaaaaaaaaaaaaaaaaaaaaaaaaaaaaaaaaaaaaaaaaaaaaaaaaaaaaaaaaaaaaaaaaaaaaaaaaaaaaaaaaaaaaaaa

SEQ ID NO: 24853 - RNA, 4070 nt, Artificial Sequence
  SARS-CoV-2/Wuhan/WIV05/2019__EPI_ISL_402128 spike protein mRNA gc (1-1273)(K986P_V987P_K986P_V987P_L18F_T20N_P26S_D138Y_R190S_K417T _E484K_N501Y_D614G_H655Y_T1027I)
aggagagucccgcagucggcguccagcggcucugcuuguucgugugugugucguugcaggccuuauucaagcuuaccauguucguguuccugguccuccugccccuggugagcucccagugcgugaacuucaccaaccgcacgcagcugccgagcgccuacaccaacagcuucacccggggcgucuacuaccccgacaagguguuccgcuccagcgugcugcacuccacccaggaccucuuccugcccuucuucagcaacgucacgugguuccacgccauccacguguccgggaccaacggcaccaagcgguucgacaacccggugcugcccuucaacgacggggucuacuucgcgagcaccgagaaguccaacaucauccgcggcuggaucuucgggacgacccucgacagcaagacccagucccugcugaucgugaacaacgccaccaacguggucaucaaggugugcgaguuccaguucugcaacuaccccuuccucggcguguacuaccacaagaacaacaagagcuggauggaguccgaguuccgggucuacagcuccgccaacaacugcacguucgaguacgugagccagcccuuccugauggaccuggagggcaagcaggggaacuucaagaaccucagcgaguucguguucaagaacaucgacggcuacuucaagaucuacuccaagcacaccccgaucaaccugguccgggaccugccccagggguucagcgcccucgagccccugguggaccugcccaucggcaucaacaucacccgcuuccagacccuccuggcccugcaccgguccuaccucacgccgggggacagcagcuccggcuggaccgcgggcgccgccgccuacuacgugggguaccugcagccccgcaccuuccugcucaaguacaacgagaacggcaccaucacggacgcggucgacugcgcccuggacccccugagcgagaccaagugcacccucaaguccuucaccguggagaaggggaucuaccagacgagcaacuuccgggugcagcccaccgaguccaucguccgcuucccgaacaucaccaaccugugccccuucggcgagguguucaacgccacccgguucgccagcgucuacgccuggaaccgcaagcggaucuccaacugcguggcggacuacagcgugcuguacaacuccgccagcuucuccacguucaagugcuacggcgucagccccaccaagcucaacgaccugugcuucaccaacguguacgccgacuccuucgugauccgcggggacgagguccggcagaucgcccccggccagaccgggaccaucgccgacuacaacuacaagcugccggacgacuucacgggcugcgugaucgcguggaacagcaacaaccucgacuccaaggucgggggcaacuacaacuaccuguaccgccuguuccgcaagagcaaccucaagcccuucgagcgggacaucuccaccgagaucuaccaggccggcagcacccccugcaacggggugaagggcuucaacugcuacuucccccugcaguccuacggguuccagccgaccuacggcgugggguaccagcccuaccggguggucgugcugagcuucgagcuccugcacgcccccgccacggugugcggccccaagaaguccaccaaccuggucaagaacaagugcgugaacuucaacuucaacggccucaccgggaccggcgugcugaccgagagcaacaagaaguuccugccguuccagcaguucgggcgcgacaucgccgacacgaccgacgcgguccgcgacccccagacccuggagauccucgacaucacccccugcagcuucggcgggguguccgugaucacgccgggcaccaacaccagcaaccaggucgccgugcuguaccagggcgugaacugcaccgagguccccguggccauccacgccgaccagcugacgcccaccuggcggguguacuccaccggcagcaacgucuuccagacccgcgccgggugccucaucggcgcggaguacgugaacaacuccuacgagugcgacauccccaucggggccggcaucugcgccagcuaccagacgcagaccaacuccccgcggcgcgcccggagcguggcgucccagagcaucaucgccuacaccaugucccugggcgccgagaacagcgucgccuacuccaacaacagcaucgccauccccaccaacuucacgaucuccgugaccaccgagauccugcccgugagcaugaccaagacgagcgucgacugcaccauguacaucugcggggacuccaccgagugcagcaaccuccugcugcaguacggcuccuucugcacccagcucaaccgcgcgcugacggggaucgccguggagcaggacaagaacacccaggagguguucgcccaggucaagcagaucuacaagacgcccccgaucaaggacuucggcggguucaacuucagccagauccugcccgaccccuccaagcccagcaagcgguccuucaucgaggaccuccuguucaacaaggugacccuggccgacgccggcuucaucaagcaguacggcgacugccucggggacaucgcggcccgcgaccugaucugcgcccagaaguucaacggccugaccgugcucccgccccugcugaccgacgagaugaucgcccaguacaccagcgcccuccuggcggggaccaucacguccggcuggaccuucggggccggcgccgcccugcagauccccuucgcgaugcagauggccuaccgguucaacggcaucggggucacccagaacgugcucuacgagaaccagaagcugaucgccaaccaguucaacagcgccaucggcaagauccaggacucccugagcuccaccgccagcgcgcucgggaagcugcaggacguggucaaccagaacgcccaggcccugaacacgcucgugaagcagcuguccagcaacuucggcgccaucuccagcgugcugaacgacauccucucccgccuggacccgcccgaggccgaggugcagaucgaccggcugaucaccgggcgccuccagagccugcagaccuacgugacccagcagcugauccgggcggccgagauccgcgccagcgccaaccucgccgcgaucaagauguccgagugcguccugggccagagcaagcggguggacuucugcggcaagggguaccaccugauguccuucccccagagcgccccgcacggcguggucuuccuccacgugacguacguccccgcccaggagaagaacuucaccaccgcccccgcgaucugccacgacgggaaggcccacuucccccgcgagggcguguucguguccaacgggacccacugguucgucacgcagcggaacuucuacgagccgcagaucaucaccaccgacaacaccuucgugagcggcaacugcgacguggucaucggcaucgugaacaacacgguguacgacccccugcagcccgagcuggacuccuucaaggaggagcucgacaaguacuucaagaaccacaccagccccgacgucgaccugggggacaucuccggcaucaacgccagcguggugaacauccagaaggagaucgaccgccugaacgaggucgccaagaaccucaacgagucccugaucgaccugcaggagcucgggaaguacgagcaguacaucaaguggccgugguacaucuggcugggcuucaucgccggccugaucgcgaucgugauggugaccaucaugcucugcugcaugaccagcugcugcuccugccugaaggggugcugcagcugcggcuccugcugcaaguucgacgaggacgacagcgagcccguccugaagggggugaagcuccacuacacgugaggacuagucccuguucccagagcccacuuuuuuuucuuuuuuugaaauaaaauagccugucuuucagaucuaaaaaaaaaaaaaaaaaaaaaaaaaaaaaaaaaaaaaaaaaaaaaaaaaaaaaaaaaaaaaaaaaaaaaaaaaaaaaaaaaaaaaaaaaaaaaaaaaaaa

SEQ ID NO: 24854 - RNA, 4070 nt, Artificial Sequence
  SARS-CoV-2/Wuhan/WIV05/2019__EPI_ISL_402128 spike protein mRNA gc (1-1273)(K986P_V987P_K986P_V987P_S13I_W152C_L452R_D614G)
aggagagucccgcagucggcguccagcggcucugcuuguucgugugugugucguugcaggccuuauucaagcuuaccauguucguguuccugguccuccugccccuggugagcauccagugcgugaaccucaccacccgcacgcagcugccgcccgccuacaccaacagcuucacccggggcgucuacuaccccgacaagguguuccgcuccagcgugcugcacuccacccaggaccucuuccugcccuucuucagcaacgucacgugguuccacgccauccacguguccgggaccaacggcaccaagcgguucgacaacccggugcugcccuucaacgacggggucuacuucgcgagcaccgagaaguccaacaucauccgcggcuggaucuucgggacgacccucgacagcaagacccagucccugcugaucgugaacaacgccaccaacguggucaucaaggugugcgaguuccaguucugcaacgaccccuuccucggcguguacuaccacaagaacaacaagagcugcauggaguccgaguuccgggucuacagcuccgccaacaacugcacguucgaguacgugagccagcccuuccugauggaccuggagggcaagcaggggaacuucaagaaccuccgcgaguucguguucaagaacaucgacggcuacuucaagaucuacuccaagcacaccccgaucaaccugguccgggaccugccccagggguucagcgcccucgagccccugguggaccugcccaucggcaucaacaucacccgcuuccagacccuccuggcccugcaccgguccuaccucacgccgggggacagcagcuccggcuggaccgcgggcgccgccgccuacuacgugggguaccugcagccccgcaccuuccugcucaaguacaacgagaacggcaccaucacggacgcggucgacugcgcccuggacccccugagcgagaccaagugcacccucaaguccuucaccguggagaaggggaucuaccagacgagcaacuuccgggugcagcccaccgaguccaucguccgcuucccgaacaucaccaaccugugccccuucggcgagguguucaacgccacccgguucgccagcgucuacgccuggaaccgcaagcggaucuccaacugcguggcggacuacagcgugcuguacaacuccgccagcuucuccacguucaagugcuacggcgucagccccaccaagcucaacgaccugugcuucaccaacguguacgccgacuccuucgugauccgcggggacgagguccggcagaucgcccccggccagaccgggaagaucgccgacuacaacuacaagcugccggacgacuucacgggcugcgugaucgcguggaacagcaacaaccucgacuccaaggucgggggcaacuacaacuaccgcuaccgccuguuccgcaagagcaaccucaagcccuucgagcgggacaucuccaccgagaucuaccaggccggcagcacccccugcaacgggguggagggcuucaacugcuacuucccccugcaguccuacggguuccagccgaccaacggcgugggguaccagcccuaccggguggucgugcugagcuucgagcuccugcacgcccccgccacggugugcggccccaagaaguccaccaaccuggucaagaacaagugcgugaacuucaacuucaacggccucaccgggaccggcgugcugaccgagagcaacaagaaguuccugccguuccagcaguucgggcgcgacaucgccgacacgaccgacgcgguccgcgacccccagacccuggagauccucgacaucacccccugcagcuucggcgggguguccgugaucacgccgggcaccaacaccagcaaccaggucgccgugcuguaccagggcgugaacugcaccgagguccccguggccauccacgccgaccagcugacgcccaccuggcggguguacuccaccggcagcaacgucuuccagacccgcgccgggugccucaucggcgcggagcacgugaacaacuccuacgagugcgacauccccaucggggccggcaucugcgccagcuaccagacgcagaccaacuccccgcggcgcgcccggagcguggcgucccagagcaucaucgccuacaccaugucccugggcgccgagaacagcgucgccuacuccaacaacagcaucgccauccccaccaacuucacgaucuccgugaccaccgagauccugcccgugagcaugaccaagacgagcgucgacugcaccauguacaucugcggggacuccaccgagugcagcaaccuccugcugcaguacggcuccuucugcacccagcucaaccgcgcgcugacggggaucgccguggagcaggacaagaacacccaggagguguucgcccaggucaagcagaucuacaagacgcccccgaucaaggacuucggcggguucaacuucagccagauccugcccgaccccuccaagcccagcaagcgguccuucaucgaggaccuccuguucaacaaggugacccuggccgacgccggcuucaucaagcaguacggcgacugccucggggacaucgcggcccgcgaccugaucugcgcccagaaguucaacggccugaccgugcucccgccccugcugaccgacgagaugaucgcccaguacaccagcgcccuccuggcggggaccaucacguccggcuggaccuucggggccggcgccgcccugcagauccccuucgcgaugcagauggccuaccgguucaacggcaucggggucacccagaacgugcucuacgagaaccagaagcugaucgccaaccaguucaacagcgccaucggcaagauccaggacucccugagcuccaccgccagcgcgcucgggaagcugcaggacguggucaaccagaacgcccaggcccugaacacgcucgugaagcagcuguccagcaacuucggcgccaucuccagcgugcugaacgacauccucucccgccuggacccgcccgaggccgaggugcagaucgaccggcugaucaccgggcgccuccagagccugcagaccuacgugacccagcagcugauccgggcggccgagauccgcgccagcgccaaccucgccgcgaccaagauguccgagugcguccugggccagagcaagcggguggacuucugcggcaagggguaccaccugauguccuucccccagagcgccccgcacggcguggucuuccuccacgugacguacguccccgcccaggagaagaacuucaccaccgcccccgcgaucugccacgacgggaaggcccacuucccccgcgagggcguguucguguccaacgggacccacugguucgucacgcagcggaacuucuacgagccgcagaucaucaccaccgacaacaccuucgugagcggcaacugcgacguggucaucggcaucgugaacaacacgguguacgacccccugcagcccgagcuggacuccuucaaggaggagcucgacaaguacuucaagaaccacaccagccccgacgucgaccugggggacaucuccggcaucaacgccagcguggugaacauccagaaggagaucgaccgccugaacgaggucgccaagaaccucaacgagucccugaucgaccugcaggagcucgggaaguacgagcaguacaucaaguggccgugguacaucuggcugggcuucaucgccggccugaucgcgaucgugauggugaccaucaugcucugcugcaugaccagcugcugcuccugccugaaggggugcugcagcugcggcuccugcugcaaguucgacgaggacgacagcgagcccguccugaagggggugaagcuccacuacacgugaggacuagucccuguucccagagcccacuuuuuuuucuuuuuuugaaauaaaauagccugucuuucagaucuaaaaaaaaaaaaaaaaaaaaaaaaaaaaaaaaaaaaaaaaaaaaaaaaaaaaaaaaaaaaaaaaaaaaaaaaaaaaaaaaaaaaaaaaaaaaaaaaaaaa

SEQ ID NO: 24855 - RNA, 4070 nt, Artificial Sequence
  SARS-CoV-2/Wuhan/WIV05/2019__EPI_ISL_402128 spike protein mRNA gc (1-1273)(K986P_V987P)
aggagagucccgcagucggcguccagcggcucugcuuguucgugugugugucguugcaggccuuauucaagcuuaccauguucguguuccugguccuccugccccuggugagcucccagugcgugaaccucaccacccgcacgcagcugccgcccgccuacaccaacagcuucacccggggcgucuacuaccccgacaagguguuccgcuccagcgugcugcacuccacccaggaccucuuccugcccuucuucagcaacgucacgugguuccacgccauccacguguccgggaccaacggcaccaagcgguucgacaacccggugcugcccuucaacgacggggucuacuucgcgagcaccgagaaguccaacaucauccgcggcuggaucuucgggacgacccucgacagcaagacccagucccugcugaucgugaacaacgccaccaacguggucaucaaggugugcgaguuccaguucugcaacgaccccuuccucggcguguacuaccacaagaacaacaagagcuggauggaguccgaguuccgggucuacagcuccgccaacaacugcacguucgaguacgugagccagcccuuccugauggaccuggagggcaagcaggggaacuucaagaaccuccgcgaguucguguucaagaacaucgacggcuacuucaagaucuacuccaagcacaccccgaucaaccugguccgggaccugccccagggguucagcgcccucgagccccugguggaccugcccaucggcaucaacaucacccgcuuccagacccuccuggcccugcaccgguccuaccucacgccgggggacagcagcuccggcuggaccgcgggcgccgccgccuacuacgugggguaccugcagccccgcaccuuccugcucaaguacaacgagaacggcaccaucacggacgcggucgacugcgcccuggacccccugagcgagaccaagugcacccucaaguccuucaccguggagaaggggaucuaccagacgagcaacuuccgggugcagcccaccgaguccaucguccgcuucccgaacaucaccaaccugugccccuucggcgagguguucaacgccacccgguucgccagcgucuacgccuggaaccgcaagcggaucuccaacugcguggcggacuacagcgugcuguacaacuccgccagcuucuccacguucaagugcuacggcgucagccccaccaagcucaacgaccugugcuucaccaacguguacgccgacuccuucgugauccgcggggacgagguccggcagaucgcccccggccagaccgggaagaucgccgacuacaacuacaagcugccggacgacuucacgggcugcgugaucgcguggaacagcaacaaccucgacuccaaggucgggggcaacuacaacuaccuguaccgccuguuccgcaagagcaaccucaagcccuucgagcgggacaucuccaccgagaucuaccaggccggcagcacccccugcaacgggguggagggcuucaacugcuacuucccccugcaguccuacggguuccagccgaccaacggcgugggguaccagcccuaccggguggucgugcugagcuucgagcuccugcacgcccccgccacggugugcggccccaagaaguccaccaaccuggucaagaacaagugcgugaacuucaacuucaacggccucaccgggaccggcgugcugaccgagagcaacaagaaguuccugccguuccagcaguucgggcgcgacaucgccgacacgaccgacgcgguccgcgacccccagacccuggagauccucgacaucacccccugcagcuucggcgggguguccgugaucacgccgggcaccaacaccagcaaccaggucgccgugcuguaccaggacgugaacugcaccgagguccccguggccauccacgccgaccagcugacgcccaccuggcggguguacuccaccggcagcaacgucuuccagacccgcgccgggugccucaucggcgcggagcacgugaacaacuccuacgagugcgacauccccaucggggccggcaucugcgccagcuaccagacgcagaccaacuccccgcggcgcgcccggagcguggcgucccagagcaucaucgccuacaccaugucccugggcgccgagaacagcgucgccuacuccaacaacagcaucgccauccccaccaacuucacgaucuccgugaccaccgagauccugcccgugagcaugaccaagacgagcgucgacugcaccauguacaucugcggggacuccaccgagugcagcaaccuccugcugcaguacggcuccuucugcacccagcucaaccgcgcgcugacggggaucgccguggagcaggacaagaacacccaggagguguucgcccaggucaagcagaucuacaagacgcccccgaucaaggacuucggcggguucaacuucagccagauccugcccgaccccuccaagcccagcaagcgguccuucaucgaggaccuccuguucaacaaggugacccuggccgacgccggcuucaucaagcaguacggcgacugccucggggacaucgcggcccgcgaccugaucugcgcccagaaguucaacggccugaccgugcucccgccccugcugaccgacgagaugaucgcccaguacaccagcgcccuccuggcggggaccaucacguccggcuggaccuucggggccggcgccgcccugcagauccccuucgcgaugcagauggccuaccgguucaacggcaucggggucacccagaacgugcucuacgagaaccagaagcugaucgccaaccaguucaacagcgccaucggcaagauccaggacucccugagcuccaccgccagcgcgcucgggaagcugcaggacguggucaaccagaacgcccaggcccugaacacgcucgugaagcagcuguccagcaacuucggcgccaucuccagcgugcugaacgacauccucucccgccuggacccgcccgaggccgagguccagaucgaccggcugaucaccgggcgccuccagagccugcagaccuacgugacccagcagcugauccgggcggccgagauccgcgccagcgccaaccucgccgcgaccaagauguccgagugcgugcugggccagagcaagcgggucgacuucugcggcaagggguaccaccugauguccuucccccagagcgcgccccacggcgugguguuccuccacgucacguacgugcccgcccaggagaagaacuucaccaccgccccggccaucugccacgacgggaaggcccacuucccccgcgagggcgucuucguguccaacgggacccacugguucgugacgcagcggaacuucuacgagccccagaucaucaccaccgacaacaccuucgucagcggcaacugcgacguggugaucggcaucgucaacaacacgguguacgacccccugcagccggagcuggacuccuucaaggaggagcucgacaaguacuucaagaaccacaccagccccgacguggaccugggggacaucuccggcaucaacgccagcgucgugaacauccagaaggagaucgaccgccugaacgagguggccaagaaccucaacgagucccugaucgaccugcaggagcucgggaaguacgagcaguacaucaaguggcccugguacaucuggcugggcuucaucgccggccugaucgcgaucgucauggugaccaucaugcucugcugcaugaccagcugcugcuccugccugaaggggugcugcagcugcggcuccugcugcaaguucgacgaggacgacagcgagccggugcugaagggggucaagcuccacuacacgugaggacuagucccuguucccagagcccacuuuuuuuucuuuuuuugaaauaaaauagccugucuuucagaucuaaaaaaaaaaaaaaaaaaaaaaaaaaaaaaaaaaaaaaaaaaaaaaaaaaaaaaaaaaaaaaaaaaaaaaaaaaaaaaaaaaaaaaaaaaaaaaaaaaaa

SEQ ID NO: 24856 - RNA, 4070 nt, Artificial Sequence
  SARS-CoV-2/Wuhan/WIV05/2019__EPI_ISL_402128 spike protein mRNA gc (1-1273)(K986P_V987P_ D614G)
aggagagucccgcagucggcguccagcggcucugcuuguucgugugugugucguugcaggccuuauucaagcuuaccauguucguguuccugguccuccugccccuggugagcucccagugcgugaaccucaccacccgcacgcagcugccgcccgccuacaccaacagcuucacccggggcgucuacuaccccgacaagguguuccgcuccagcgugcugcacuccacccaggaccucuuccugcccuucuucagcaacgucacgugguuccacgccauccacguguccgggaccaacggcaccaagcgguucgacaacccggugcugcccuucaacgacggggucuacuucgcgagcaccgagaaguccaacaucauccgcggcuggaucuucgggacgacccucgacagcaagacccagucccugcugaucgugaacaacgccaccaacguggucaucaaggugugcgaguuccaguucugcaacgaccccuuccucggcguguacuaccacaagaacaacaagagcuggauggaguccgaguuccgggucuacagcuccgccaacaacugcacguucgaguacgugagccagcccuuccugauggaccuggagggcaagcaggggaacuucaagaaccuccgcgaguucguguucaagaacaucgacggcuacuucaagaucuacuccaagcacaccccgaucaaccugguccgggaccugccccagggguucagcgcccucgagccccugguggaccugcccaucggcaucaacaucacccgcuuccagacccuccuggcccugcaccgguccuaccucacgccgggggacagcagcuccggcuggaccgcgggcgccgccgccuacuacgugggguaccugcagccccgcaccuuccugcucaaguacaacgagaacggcaccaucacggacgcggucgacugcgcccuggacccccugagcgagaccaagugcacccucaaguccuucaccguggagaaggggaucuaccagacgagcaacuuccgggugcagcccaccgaguccaucguccgcuucccgaacaucaccaaccugugccccuucggcgagguguucaacgccacccgguucgccagcgucuacgccuggaaccgcaagcggaucuccaacugcguggcggacuacagcgugcuguacaacuccgccagcuucuccacguucaagugcuacggcgucagccccaccaagcucaacgaccugugcuucaccaacguguacgccgacuccuucgugauccgcggggacgagguccggcagaucgcccccggccagaccgggaagaucgccgacuacaacuacaagcugccggacgacuucacgggcugcgugaucgcguggaacagcaacaaccucgacuccaaggucgggggcaacuacaacuaccuguaccgccuguuccgcaagagcaaccucaagcccuucgagcgggacaucuccaccgagaucuaccaggccggcagcacccccugcaacgggguggagggcuucaacugcuacuucccccugcaguccuacggguuccagccgaccaacggcgugggguaccagcccuaccggguggucgugcugagcuucgagcuccugcacgcccccgccacggugugcggccccaagaaguccaccaaccuggucaagaacaagugcgugaacuucaacuucaacggccucaccgggaccggcgugcugaccgagagcaacaagaaguuccugccguuccagcaguucgggcgcgacaucgccgacacgaccgacgcgguccgcgacccccagacccuggagauccucgacaucacccccugcagcuucggcgggguguccgugaucacgccgggcaccaacaccagcaaccaggucgccgugcuguaccagggcgugaacugcaccgagguccccguggccauccacgccgaccagcugacgcccaccuggcggguguacuccaccgggagcaacgucuuccagacccgcgccggcugccucaucggggcggagcacgugaacaacuccuacgagugcgacauccccaucggcgccggcaucugcgccagcuaccagacgcagaccaacuccccgcggcgcgcccggagcguggcgucccagagcaucaucgccuacaccaugucccugggggccgagaacagcgucgccuacuccaacaacagcaucgccauccccaccaacuucacgaucuccgugaccaccgagauccugcccgugagcaugaccaagacgagcgucgacugcaccauguacaucugcggcgacuccaccgagugcagcaaccuccugcugcaguacggguccuucugcacccagcucaaccgcgcgcugacgggcaucgccguggagcaggacaagaacacccaggagguguucgcccaggucaagcagaucuacaagacgcccccgaucaaggacuucgggggcuucaacuucagccagauccugcccgaccccuccaagcccagcaagcgguccuucaucgaggaccuccuguucaacaaggugacccuggccgacgccggcuucaucaagcaguacggggacugccucggcgacaucgcggcccgcgaccugaucugcgcccagaaguucaacgggcugaccgugcucccgccccugcugaccgacgagaugaucgcccaguacaccagcgcccuccuggcgggcaccaucacguccggguggaccuucggcgccggcgccgcccugcagauccccuucgcgaugcagauggccuaccgguucaacgggaucggcgucacccagaacgugcucuacgagaaccagaagcugaucgccaaccaguucaacagcgccaucgggaagauccaggacucccugagcuccaccgccagcgcgcucggcaagcugcaggacguggucaaccagaacgcccaggcccugaacacgcucgugaagcagcuguccagcaacuucggggccaucuccagcgugcugaacgacauccucucccgccuggacccgcccgaggccgagguccagaucgaccggcugaucaccggccgccuccagagccugcagaccuacgugacccagcagcugauccgggcggccgagauccgcgccagcgccaaccucgccgcgaccaagauguccgagugcgugcugggccagagcaagcgggucgacuucugcgggaagggcuaccaccugauguccuucccccagagcgcgccccacggggugguguuccuccacgucacguacgugcccgcccaggagaagaacuucaccaccgccccggccaucugccacgacggcaaggcccacuucccccgcgagggggucuucguguccaacggcacccacugguucgugacgcagcggaacuucuacgagccccagaucaucaccaccgacaacaccuucgucagcggcaacugcgacguggugaucgggaucgucaacaacacgguguacgacccccugcagccggagcuggacuccuucaaggaggagcucgacaaguacuucaagaaccacaccagccccgacguggaccugggcgacaucuccgggaucaacgccagcgucgugaacauccagaaggagaucgaccgccugaacgagguggccaagaaccucaacgagucccugaucgaccugcaggagcucggcaaguacgagcaguacaucaaguggcccugguacaucuggcugggcuucaucgccgggcugaucgcgaucgucauggugaccaucaugcucugcugcaugaccagcugcugcuccugccugaagggcugcugcagcugcggguccugcugcaaguucgacgaggacgacagcgagccggugcugaagggcgucaagcuccacuacacgugaggacuagucccuguucccagagcccacuuuuuuuucuuuuuuugaaauaaaauagccugucuuucagaucuaaaaaaaaaaaaaaaaaaaaaaaaaaaaaaaaaaaaaaaaaaaaaaaaaaaaaaaaaaaaaaaaaaaaaaaaaaaaaaaaaaaaaaaaaaaaaaaaaaaa

SEQ ID NO: 24857 - RNA, 4070 nt, Artificial Sequence
  SARS-CoV-2/Wuhan/WIV05/2019__EPI_ISL_402128 spike protein mRNA gc (1-1273)(K986P_V987P_A222V_D614G)
aggagagucccgcagucggcguccagcggcucugcuuguucgugugugugucguugcaggccuuauucaagcuuaccauguucguguuccugguccuccugccccuggugagcucccagugcgugaaccucaccacccgcacgcagcugccgcccgccuacaccaacagcuucacccggggcgucuacuaccccgacaagguguuccgcuccagcgugcugcacuccacccaggaccucuuccugcccuucuucagcaacgucacgugguuccacgccauccacguguccgggaccaacggcaccaagcgguucgacaacccggugcugcccuucaacgacggggucuacuucgcgagcaccgagaaguccaacaucauccgcggcuggaucuucgggacgacccucgacagcaagacccagucccugcugaucgugaacaacgccaccaacguggucaucaaggugugcgaguuccaguucugcaacgaccccuuccucggcguguacuaccacaagaacaacaagagcuggauggaguccgaguuccgggucuacagcuccgccaacaacugcacguucgaguacgugagccagcccuuccugauggaccuggagggcaagcaggggaacuucaagaaccuccgcgaguucguguucaagaacaucgacggcuacuucaagaucuacuccaagcacaccccgaucaaccugguccgggaccugccccagggguucagcgugcucgagccccugguggaccugcccaucggcaucaacaucacccgcuuccagacccuccuggcccugcaccgguccuaccucacgccgggggacagcagcuccggcuggaccgccggcgcggccgccuacuacgucggguaccugcagccccgcaccuuccugcucaaguacaacgagaacggcaccaucacggacgccguggacugcgcgcuggacccccugagcgagaccaagugcacccucaaguccuucaccguggagaaggggaucuaccagacgagcaacuuccggguccagcccaccgaguccaucgugcgcuucccgaacaucaccaaccugugccccuucggcgaggucuucaacgccacccgguucgccagcguguacgccuggaaccgcaagcggaucuccaacugcguggccgacuacagcguccuguacaacuccgcgagcuucuccacguucaagugcuacggcgugagccccaccaagcucaacgaccugugcuucaccaacguguacgccgacuccuucgucauccgcggggacgaggugcggcagaucgcccccggccagaccgggaagaucgccgacuacaacuacaagcugccggacgacuucacgggcugcgugaucgccuggaacagcaacaaccucgacuccaaggucgggggcaacuacaacuaccuguaccgccuguuccgcaagagcaaccucaagcccuucgagcgggacaucuccaccgagaucuaccaggcgggcagcacccccugcaacgggguggagggcuucaacugcuacuucccccugcaguccuacggguuccagccgaccaacggcgugggguaccagcccuaccgggucguggugcugagcuucgagcuccugcacgcccccgccacggucugcggccccaagaaguccaccaaccuggugaagaacaagugcgugaacuucaacuucaacggccucaccgggaccggcguccugaccgagagcaacaagaaguuccugccguuccagcaguucgggcgcgacaucgccgacacgaccgacgccgugcgcgacccccagacccuggagauccucgacaucacccccugcagcuucggcgggguguccgucaucacgccgggcaccaacaccagcaaccagguggcggugcuguaccagggcgucaacugcaccgaggugcccguggccauccacgccgaccagcugacgcccaccuggcgggucuacuccaccgggagcaacguguuccagacccgcgccggcugccucaucggggccgagcacgugaacaacuccuacgagugcgacauccccaucggcgcgggcaucugcgccagcuaccagacgcagaccaacuccccgcggcgcgcccggagcgucgccucccagagcaucaucgcguacaccaugucccugggggccgagaacagcguggccuacuccaacaacagcaucgccauccccaccaacuucacgaucuccgugaccaccgagauccugcccgucagcaugaccaagacgagcguggacugcaccauguacaucugcggcgacuccaccgagugcagcaaccuccugcugcaguacggguccuucugcacccagcucaaccgcgcccugacgggcaucgcgguggagcaggacaagaacacccaggaggucuucgcccaggugaagcagaucuacaagacgcccccgaucaaggacuucgggggcuucaacuucagccagauccugcccgaccccuccaagcccagcaagcgguccuucaucgaggaccuccuguucaacaaggugacccuggccgacgccggcuucaucaagcaguacggggacugccucggcgacaucgccgcgcgcgaccugaucugcgcccagaaguucaacgggcugaccguccucccgccccugcugaccgacgagaugaucgcccaguacaccagcgcccuccuggccggcaccaucacguccggguggaccuucggcgcgggcgccgcccugcagauccccuucgccaugcagauggcguaccgguucaacgggaucggcgugacccagaacgugcucuacgagaaccagaagcugaucgccaaccaguucaacagcgccaucgggaagauccaggacucccugagcuccaccgccagcgcccucggcaagcugcaggacgucgugaaccagaacgcgcaggcccugaacacgcucgugaagcagcuguccagcaacuucggggccaucuccagcguccugaacgacauccucucccgccuggacccgcccgaggccgaggugcagaucgaccggcugaucaccggccgccuccagagccugcagaccuacgugacccagcagcugauccgggccgcggagauccgcgccagcgccaaccucgccgccaccaagauguccgagugcguccugggccagagcaagcggguggacuucugcgggaagggcuaccaccugauguccuucccccagagcgcgccccacgggguggucuuccuccacgugacguacguccccgcccaggagaagaacuucaccaccgccccggccaucugccacgacggcaaggcgcacuucccccgcgaggggguguucguguccaacggcacccacugguucgucacgcagcggaacuucuacgagccccagaucaucaccaccgacaacaccuucgugagcggcaacugcgacguggucaucgggaucgugaacaacacgguguacgacccccugcagccggagcuggacuccuucaaggaggagcucgacaaguacuucaagaaccacaccagccccgacgucgaccugggcgacaucuccgggaucaacgccagcguggugaacauccagaaggagaucgaccgccugaacgaggucgccaagaaccucaacgagucccugaucgaccugcaggagcucggcaaguacgagcaguacaucaaguggcccugguacaucuggcugggcuucaucgccgggcugaucgccaucgugauggugaccaucaugcucugcugcaugaccagcugcugcuccugccugaagggcugcugcagcugcggguccugcugcaaguucgacgaggacgacagcgagccgguccugaagggcgugaagcuccacuacacgugaggacuagucccuguucccagagcccacuuuuuuuucuuuuuuugaaauaaaauagccugucuuucagaucuaaaaaaaaaaaaaaaaaaaaaaaaaaaaaaaaaaaaaaaaaaaaaaaaaaaaaaaaaaaaaaaaaaaaaaaaaaaaaaaaaaaaaaaaaaaaaaaaaaaa

SEQ ID NO: 24858 - RNA, 4070 nt, Artificial Sequence
  SARS-CoV-2/Wuhan/WIV05/2019__EPI_ISL_402128 spike protein mRNA gc (1-1273)(K986P_V987P_N439K_D614G)
aggagagucccgcagucggcguccagcggcucugcuuguucgugugugugucguugcaggccuuauucaagcuuaccauguucguguuccugguccuccugccccuggugagcucccagugcgugaaccucaccacccgcacgcagcugccgcccgccuacaccaacagcuucacccggggcgucuacuaccccgacaagguguuccgcuccagcgugcugcacuccacccaggaccucuuccugcccuucuucagcaacgucacgugguuccacgccauccacguguccgggaccaacggcaccaagcgguucgacaacccggugcugcccuucaacgacggggucuacuucgcgagcaccgagaaguccaacaucauccgcggcuggaucuucgggacgacccucgacagcaagacccagucccugcugaucgugaacaacgccaccaacguggucaucaaggugugcgaguuccaguucugcaacgaccccuuccucggcguguacuaccacaagaacaacaagagcuggauggaguccgaguuccgggucuacagcuccgccaacaacugcacguucgaguacgugagccagcccuuccugauggaccuggagggcaagcaggggaacuucaagaaccuccgcgaguucguguucaagaacaucgacggcuacuucaagaucuacuccaagcacaccccgaucaaccugguccgggaccugccccagggguucagcgcccucgagccccugguggaccugcccaucggcaucaacaucacccgcuuccagacccuccuggcccugcaccgguccuaccucacgccgggggacagcagcuccggcuggaccgcgggcgccgccgccuacuacgugggguaccugcagccccgcaccuuccugcucaaguacaacgagaacggcaccaucacggacgcggucgacugcgcccuggacccccugagcgagaccaagugcacccucaaguccuucaccguggagaaggggaucuaccagacgagcaacuuccgggugcagcccaccgaguccaucguccgcuucccgaacaucaccaaccugugccccuucggcgagguguucaacgccacccgguucgccagcgucuacgccuggaaccgcaagcggaucuccaacugcguggcggacuacagcgugcuguacaacuccgccagcuucuccacguucaagugcuacggcgucagccccaccaagcucaacgaccugugcuucaccaacguguacgccgacuccuucgugauccgcggggacgagguccggcagaucgcccccggccagaccgggaagaucgccgacuacaacuacaagcugccggacgacuucacgggcugcgugaucgcguggaacagcaagaaccucgacuccaaggucgggggcaacuacaacuaccuguaccgccuguuccgcaagagcaaccucaagcccuucgagcgggacaucuccaccgagaucuaccaggccggcagcacccccugcaacgggguggagggcuucaacugcuacuucccccugcaguccuacggguuccagccgaccaacggcgugggguaccagcccuaccggguggucgugcugagcuucgagcuccugcacgcccccgccacggugugcggccccaagaaguccaccaaccuggucaagaacaagugcgugaacuucaacuucaacggccucaccgggaccggcgugcugaccgagagcaacaagaaguuccugccguuccagcaguucgggcgcgacaucgccgacacgaccgacgcgguccgcgacccccagacccuggagauccucgacaucacccccugcagcuucggcgggguguccgugaucacgccgggcaccaacaccagcaaccaggucgccgugcuguaccagggcgugaacugcaccgagguccccguggccauccacgccgaccagcugacgcccaccuggcggguguacuccaccgggagcaacgucuuccagacccgcgccggcugccucaucggggcggagcacgugaacaacuccuacgagugcgacauccccaucggcgccggcaucugcgccagcuaccagacgcagaccaacuccccgcggcgcgcccggagcguggcgucccagagcaucaucgccuacaccaugucccugggggccgagaacagcgucgccuacuccaacaacagcaucgccauccccaccaacuucacgaucuccgugaccaccgagauccugcccgugagcaugaccaagacgagcgucgacugcaccauguacaucugcggcgacuccaccgagugcagcaaccuccugcugcaguacggguccuucugcacccagcucaaccgcgcgcugacgggcaucgccguggagcaggacaagaacacccaggagguguucgcccaggucaagcagaucuacaagacgcccccgaucaaggacuucgggggcuucaacuucagccagauccugcccgaccccuccaagcccagcaagcgguccuucaucgaggaccuccuguucaacaaggugacccuggccgacgccggcuucaucaagcaguacggggacugccucggcgacaucgcggcccgcgaccugaucugcgcccagaaguucaacgggcugaccgugcucccgccccugcugaccgacgagaugaucgcccaguacaccagcgcccuccuggcgggcaccaucacguccggguggaccuucggcgccggcgccgcccugcagauccccuucgcgaugcagauggccuaccgguucaacgggaucggcgucacccagaacgugcucuacgagaaccagaagcugaucgccaaccaguucaacagcgccaucgggaagauccaggacucccugagcuccaccgccagcgcgcucggcaagcugcaggacguggucaaccagaacgcccaggcccugaacacgcucgugaagcagcuguccagcaacuucggggccaucuccagcgugcugaacgacauccucucccgccuggacccgcccgaggccgagguccagaucgaccggcugaucaccggccgccuccagagccugcagaccuacgugacccagcagcugauccgggcggccgagauccgcgccagcgccaaccucgccgcgaccaagauguccgagugcgugcugggccagagcaagcgggucgacuucugcgggaagggcuaccaccugauguccuucccccagagcgcgccccacggggugguguuccuccacgucacguacgugcccgcccaggagaagaacuucaccaccgccccggccaucugccacgacggcaaggcccacuucccccgcgagggggucuucguguccaacggcacccacugguucgugacgcagcggaacuucuacgagccccagaucaucaccaccgacaacaccuucgucagcggcaacugcgacguggugaucgggaucgucaacaacacgguguacgacccccugcagccggagcuggacuccuucaaggaggagcucgacaaguacuucaagaaccacaccagccccgacguggaccugggcgacaucuccgggaucaacgccagcgucgugaacauccagaaggagaucgaccgccugaacgagguggccaagaaccucaacgagucccugaucgaccugcaggagcucggcaaguacgagcaguacaucaaguggcccugguacaucuggcugggcuucaucgccgggcugaucgcgaucgucauggugaccaucaugcucugcugcaugaccagcugcugcuccugccugaagggcugcugcagcugcggguccugcugcaaguucgacgaggacgacagcgagccggugcugaagggcgucaagcuccacuacacgugaggacuagucccuguucccagagcccacuuuuuuuucuuuuuuugaaauaaaauagccugucuuucagaucuaaaaaaaaaaaaaaaaaaaaaaaaaaaaaaaaaaaaaaaaaaaaaaaaaaaaaaaaaaaaaaaaaaaaaaaaaaaaaaaaaaaaaaaaaaaaaaaaaaaa

SEQ ID NO: 24859 - RNA, 4070 nt, Artificial Sequence
  SARS-CoV-2/Wuhan/WIV05/2019__EPI_ISL_402128 spike protein mRNA gc (1-1273)(K986P_V987P_S477N_D614G)
aggagagucccgcagucggcguccagcggcucugcuuguucgugugugugucguugcaggccuuauucaagcuuaccauguucguguuccugguccuccugccccuggugagcucccagugcgugaaccucaccacccgcacgcagcugccgcccgccuacaccaacagcuucacccggggcgucuacuaccccgacaagguguuccgcuccagcgugcugcacuccacccaggaccucuuccugcccuucuucagcaacgucacgugguuccacgccauccacguguccgggaccaacggcaccaagcgguucgacaacccggugcugcccuucaacgacggggucuacuucgcgagcaccgagaaguccaacaucauccgcggcuggaucuucgggacgacccucgacagcaagacccagucccugcugaucgugaacaacgccaccaacguggucaucaaggugugcgaguuccaguucugcaacgaccccuuccucggcguguacuaccacaagaacaacaagagcuggauggaguccgaguuccgggucuacagcuccgccaacaacugcacguucgaguacgugagccagcccuuccugauggaccuggagggcaagcaggggaacuucaagaaccuccgcgaguucguguucaagaacaucgacggcuacuucaagaucuacuccaagcacaccccgaucaaccugguccgggaccugccccagggguucagcgcccucgagccccugguggaccugcccaucggcaucaacaucacccgcuuccagacccuccuggcccugcaccgguccuaccucacgccgggggacagcagcuccggcuggaccgcgggcgccgccgccuacuacgugggguaccugcagccccgcaccuuccugcucaaguacaacgagaacggcaccaucacggacgcggucgacugcgcccuggacccccugagcgagaccaagugcacccucaaguccuucaccguggagaaggggaucuaccagacgagcaacuuccgggugcagcccaccgaguccaucguccgcuucccgaacaucaccaaccugugccccuucggcgagguguucaacgccacccgguucgccagcgucuacgccuggaaccgcaagcggaucuccaacugcguggcggacuacagcgugcuguacaacuccgccagcuucuccacguucaagugcuacggcgucagccccaccaagcucaacgaccugugcuucaccaacguguacgccgacuccuucgugauccgcggggacgagguccggcagaucgcccccggccagaccgggaagaucgccgacuacaacuacaagcugccggacgacuucacgggcugcgugaucgcguggaacagcaacaaccucgacuccaaggucgggggcaacuacaacuaccuguaccgccuguuccgcaagagcaaccucaagcccuucgagcgggacaucuccaccgagaucuaccaggccggcaacacccccugcaacgggguggagggcuucaacugcuacuucccccugcagagcuacggguuccagccgaccaacggcgugggguaccagcccuaccggguggucgugcuguccuucgagcuccugcacgcccccgccacggugugcggccccaagaaguccaccaaccuggucaagaacaagugcgugaacuucaacuucaacggccucaccgggaccggcgugcugaccgagagcaacaagaaguuccugccguuccagcaguucgggcgcgacaucgccgacacgaccgacgcgguccgcgacccccagacccuggagauccucgacaucacccccugcagcuucggcggggugagcgugaucacgccgggcaccaacaccuccaaccaggucgccgugcuguaccagggcgugaacugcaccgagguccccguggccauccacgccgaccagcugacgcccaccuggcggguguacagcaccggguccaacgucuuccagacccgcgccggcugccucaucggggcggagcacgugaacaacagcuacgagugcgacauccccaucggcgccggcaucugcgccuccuaccagacgcagaccaacagcccgcggcgcgcccgguccguggcgagccaguccaucaucgccuacaccaugagccugggggccgagaacuccgucgccuacagcaacaacuccaucgccauccccaccaacuucacgaucagcgugaccaccgagauccugcccguguccaugaccaagacgagcgucgacugcaccauguacaucugcggcgacagcaccgagugcuccaaccuccugcugcaguacgggagcuucugcacccagcucaaccgcgcgcugacgggcaucgccguggagcaggacaagaacacccaggagguguucgcccaggucaagcagaucuacaagacgcccccgaucaaggacuucgggggcuucaacuucucccagauccugcccgaccccagcaagcccuccaagcggagcuucaucgaggaccuccuguucaacaaggugacccuggccgacgccggcuucaucaagcaguacggggacugccucggcgacaucgcggcccgcgaccugaucugcgcccagaaguucaacgggcugaccgugcucccgccccugcugaccgacgagaugaucgcccaguacaccuccgcccuccuggcgggcaccaucacgagcggguggaccuucggcgccggcgccgcccugcagauccccuucgcgaugcagauggccuaccgguucaacgggaucggcgucacccagaacgugcucuacgagaaccagaagcugaucgccaaccaguucaacuccgccaucgggaagauccaggacagccuguccagcaccgccuccgcgcucggcaagcugcaggacguggucaaccagaacgcccaggcccugaacacgcucgugaagcagcugagcuccaacuucggggccaucagcuccgugcugaacgacauccucagccgccuggacccgcccgaggccgagguccagaucgaccggcugaucaccggccgccuccagucccugcagaccuacgugacccagcagcugauccgggcggccgagauccgcgccagcgccaaccucgccgcgaccaagaugagcgagugcgugcugggccaguccaagcgggucgacuucugcgggaagggcuaccaccugaugagcuucccccaguccgcgccccacggggugguguuccuccacgucacguacgugcccgcccaggagaagaacuucaccaccgccccggccaucugccacgacggcaaggcccacuucccccgcgagggggucuucgugagcaacggcacccacugguucgugacgcagcggaacuucuacgagccccagaucaucaccaccgacaacaccuucgucuccggcaacugcgacguggugaucgggaucgucaacaacacgguguacgacccccugcagccggagcuggacagcuucaaggaggagcucgacaaguacuucaagaaccacaccucccccgacguggaccugggcgacaucagcgggaucaacgccuccgucgugaacauccagaaggagaucgaccgccugaacgagguggccaagaaccucaacgagagccugaucgaccugcaggagcucggcaaguacgagcaguacaucaaguggcccugguacaucuggcugggcuucaucgccgggcugaucgcgaucgucauggugaccaucaugcucugcugcaugaccuccugcugcagcugccugaagggcugcugcuccugcgggagcugcugcaaguucgacgaggacgacuccgagccggugcugaagggcgucaagcuccacuacacgugaggacuagucccuguucccagagcccacuuuuuuuucuuuuuuugaaauaaaauagccugucuuucagaucuaaaaaaaaaaaaaaaaaaaaaaaaaaaaaaaaaaaaaaaaaaaaaaaaaaaaaaaaaaaaaaaaaaaaaaaaaaaaaaaaaaaaaaaaaaaaaaaaaaaa

SEQ ID NO: 24860 - RNA, 4070 nt, Artificial Sequence
  SARS-CoV-2/Wuhan/WIV05/2019__EPI_ISL_402128 spike protein mRNA gc (1-1273)(K986P_V987P_N501Y_D614G)
aggagagucccgcagucggcguccagcggcucugcuuguucgugugugugucguugcaggccuuauucaagcuuaccauguucguguuccugguccuccugccccuggugagcucccagugcgugaaccucaccacccgcacgcagcugccgcccgccuacaccaacagcuucacccggggcgucuacuaccccgacaagguguuccgcuccagcgugcugcacuccacccaggaccucuuccugcccuucuucagcaacgucacgugguuccacgccauccacguguccgggaccaacggcaccaagcgguucgacaacccggugcugcccuucaacgacggggucuacuucgcgagcaccgagaaguccaacaucauccgcggcuggaucuucgggacgacccucgacagcaagacccagucccugcugaucgugaacaacgccaccaacguggucaucaaggugugcgaguuccaguucugcaacgaccccuuccucggcguguacuaccacaagaacaacaagagcuggauggaguccgaguuccgggucuacagcuccgccaacaacugcacguucgaguacgugagccagcccuuccugauggaccuggagggcaagcaggggaacuucaagaaccuccgcgaguucguguucaagaacaucgacggcuacuucaagaucuacuccaagcacaccccgaucaaccugguccgggaccugccccagggguucagcgcccucgagccccugguggaccugcccaucggcaucaacaucacccgcuuccagacccuccuggcccugcaccgguccuaccucacgccgggggacagcagcuccggcuggaccgcgggcgccgccgccuacuacgugggguaccugcagccccgcaccuuccugcucaaguacaacgagaacggcaccaucacggacgcggucgacugcgcccuggacccccugagcgagaccaagugcacccucaaguccuucaccguggagaaggggaucuaccagacgagcaacuuccgggugcagcccaccgaguccaucguccgcuucccgaacaucaccaaccugugccccuucggcgagguguucaacgccacccgguucgccagcgucuacgccuggaaccgcaagcggaucuccaacugcguggcggacuacagcgugcuguacaacuccgccagcuucuccacguucaagugcuacggcgucagccccaccaagcucaacgaccugugcuucaccaacguguacgccgacuccuucgugauccgcggggacgagguccggcagaucgcccccggccagaccgggaagaucgccgacuacaacuacaagcugccggacgacuucacgggcugcgugaucgcguggaacagcaacaaccucgacuccaaggucgggggcaacuacaacuaccuguaccgccuguuccgcaagagcaaccucaagcccuucgagcgggacaucuccaccgagaucuaccaggccggcagcacccccugcaacgggguggagggcuucaacugcuacuucccccugcaguccuacggguuccagccgaccuacggcgugggguaccagcccuaccggguggucgugcugagcuucgagcuccugcacgcccccgccacggugugcggccccaagaaguccaccaaccuggucaagaacaagugcgugaacuucaacuucaacggccucaccgggaccggcgugcugaccgagagcaacaagaaguuccugccguuccagcaguucgggcgcgacaucgccgacacgaccgacgcgguccgcgacccccagacccuggagauccucgacaucacccccugcagcuucggcgggguguccgugaucacgccgggcaccaacaccagcaaccaggucgccgugcuguaccagggcgugaacugcaccgagguccccguggccauccacgccgaccagcugacgcccaccuggcggguguacuccaccgggagcaacgucuuccagacccgcgccggcugccucaucggggcggagcacgugaacaacuccuacgagugcgacauccccaucggcgccggcaucugcgccagcuaccagacgcagaccaacuccccgcggcgcgcccggagcguggcgucccagagcaucaucgccuacaccaugucccugggggccgagaacagcgucgccuacuccaacaacagcaucgccauccccaccaacuucacgaucuccgugaccaccgagauccugcccgugagcaugaccaagacgagcgucgacugcaccauguacaucugcggcgacuccaccgagugcagcaaccuccugcugcaguacggguccuucugcacccagcucaaccgcgcgcugacgggcaucgccguggagcaggacaagaacacccaggagguguucgcccaggucaagcagaucuacaagacgcccccgaucaaggacuucgggggcuucaacuucagccagauccugcccgaccccuccaagcccagcaagcgguccuucaucgaggaccuccuguucaacaaggugacccuggccgacgccggcuucaucaagcaguacggggacugccucggcgacaucgcggcccgcgaccugaucugcgcccagaaguucaacgggcugaccgugcucccgccccugcugaccgacgagaugaucgcccaguacaccagcgcccuccuggcgggcaccaucacguccggguggaccuucggcgccggcgccgcccugcagauccccuucgcgaugcagauggccuaccgguucaacgggaucggcgucacccagaacgugcucuacgagaaccagaagcugaucgccaaccaguucaacagcgccaucgggaagauccaggacucccugagcuccaccgccagcgcgcucggcaagcugcaggacguggucaaccagaacgcccaggcccugaacacgcucgugaagcagcuguccagcaacuucggggccaucuccagcgugcugaacgacauccucucccgccuggacccgcccgaggccgagguccagaucgaccggcugaucaccggccgccuccagagccugcagaccuacgugacccagcagcugauccgggcggccgagauccgcgccagcgccaaccucgccgcgaccaagauguccgagugcgugcugggccagagcaagcgggucgacuucugcgggaagggcuaccaccugauguccuucccccagagcgcgccccacggggugguguuccuccacgucacguacgugcccgcccaggagaagaacuucaccaccgccccggccaucugccacgacggcaaggcccacuucccccgcgagggggucuucguguccaacggcacccacugguucgugacgcagcggaacuucuacgagccccagaucaucaccaccgacaacaccuucgucagcggcaacugcgacguggugaucgggaucgucaacaacacgguguacgacccccugcagccggagcuggacuccuucaaggaggagcucgacaaguacuucaagaaccacaccagccccgacguggaccugggcgacaucuccgggaucaacgccagcgucgugaacauccagaaggagaucgaccgccugaacgagguggccaagaaccucaacgagucccugaucgaccugcaggagcucggcaaguacgagcaguacaucaaguggcccugguacaucuggcugggcuucaucgccgggcugaucgcgaucgucauggugaccaucaugcucugcugcaugaccagcugcugcuccugccugaagggcugcugcagcugcggguccugcugcaaguucgacgaggacgacagcgagccggugcugaagggcgucaagcuccacuacacgugaggacuagucccuguucccagagcccacuuuuuuuucuuuuuuugaaauaaaauagccugucuuucagaucuaaaaaaaaaaaaaaaaaaaaaaaaaaaaaaaaaaaaaaaaaaaaaaaaaaaaaaaaaaaaaaaaaaaaaaaaaaaaaaaaaaaaaaaaaaaaaaaaaaaa

SEQ ID NO: 24861 - RNA, 4064 nt, Artificial Sequence
  SARS-CoV-2/Wuhan/WIV05/2019__EPI_ISL_402128 spike protein mRNA gc (1-1273)(K986P_V987P_H69del_V70del_D614G)
aggagagucccgcagucggcguccagcggcucugcuuguucgugugugugucguugcaggccuuauucaagcuuaccauguucguguuccugguccuccugccccuggugagcucccagugcgugaaccucaccacccgcacgcagcugccgcccgccuacaccaacagcuucacccggggcgucuacuaccccgacaagguguuccgcuccagcgugcugcacuccacccaggaccucuuccugcccuucuucagcaacgucacgugguuccacgccaucuccgggaccaacggcaccaagcgguucgacaacccggugcugcccuucaacgacgggguguacuucgcgagcaccgagaaguccaacaucauccgcggcuggaucuucgggacgacccucgacagcaagacccagucccugcugaucgucaacaacgccaccaacguggugaucaaggucugcgaguuccaguucugcaacgaccccuuccucggcguguacuaccacaagaacaacaagagcuggauggaguccgaguuccggguguacagcuccgccaacaacugcacguucgaguacgucagccagcccuuccugauggaccuggagggcaagcaggggaacuucaagaaccuccgcgaguucguguucaagaacaucgacggcuacuucaagaucuacuccaagcacaccccgaucaaccuggugcgggaccugccccagggguucagcgcccucgagccccuggucgaccugcccaucggcaucaacaucacccgcuuccagacccuccuggcccugcaccgguccuaccucacgccgggggacagcagcuccggcuggaccgcgggcgccgccgccuacuacgugggguaccugcagccccgcaccuuccugcucaaguacaacgagaacggcaccaucacggacgcgguggacugcgcccuggacccccugagcgagaccaagugcacccucaaguccuucaccgucgagaaggggaucuaccagacgagcaacuuccgggugcagcccaccgaguccaucgugcgcuucccgaacaucaccaaccugugccccuucggcgaggucuucaacgccacccgguucgccagcguguacgccuggaaccgcaagcggaucuccaacugcgucgcggacuacagcgugcuguacaacuccgccagcuucuccacguucaagugcuacggcgugagccccaccaagcucaacgaccugugcuucaccaacgucuacgccgacuccuucgugauccgcggggacgaggugcggcagaucgcccccggccagaccgggaagaucgccgacuacaacuacaagcugccggacgacuucacgggcugcgucaucgcguggaacagcaacaaccucgacuccaaggucgggggcaacuacaacuaccuguaccgccuguuccgcaagagcaaccucaagcccuucgagcgggacaucuccaccgagaucuaccaggccggcagcacccccugcaacgggguggagggcuucaacugcuacuucccccugcaguccuacggguuccagccgaccaacggcgugggguaccagcccuaccggguggugguccugagcuucgagcuccugcacgcccccgccacggugugcggccccaagaaguccaccaaccuggugaagaacaagugcgucaacuucaacuucaacggccucaccgggaccggcgugcugaccgagagcaacaagaaguuccugccguuccagcaguucgggcgcgacaucgccgacacgaccgacgcggugcgcgacccccagacccuggagauccucgacaucacccccugcagcuucggcggggucuccgugaucacgccgggcaccaacaccagcaaccagguggccguccuguaccagggcgugaacugcaccgaggugcccgucgccauccacgccgaccagcugacgcccaccuggcggguguacuccaccgggagcaacguguuccagacccgcgccggcugccucaucggggcggagcacgucaacaacuccuacgagugcgacauccccaucggcgccggcaucugcgccagcuaccagacgcagaccaacuccccgcggcgcgcccggagcguggcgucccagagcaucaucgccuacaccaugucccugggggccgagaacagcguggccuacuccaacaacagcaucgccauccccaccaacuucacgaucuccgucaccaccgagauccugcccgugagcaugaccaagacgagcguggacugcaccauguacaucugcggcgacuccaccgagugcagcaaccuccugcugcaguacggguccuucugcacccagcucaaccgcgcgcugacgggcaucgccgucgagcaggacaagaacacccaggagguguucgcccaggugaagcagaucuacaagacgcccccgaucaaggacuucgggggcuucaacuucagccagauccugcccgaccccuccaagcccagcaagcgguccuucaucgaggaccuccuguucaacaaggucacccuggccgacgccggcuucaucaagcaguacggggacugccucggcgacaucgcggcccgcgaccugaucugcgcccagaaguucaacgggcugaccgugcucccgccccugcugaccgacgagaugaucgcccaguacaccagcgcccuccuggcgggcaccaucacguccggguggaccuucggcgccggcgccgcccugcagauccccuucgcgaugcagauggccuaccgguucaacgggaucggcgugacccagaacguccucuacgagaaccagaagcugaucgccaaccaguucaacagcgccaucgggaagauccaggacucccugagcuccaccgccagcgcgcucggcaagcugcaggacguggugaaccagaacgcccaggcccugaacacgcucgucaagcagcuguccagcaacuucggggccaucuccagcgugcugaacgacauccucucccgccuggacccgcccgaggccgaggugcagaucgaccggcugaucaccggccgccuccagagccugcagaccuacgucacccagcagcugauccgggcggccgagauccgcgccagcgccaaccucgccgcgaccaagauguccgagugcgugcugggccagagcaagcggguggacuucugcgggaagggcuaccaccugauguccuucccccagagcgcgccccacggggucguguuccuccacgugacguacguccccgcccaggagaagaacuucaccaccgccccggccaucugccacgacggcaaggcccacuucccccgcgaggggguguucgucuccaacggcacccacugguucgugacgcagcggaacuucuacgagccccagaucaucaccaccgacaacaccuucgugagcggcaacugcgacgucgugaucgggaucgugaacaacacggucuacgacccccugcagccggagcuggacuccuucaaggaggagcucgacaaguacuucaagaaccacaccagccccgacguggaccugggcgacaucuccgggaucaacgccagcguggucaacauccagaaggagaucgaccgccugaacgagguggccaagaaccucaacgagucccugaucgaccugcaggagcucggcaaguacgagcaguacaucaaguggcccugguacaucuggcugggcuucaucgccgggcugaucgcgaucgugauggucaccaucaugcucugcugcaugaccagcugcugcuccugccugaagggcugcugcagcugcggguccugcugcaaguucgacgaggacgacagcgagccggugcugaagggcgugaagcuccacuacacgugaggacuagucccuguucccagagcccacuuuuuuuucuuuuuuugaaauaaaauagccugucuuucagaucuaaaaaaaaaaaaaaaaaaaaaaaaaaaaaaaaaaaaaaaaaaaaaaaaaaaaaaaaaaaaaaaaaaaaaaaaaaaaaaaaaaaaaaaaaaaaaaaaaaaa

SEQ ID NO: 24862 - RNA, 4070 nt, Artificial Sequence
  SARS-CoV-2/Wuhan/WIV05/2019__EPI_ISL_402128 spike protein mRNA gc (1-1273)(K986P_V987P_Y453F_D614G)
aggagagucccgcagucggcguccagcggcucugcuuguucgugugugugucguugcaggccuuauucaagcuuaccauguucguguuccugguccuccugccccuggugagcucccagugcgugaaccucaccacccgcacgcagcugccgcccgccuacaccaacagcuucacccggggcgucuacuaccccgacaagguguuccgcuccagcgugcugcacuccacccaggaccucuuccugcccuucuucagcaacgucacgugguuccacgccauccacguguccgggaccaacggcaccaagcgguucgacaacccggugcugcccuucaacgacggggucuacuucgcgagcaccgagaaguccaacaucauccgcggcuggaucuucgggacgacccucgacagcaagacccagucccugcugaucgugaacaacgccaccaacguggucaucaaggugugcgaguuccaguucugcaacgaccccuuccucggcguguacuaccacaagaacaacaagagcuggauggaguccgaguuccgggucuacagcuccgccaacaacugcacguucgaguacgugagccagcccuuccugauggaccuggagggcaagcaggggaacuucaagaaccuccgcgaguucguguucaagaacaucgacggcuacuucaagaucuacuccaagcacaccccgaucaaccugguccgggaccugccccagggguucagcgcccucgagccccugguggaccugcccaucggcaucaacaucacccgcuuccagacccuccuggcccugcaccgguccuaccucacgccgggggacagcagcuccggcuggaccgcgggcgccgccgccuacuacgugggguaccugcagccccgcaccuuccugcucaaguacaacgagaacggcaccaucacggacgcggucgacugcgcccuggacccccugagcgagaccaagugcacccucaaguccuucaccguggagaaggggaucuaccagacgagcaacuuccgggugcagcccaccgaguccaucguccgcuucccgaacaucaccaaccugugccccuucggcgagguguucaacgccacccgguucgccagcgucuacgccuggaaccgcaagcggaucuccaacugcguggcggacuacagcgugcuguacaacuccgccagcuucuccacguucaagugcuacggcgucagccccaccaagcucaacgaccugugcuucaccaacguguacgccgacuccuucgugauccgcggggacgagguccggcagaucgcccccggccagaccgggaagaucgccgacuacaacuacaagcugccggacgacuucacgggcugcgugaucgcguggaacagcaacaaccucgacuccaaggucgggggcaacuacaacuaccuguuccgccuguuccgcaagagcaaccucaagcccuucgagcgggacaucuccaccgagaucuaccaggccggcagcacccccugcaacgggguggagggcuucaacugcuacuucccccugcaguccuacggguuccagccgaccaacggcgugggguaccagcccuaccggguggucgugcugagcuucgagcuccugcacgcccccgccacggugugcggccccaagaaguccaccaaccuggucaagaacaagugcgugaacuucaacuucaacggccucaccgggaccggcgugcugaccgagagcaacaagaaguuccugccguuccagcaguucgggcgcgacaucgccgacacgaccgacgcgguccgcgacccccagacccuggagauccucgacaucacccccugcagcuucggcgggguguccgugaucacgccgggcaccaacaccagcaaccaggucgccgugcuguaccagggcgugaacugcaccgagguccccguggccauccacgccgaccagcugacgcccaccuggcggguguacuccaccgggagcaacgucuuccagacccgcgccggcugccucaucggggcggagcacgugaacaacuccuacgagugcgacauccccaucggcgccggcaucugcgccagcuaccagacgcagaccaacuccccgcggcgcgcccggagcguggcgucccagagcaucaucgccuacaccaugucccugggggccgagaacagcgucgccuacuccaacaacagcaucgccauccccaccaacuucacgaucuccgugaccaccgagauccugcccgugagcaugaccaagacgagcgucgacugcaccauguacaucugcggcgacuccaccgagugcagcaaccuccugcugcaguacggguccuucugcacccagcucaaccgcgcgcugacgggcaucgccguggagcaggacaagaacacccaggagguguucgcccaggucaagcagaucuacaagacgcccccgaucaaggacuucgggggcuucaacuucagccagauccugcccgaccccuccaagcccagcaagcgguccuucaucgaggaccuccuguucaacaaggugacccuggccgacgccggcuucaucaagcaguacggggacugccucggcgacaucgcggcccgcgaccugaucugcgcccagaaguucaacgggcugaccgugcucccgccccugcugaccgacgagaugaucgcccaguacaccagcgcccuccuggcgggcaccaucacguccggguggaccuucggcgccggcgccgcccugcagauccccuucgcgaugcagauggccuaccgguucaacgggaucggcgucacccagaacgugcucuacgagaaccagaagcugaucgccaaccaguucaacagcgccaucgggaagauccaggacucccugagcuccaccgccagcgcgcucggcaagcugcaggacguggucaaccagaacgcccaggcccugaacacgcucgugaagcagcuguccagcaacuucggggccaucuccagcgugcugaacgacauccucucccgccuggacccgcccgaggccgagguccagaucgaccggcugaucaccggccgccuccagagccugcagaccuacgugacccagcagcugauccgggcggccgagauccgcgccagcgccaaccucgccgcgaccaagauguccgagugcgugcugggccagagcaagcgggucgacuucugcgggaagggcuaccaccugauguccuucccccagagcgcgccccacggggugguguuccuccacgucacguacgugcccgcccaggagaagaacuucaccaccgccccggccaucugccacgacggcaaggcccacuucccccgcgagggggucuucguguccaacggcacccacugguucgugacgcagcggaacuucuacgagccccagaucaucaccaccgacaacaccuucgucagcggcaacugcgacguggugaucgggaucgucaacaacacgguguacgacccccugcagccggagcuggacuccuucaaggaggagcucgacaaguacuucaagaaccacaccagccccgacguggaccugggcgacaucuccgggaucaacgccagcgucgugaacauccagaaggagaucgaccgccugaacgagguggccaagaaccucaacgagucccugaucgaccugcaggagcucggcaaguacgagcaguacaucaaguggcccugguacaucuggcugggcuucaucgccgggcugaucgcgaucgucauggugaccaucaugcucugcugcaugaccagcugcugcuccugccugaagggcugcugcagcugcggguccugcugcaaguucgacgaggacgacagcgagccggugcugaagggcgucaagcuccacuacacgugaggacuagucccuguucccagagcccacuuuuuuuucuuuuuuugaaauaaaauagccugucuuucagaucuaaaaaaaaaaaaaaaaaaaaaaaaaaaaaaaaaaaaaaaaaaaaaaaaaaaaaaaaaaaaaaaaaaaaaaaaaaaaaaaaaaaaaaaaaaaaaaaaaaaa

SEQ ID NO: 24863 - RNA, 4070 nt, Artificial Sequence
  SARS-CoV-2/Wuhan/WIV05/2019__EPI_ISL_402128 spike protein mRNA gc (1-1273)(K986P_V987P_D614G_I692V)
aggagagucccgcagucggcguccagcggcucugcuuguucgugugugugucguugcaggccuuauucaagcuuaccauguucguguuccugguccuccugccccuggugagcucccagugcgugaaccucaccacccgcacgcagcugccgcccgccuacaccaacagcuucacccggggcgucuacuaccccgacaagguguuccgcuccagcgugcugcacuccacccaggaccucuuccugcccuucuucagcaacgucacgugguuccacgccauccacguguccgggaccaacggcaccaagcgguucgacaacccggugcugcccuucaacgacggggucuacuucgcgagcaccgagaaguccaacaucauccgcggcuggaucuucgggacgacccucgacagcaagacccagucccugcugaucgugaacaacgccaccaacguggucaucaaggugugcgaguuccaguucugcaacgaccccuuccucggcguguacuaccacaagaacaacaagagcuggauggaguccgaguuccgggucuacagcuccgccaacaacugcacguucgaguacgugagccagcccuuccugauggaccuggagggcaagcaggggaacuucaagaaccuccgcgaguucguguucaagaacaucgacggcuacuucaagaucuacuccaagcacaccccgaucaaccugguccgggaccugccccagggguucagcgcccucgagccccugguggaccugcccaucggcaucaacaucacccgcuuccagacccuccuggcccugcaccgguccuaccucacgccgggggacagcagcuccggcuggaccgcgggcgccgccgccuacuacgugggguaccugcagccccgcaccuuccugcucaaguacaacgagaacggcaccaucacggacgcggucgacugcgcccuggacccccugagcgagaccaagugcacccucaaguccuucaccguggagaaggggaucuaccagacgagcaacuuccgggugcagcccaccgaguccaucguccgcuucccgaacaucaccaaccugugccccuucggcgagguguucaacgccacccgguucgccagcgucuacgccuggaaccgcaagcggaucuccaacugcguggcggacuacagcgugcuguacaacuccgccagcuucuccacguucaagugcuacggcgucagccccaccaagcucaacgaccugugcuucaccaacguguacgccgacuccuucgugauccgcggggacgagguccggcagaucgcccccggccagaccgggaagaucgccgacuacaacuacaagcugccggacgacuucacgggcugcgugaucgcguggaacagcaacaaccucgacuccaaggucgggggcaacuacaacuaccuguaccgccuguuccgcaagagcaaccucaagcccuucgagcgggacaucuccaccgagaucuaccaggccggcagcacccccugcaacgggguggagggcuucaacugcuacuucccccugcaguccuacggguuccagccgaccaacggcgugggguaccagcccuaccggguggucgugcugagcuucgagcuccugcacgcccccgccacggugugcggccccaagaaguccaccaaccuggucaagaacaagugcgugaacuucaacuucaacggccucaccgggaccggcgugcugaccgagagcaacaagaaguuccugccguuccagcaguucgggcgcgacaucgccgacacgaccgacgcgguccgcgacccccagacccuggagauccucgacaucacccccugcagcuucggcgggguguccgugaucacgccgggcaccaacaccagcaaccaggucgccgugcuguaccagggcgugaacugcaccgagguccccguggccauccacgccgaccagcugacgcccaccuggcggguguacuccaccgggagcaacgucuuccagacccgcgccggcugccucaucggggcggagcacgugaacaacuccuacgagugcgacauccccaucggcgccggcaucugcgccagcuaccagacgcagaccaacuccccgcggcgcgcccggagcguggcgucccagagcgucaucgccuacaccaugucccugggggccgagaacagcguggccuacuccaacaacagcaucgccauccccaccaacuucacgaucuccgugaccaccgagauccugcccgucagcaugaccaagacgagcguggacugcaccauguacaucugcggcgacuccaccgagugcagcaaccuccugcugcaguacggguccuucugcacccagcucaaccgcgcgcugacgggcaucgccguggagcaggacaagaacacccaggaggucuucgcccaggugaagcagaucuacaagacgcccccgaucaaggacuucgggggcuucaacuucagccagauccugcccgaccccuccaagcccagcaagcgguccuucaucgaggaccuccuguucaacaaggugacccuggccgacgccggcuucaucaagcaguacggggacugccucggcgacaucgcggcccgcgaccugaucugcgcccagaaguucaacgggcugaccguccucccgccccugcugaccgacgagaugaucgcccaguacaccagcgcccuccuggcgggcaccaucacguccggguggaccuucggcgccggcgccgcccugcagauccccuucgcgaugcagauggccuaccgguucaacgggaucggcgugacccagaacgugcucuacgagaaccagaagcugaucgccaaccaguucaacagcgccaucgggaagauccaggacucccugagcuccaccgccagcgcgcucggcaagcugcaggacgucgugaaccagaacgcccaggcccugaacacgcucgugaagcagcuguccagcaacuucggggccaucuccagcguccugaacgacauccucucccgccuggacccgcccgaggccgaggugcagaucgaccggcugaucaccggccgccuccagagccugcagaccuacgugacccagcagcugauccgggcggccgagauccgcgccagcgccaaccucgccgcgaccaagauguccgagugcguccugggccagagcaagcggguggacuucugcgggaagggcuaccaccugauguccuucccccagagcgcgccccacgggguggucuuccuccacgugacguacguccccgcccaggagaagaacuucaccaccgccccggccaucugccacgacggcaaggcccacuucccccgcgaggggguguucguguccaacggcacccacugguucgucacgcagcggaacuucuacgagccccagaucaucaccaccgacaacaccuucgugagcggcaacugcgacguggucaucgggaucgugaacaacacgguguacgacccccugcagccggagcuggacuccuucaaggaggagcucgacaaguacuucaagaaccacaccagccccgacgucgaccugggcgacaucuccgggaucaacgccagcguggugaacauccagaaggagaucgaccgccugaacgaggucgccaagaaccucaacgagucccugaucgaccugcaggagcucggcaaguacgagcaguacaucaaguggcccugguacaucuggcugggcuucaucgccgggcugaucgcgaucgugauggugaccaucaugcucugcugcaugaccagcugcugcuccugccugaagggcugcugcagcugcggguccugcugcaaguucgacgaggacgacagcgagccgguccugaagggcgugaagcuccacuacacgugaggacuagucccuguucccagagcccacuuuuuuuucuuuuuuugaaauaaaauagccugucuuucagaucuaaaaaaaaaaaaaaaaaaaaaaaaaaaaaaaaaaaaaaaaaaaaaaaaaaaaaaaaaaaaaaaaaaaaaaaaaaaaaaaaaaaaaaaaaaaaaaaaaaaa

SEQ ID NO: 24864 - RNA, 4070 nt, Artificial Sequence
  SARS-CoV-2/Wuhan/WIV05/2019__EPI_ISL_402128 spike protein mRNA gc (1-1273)(K986P_V987P_D614G_M1229I)
aggagagucccgcagucggcguccagcggcucugcuuguucgugugugugucguugcaggccuuauucaagcuuaccauguucguguuccugguccuccugccccuggugagcucccagugcgugaaccucaccacccgcacgcagcugccgcccgccuacaccaacagcuucacccggggcgucuacuaccccgacaagguguuccgcuccagcgugcugcacuccacccaggaccucuuccugcccuucuucagcaacgucacgugguuccacgccauccacguguccgggaccaacggcaccaagcgguucgacaacccggugcugcccuucaacgacggggucuacuucgcgagcaccgagaaguccaacaucauccgcggcuggaucuucgggacgacccucgacagcaagacccagucccugcugaucgugaacaacgccaccaacguggucaucaaggugugcgaguuccaguucugcaacgaccccuuccucggcguguacuaccacaagaacaacaagagcuggauggaguccgaguuccgggucuacagcuccgccaacaacugcacguucgaguacgugagccagcccuuccugauggaccuggagggcaagcaggggaacuucaagaaccuccgcgaguucguguucaagaacaucgacggcuacuucaagaucuacuccaagcacaccccgaucaaccugguccgggaccugccccagggguucagcgcccucgagccccugguggaccugcccaucggcaucaacaucacccgcuuccagacccuccuggcccugcaccgguccuaccucacgccgggggacagcagcuccggcuggaccgcgggcgccgccgccuacuacgugggguaccugcagccccgcaccuuccugcucaaguacaacgagaacggcaccaucacggacgcggucgacugcgcccuggacccccugagcgagaccaagugcacccucaaguccuucaccguggagaaggggaucuaccagacgagcaacuuccgggugcagcccaccgaguccaucguccgcuucccgaacaucaccaaccugugccccuucggcgagguguucaacgccacccgguucgccagcgucuacgccuggaaccgcaagcggaucuccaacugcguggcggacuacagcgugcuguacaacuccgccagcuucuccacguucaagugcuacggcgucagccccaccaagcucaacgaccugugcuucaccaacguguacgccgacuccuucgugauccgcggggacgagguccggcagaucgcccccggccagaccgggaagaucgccgacuacaacuacaagcugccggacgacuucacgggcugcgugaucgcguggaacagcaacaaccucgacuccaaggucgggggcaacuacaacuaccuguaccgccuguuccgcaagagcaaccucaagcccuucgagcgggacaucuccaccgagaucuaccaggccggcagcacccccugcaacgggguggagggcuucaacugcuacuucccccugcaguccuacggguuccagccgaccaacggcgugggguaccagcccuaccggguggucgugcugagcuucgagcuccugcacgcccccgccacggugugcggccccaagaaguccaccaaccuggucaagaacaagugcgugaacuucaacuucaacggccucaccgggaccggcgugcugaccgagagcaacaagaaguuccugccguuccagcaguucgggcgcgacaucgccgacacgaccgacgcgguccgcgacccccagacccuggagauccucgacaucacccccugcagcuucggcgggguguccgugaucacgccgggcaccaacaccagcaaccaggucgccgugcuguaccagggcgugaacugcaccgagguccccguggccauccacgccgaccagcugacgcccaccuggcggguguacuccaccgggagcaacgucuuccagacccgcgccggcugccucaucggggcggagcacgugaacaacuccuacgagugcgacauccccaucggcgccggcaucugcgccagcuaccagacgcagaccaacuccccgcggcgcgcccggagcguggcgucccagagcaucaucgccuacaccaugucccugggggccgagaacagcgucgccuacuccaacaacagcaucgccauccccaccaacuucacgaucuccgugaccaccgagauccugcccgugagcaugaccaagacgagcgucgacugcaccauguacaucugcggcgacuccaccgagugcagcaaccuccugcugcaguacggguccuucugcacccagcucaaccgcgcgcugacgggcaucgccguggagcaggacaagaacacccaggagguguucgcccaggucaagcagaucuacaagacgcccccgaucaaggacuucgggggcuucaacuucagccagauccugcccgaccccuccaagcccagcaagcgguccuucaucgaggaccuccuguucaacaaggugacccuggccgacgccggcuucaucaagcaguacggggacugccucggcgacaucgcggcccgcgaccugaucugcgcccagaaguucaacgggcugaccgugcucccgccccugcugaccgacgagaugaucgcccaguacaccagcgcccuccuggcgggcaccaucacguccggguggaccuucggcgccggcgccgcccugcagauccccuucgcgaugcagauggccuaccgguucaacgggaucggcgucacccagaacgugcucuacgagaaccagaagcugaucgccaaccaguucaacagcgccaucgggaagauccaggacucccugagcuccaccgccagcgcgcucggcaagcugcaggacguggucaaccagaacgcccaggcccugaacacgcucgugaagcagcuguccagcaacuucggggccaucuccagcgugcugaacgacauccucucccgccuggacccgcccgaggccgagguccagaucgaccggcugaucaccggccgccuccagagccugcagaccuacgugacccagcagcugauccgggcggccgagauccgcgccagcgccaaccucgccgcgaccaagauguccgagugcgugcugggccagagcaagcgggucgacuucugcgggaagggcuaccaccugauguccuucccccagagcgcgccccacggggugguguuccuccacgucacguacgugcccgcccaggagaagaacuucaccaccgccccggccaucugccacgacggcaaggcccacuucccccgcgagggggucuucguguccaacggcacccacugguucgugacgcagcggaacuucuacgagccccagaucaucaccaccgacaacaccuucgucagcggcaacugcgacguggugaucgggaucgucaacaacacgguguacgacccccugcagccggagcuggacuccuucaaggaggagcucgacaaguacuucaagaaccacaccagccccgacguggaccugggcgacaucuccgggaucaacgccagcgucgugaacauccagaaggagaucgaccgccugaacgagguggccaagaaccucaacgagucccugaucgaccugcaggagcucggcaaguacgagcaguacaucaaguggcccugguacaucuggcugggcuucaucgccgggcugaucgcgaucgucaucgugaccaucaugcucugcugcaugaccagcugcugcuccugccugaagggcugcugcagcugcggguccugcugcaaguucgacgaggacgacagcgagccggugcugaagggcgucaagcuccacuacacgugaggacuagucccuguucccagagcccacuuuuuuuucuuuuuuugaaauaaaauagccugucuuucagaucuaaaaaaaaaaaaaaaaaaaaaaaaaaaaaaaaaaaaaaaaaaaaaaaaaaaaaaaaaaaaaaaaaaaaaaaaaaaaaaaaaaaaaaaaaaaaaaaaaaaa

SEQ ID NO: 24865 - RNA, 4064 nt, Artificial Sequence
  SARS-CoV-2/Wuhan/WIV05/2019__EPI_ISL_402128 spike protein mRNA gc (1-1273)(K986P_V987P_H69del_V70del_A222V_Y453F_S477N_D614G_I692V)
aggagagucccgcagucggcguccagcggcucugcuuguucgugugugugucguugcaggccuuauucaagcuuaccauguucguguuccugguccuccugccccuggugagcucccagugcgugaaccucaccacccgcacgcagcugccgcccgccuacaccaacagcuucacccggggcgucuacuaccccgacaagguguuccgcuccagcgugcugcacuccacccaggaccucuuccugcccuucuucagcaacgucacgugguuccacgccaucuccgggaccaacggcaccaagcgguucgacaacccggugcugcccuucaacgacgggguguacuucgcgagcaccgagaaguccaacaucauccgcggcuggaucuucgggacgacccucgacagcaagacccagucccugcugaucgucaacaacgccaccaacguggugaucaaggucugcgaguuccaguucugcaacgaccccuuccucggcguguacuaccacaagaacaacaagagcuggauggaguccgaguuccggguguacagcuccgccaacaacugcacguucgaguacgucagccagcccuuccugauggaccuggagggcaagcaggggaacuucaagaaccuccgcgaguucguguucaagaacaucgacggcuacuucaagaucuacuccaagcacaccccgaucaaccuggugcgggaccugccccagggguucagcguccucgagccccugguggaccugcccaucggcaucaacaucacccgcuuccagacccuccuggcccugcaccgguccuaccucacgccgggggacagcagcuccggcuggaccgccggcgcggccgccuacuacgugggguaccugcagccccgcaccuuccugcucaaguacaacgagaacggcaccaucacggacgccgucgacugcgcgcuggacccccugagcgagaccaagugcacccucaaguccuucaccguggagaaggggaucuaccagacgagcaacuuccgggugcagcccaccgaguccaucguccgcuucccgaacaucaccaaccugugccccuucggcgagguguucaacgccacccgguucgccagcgucuacgccuggaaccgcaagcggaucuccaacugcguggccgacuacagcgugcuguacaacuccgcgagcuucuccacguucaagugcuacggcgucagccccaccaagcucaacgaccugugcuucaccaacguguacgccgacuccuucgugauccgcggggacgagguccggcagaucgcccccggccagaccgggaagaucgccgacuacaacuacaagcugccggacgacuucacgggcugcgugaucgccuggaacagcaacaaccucgacuccaaggucgggggcaacuacaacuaccuguuccgccuguuccgcaagagcaaccucaagcccuucgagcgggacaucuccaccgagaucuaccaggcgggcaacacccccugcaacgggguggagggcuucaacugcuacuucccccugcagagcuacggguuccagccgaccaacggcgugggguaccagcccuaccggguggucgugcuguccuucgagcuccugcacgcccccgccacggugugcggccccaagaaguccaccaaccuggucaagaacaagugcgugaacuucaacuucaacggccucaccgggaccggcgugcugaccgagagcaacaagaaguuccugccguuccagcaguucgggcgcgacaucgccgacacgaccgacgccguccgcgacccccagacccuggagauccucgacaucacccccugcagcuucggcggggugagcgugaucacgccgggcaccaacaccuccaaccaggucgcggugcuguaccagggcgugaacugcaccgagguccccguggccauccacgccgaccagcugacgcccaccuggcggguguacagcaccggguccaacgucuuccagacccgcgccggcugccucaucggggccgagcacgugaacaacagcuacgagugcgacauccccaucggcgcgggcaucugcgccuccuaccagacgcagaccaacagcccgcggcgcgcccgguccguggccagccaguccgucaucgcguacaccaugagccugggggccgagaacuccguggccuacagcaacaacuccaucgccauccccaccaacuucacgaucagcgugaccaccgagauccugcccgucuccaugaccaagacgagcguggacugcaccauguacaucugcggcgacagcaccgagugcuccaaccuccugcugcaguacgggagcuucugcacccagcucaaccgcgcccugacgggcaucgcgguggagcaggacaagaacacccaggaggucuucgcccaggugaagcagaucuacaagacgcccccgaucaaggacuucgggggcuucaacuucucccagauccugcccgaccccagcaagcccuccaagcggagcuucaucgaggaccuccuguucaacaaggugacccuggccgacgccggcuucaucaagcaguacggggacugccucggcgacaucgccgcgcgcgaccugaucugcgcccagaaguucaacgggcugaccguccucccgccccugcugaccgacgagaugaucgcccaguacaccuccgcccuccuggccggcaccaucacgagcggguggaccuucggcgcgggcgccgcccugcagauccccuucgccaugcagauggcguaccgguucaacgggaucggcgugacccagaacgugcucuacgagaaccagaagcugaucgccaaccaguucaacuccgccaucgggaagauccaggacagccuguccagcaccgccuccgcccucggcaagcugcaggacgucgugaaccagaacgcgcaggcccugaacacgcucgugaagcagcugagcuccaacuucggggccaucagcuccguccugaacgacauccucagccgccuggacccgcccgaggccgaggugcagaucgaccggcugaucaccggccgccuccagucccugcagaccuacgugacccagcagcugauccgggccgcggagauccgcgccagcgccaaccucgccgccaccaagaugagcgagugcguccugggccaguccaagcggguggacuucugcgggaagggcuaccaccugaugagcuucccccaguccgcgccccacgggguggucuuccuccacgugacguacguccccgcccaggagaagaacuucaccaccgccccggccaucugccacgacggcaaggcgcacuucccccgcgaggggguguucgugagcaacggcacccacugguucgucacgcagcggaacuucuacgagccccagaucaucaccaccgacaacaccuucguguccggcaacugcgacguggucaucgggaucgugaacaacacgguguacgacccccugcagccggagcuggacagcuucaaggaggagcucgacaaguacuucaagaaccacaccucccccgacgucgaccugggcgacaucagcgggaucaacgccuccguggugaacauccagaaggagaucgaccgccugaacgaggucgccaagaaccucaacgagagccugaucgaccugcaggagcucggcaaguacgagcaguacaucaaguggcccugguacaucuggcugggcuucaucgccgggcugaucgccaucgugauggugaccaucaugcucugcugcaugaccuccugcugcagcugccugaagggcugcugcuccugcgggagcugcugcaaguucgacgaggacgacuccgagccgguccugaagggcgugaagcuccacuacacgugaggacuagucccuguucccagagcccacuuuuuuuucuuuuuuugaaauaaaauagccugucuuucagaucuaaaaaaaaaaaaaaaaaaaaaaaaaaaaaaaaaaaaaaaaaaaaaaaaaaaaaaaaaaaaaaaaaaaaaaaaaaaaaaaaaaaaaaaaaaaaaaaaaaaa

SEQ ID NO: 24866 - RNA, 4064 nt, Artificial Sequence
  SARS-CoV-2/Wuhan/WIV05/2019__EPI_ISL_402128 spike protein mRNA gc (1-1273)(K986P_V987P_H69del_V70del_Y453F_D614G_I692V_M1229I)
aggagagucccgcagucggcguccagcggcucugcuuguucgugugugugucguugcaggccuuauucaagcuuaccauguucguguuccugguccuccugccccuggugagcucccagugcgugaaccucaccacccgcacgcagcugccgcccgccuacaccaacagcuucacccggggcgucuacuaccccgacaagguguuccgcuccagcgugcugcacuccacccaggaccucuuccugcccuucuucagcaacgucacgugguuccacgccaucuccgggaccaacggcaccaagcgguucgacaacccggugcugcccuucaacgacgggguguacuucgcgagcaccgagaaguccaacaucauccgcggcuggaucuucgggacgacccucgacagcaagacccagucccugcugaucgucaacaacgccaccaacguggugaucaaggucugcgaguuccaguucugcaacgaccccuuccucggcguguacuaccacaagaacaacaagagcuggauggaguccgaguuccggguguacagcuccgccaacaacugcacguucgaguacgucagccagcccuuccugauggaccuggagggcaagcaggggaacuucaagaaccuccgcgaguucguguucaagaacaucgacggcuacuucaagaucuacuccaagcacaccccgaucaaccuggugcgggaccugccccagggguucagcgcccucgagccccuggucgaccugcccaucggcaucaacaucacccgcuuccagacccuccuggcccugcaccgguccuaccucacgccgggggacagcagcuccggcuggaccgcgggcgccgccgccuacuacgugggguaccugcagccccgcaccuuccugcucaaguacaacgagaacggcaccaucacggacgcgguggacugcgcccuggacccccugagcgagaccaagugcacccucaaguccuucaccgucgagaaggggaucuaccagacgagcaacuuccgggugcagcccaccgaguccaucgugcgcuucccgaacaucaccaaccugugccccuucggcgaggucuucaacgccacccgguucgccagcguguacgccuggaaccgcaagcggaucuccaacugcgucgcggacuacagcgugcuguacaacuccgccagcuucuccacguucaagugcuacggcgugagccccaccaagcucaacgaccugugcuucaccaacgucuacgccgacuccuucgugauccgcggggacgaggugcggcagaucgcccccggccagaccgggaagaucgccgacuacaacuacaagcugccggacgacuucacgggcugcgucaucgcguggaacagcaacaaccucgacuccaaggucgggggcaacuacaacuaccuguuccgccuguuccgcaagagcaaccucaagcccuucgagcgggacaucuccaccgagaucuaccaggccggcagcacccccugcaacgggguggagggcuucaacugcuacuucccccugcaguccuacggguuccagccgaccaacggcgugggguaccagcccuaccggguggugguccugagcuucgagcuccugcacgcccccgccacggugugcggccccaagaaguccaccaaccuggugaagaacaagugcgucaacuucaacuucaacggccucaccgggaccggcgugcugaccgagagcaacaagaaguuccugccguuccagcaguucgggcgcgacaucgccgacacgaccgacgcggugcgcgacccccagacccuggagauccucgacaucacccccugcagcuucggcggggucuccgugaucacgccgggcaccaacaccagcaaccagguggccguccuguaccagggcgugaacugcaccgaggugcccgucgccauccacgccgaccagcugacgcccaccuggcggguguacuccaccgggagcaacguguuccagacccgcgccggcugccucaucggggcggagcacgucaacaacuccuacgagugcgacauccccaucggcgccggcaucugcgccagcuaccagacgcagaccaacuccccgcggcgcgcccggagcguggcgucccagagcgugaucgccuacaccaugucccugggggccgagaacagcgucgccuacuccaacaacagcaucgccauccccaccaacuucacgaucuccgugaccaccgagauccugcccgugagcaugaccaagacgagcgucgacugcaccauguacaucugcggcgacuccaccgagugcagcaaccuccugcugcaguacggguccuucugcacccagcucaaccgcgcgcugacgggcaucgccguggagcaggacaagaacacccaggagguguucgcccaggucaagcagaucuacaagacgcccccgaucaaggacuucgggggcuucaacuucagccagauccugcccgaccccuccaagcccagcaagcgguccuucaucgaggaccuccuguucaacaaggugacccuggccgacgccggcuucaucaagcaguacggggacugccucggcgacaucgcggcccgcgaccugaucugcgcccagaaguucaacgggcugaccgugcucccgccccugcugaccgacgagaugaucgcccaguacaccagcgcccuccuggcgggcaccaucacguccggguggaccuucggcgccggcgccgcccugcagauccccuucgcgaugcagauggccuaccgguucaacgggaucggcgucacccagaacgugcucuacgagaaccagaagcugaucgccaaccaguucaacagcgccaucgggaagauccaggacucccugagcuccaccgccagcgcgcucggcaagcugcaggacguggucaaccagaacgcccaggcccugaacacgcucgugaagcagcuguccagcaacuucggggccaucuccagcgugcugaacgacauccucucccgccuggacccgcccgaggccgagguccagaucgaccggcugaucaccggccgccuccagagccugcagaccuacgugacccagcagcugauccgggcggccgagauccgcgccagcgccaaccucgccgcgaccaagauguccgagugcgugcugggccagagcaagcgggucgacuucugcgggaagggcuaccaccugauguccuucccccagagcgcgccccacggggugguguuccuccacgucacguacgugcccgcccaggagaagaacuucaccaccgccccggccaucugccacgacggcaaggcccacuucccccgcgagggggucuucguguccaacggcacccacugguucgugacgcagcggaacuucuacgagccccagaucaucaccaccgacaacaccuucgucagcggcaacugcgacguggugaucgggaucgucaacaacacgguguacgacccccugcagccggagcuggacuccuucaaggaggagcucgacaaguacuucaagaaccacaccagccccgacguggaccugggcgacaucuccgggaucaacgccagcgucgugaacauccagaaggagaucgaccgccugaacgagguggccaagaaccucaacgagucccugaucgaccugcaggagcucggcaaguacgagcaguacaucaaguggcccugguacaucuggcugggcuucaucgccgggcugaucgcgaucgucaucgugaccaucaugcucugcugcaugaccagcugcugcuccugccugaagggcugcugcagcugcggguccugcugcaaguucgacgaggacgacagcgagccggugcugaagggcgucaagcuccacuacacgugaggacuagucccuguucccagagcccacuuuuuuuucuuuuuuugaaauaaaauagccugucuuucagaucuaaaaaaaaaaaaaaaaaaaaaaaaaaaaaaaaaaaaaaaaaaaaaaaaaaaaaaaaaaaaaaaaaaaaaaaaaaaaaaaaaaaaaaaaaaaaaaaaaaaa

SEQ ID NO: 24867 - RNA, 4061 nt, Artificial Sequence
  SARS-CoV-2/Wuhan/WIV05/2019__EPI_ISL_402128 spike protein mRNA gc (1-1273)(K986P_V987P_K986P_V987P_H69del_V70del_Y144del_N501Y_A570 D_D614G_P681H_T716I_S982A_D1118H)
aggagagucccgcagucggcguccagcggcucugcuuguucgugugugugucguugcaggccuuauucaagcuuaccauguucguguuccugguccuccugccccuggugagcucccagugcgugaaccucaccacccgcacgcagcugccgcccgccuacaccaacagcuucacccggggcgucuacuaccccgacaagguguuccgcuccagcgugcugcacuccacccaggaccucuuccugcccuucuucagcaacgucacgugguuccacgccaucuccgggaccaacggcaccaagcgguucgacaacccggugcugcccuucaacgacgggguguacuucgcgagcaccgagaaguccaacaucauccgcggcuggaucuucgggacgacccucgacagcaagacccagucccugcugaucgucaacaacgccaccaacguggugaucaaggucugcgaguuccaguucugcaacgaccccuuccucggcguguaccacaagaacaacaagagcuggauggaguccgaguuccggguguacagcuccgccaacaacugcacguucgaguacgucagccagcccuuccugauggaccuggagggcaagcaggggaacuucaagaaccuccgcgaguucguguucaagaacaucgacggcuacuucaagaucuacuccaagcacaccccgaucaaccuggugcgggaccugccccagggguucagcgcccucgagccccuggucgaccugcccaucggcaucaacaucacccgcuuccagacccuccuggcccugcaccgguccuaccucacgccgggggacagcagcuccggcuggaccgcgggcgccgccgccuacuacgugggguaccugcagccccgcaccuuccugcucaaguacaacgagaacggcaccaucacggacgcgguggacugcgcccuggacccccugagcgagaccaagugcacccucaaguccuucaccgucgagaaggggaucuaccagacgagcaacuuccgggugcagcccaccgaguccaucgugcgcuucccgaacaucaccaaccugugccccuucggcgaggucuucaacgccacccgguucgccagcguguacgccuggaaccgcaagcggaucuccaacugcgucgcggacuacagcgugcuguacaacuccgccagcuucuccacguucaagugcuacggcgugagccccaccaagcucaacgaccugugcuucaccaacgucuacgccgacuccuucgugauccgcggggacgaggugcggcagaucgcccccggccagaccgggaagaucgccgacuacaacuacaagcugccggacgacuucacgggcugcgucaucgcguggaacagcaacaaccucgacuccaaggucgggggcaacuacaacuaccuguaccgccuguuccgcaagagcaaccucaagcccuucgagcgggacaucuccaccgagaucuaccaggccggcagcacccccugcaacgggguggagggcuucaacugcuacuucccccugcaguccuacggguuccagccgaccuacggcgugggguaccagcccuaccggguggugguccugagcuucgagcuccugcacgcccccgccacggugugcggccccaagaaguccaccaaccuggugaagaacaagugcgucaacuucaacuucaacggccucaccgggaccggcgugcugaccgagagcaacaagaaguuccugccguuccagcaguucgggcgcgacaucgacgacacgaccgacgccgugcgcgacccccagacccuggagauccucgacaucacccccugcagcuucggcggggucuccgugaucacgccgggcaccaacaccagcaaccagguggcgguccuguaccagggcgugaacugcaccgaggugcccgucgccauccacgccgaccagcugacgcccaccuggcggguguacuccaccgggagcaacguguuccagacccgcgccggcugccucaucggggccgagcacgucaacaacuccuacgagugcgacauccccaucggcgcgggcaucugcgccagcuaccagacgcagaccaacucccaccggcgcgcccggagcguggccucccagagcaucaucgcguacaccaugucccugggggccgagaacagcguggccuacuccaacaacagcaucgccaucccgaucaacuucaccaucuccgucacgaccgagauccugcccgugagcaugaccaagaccagcguggacugcacgauguacaucugcggcgacuccaccgagugcagcaaccuccugcugcaguacggguccuucugcacccagcucaaccgcgcccugaccggcaucgcggucgagcaggacaagaacacgcaggagguguucgcccaggugaagcagaucuacaagaccccgcccaucaaggacuucgggggcuucaacuucagccagauccugcccgaccccuccaagcccagcaagcgguccuucaucgaggaccuccuguucaacaaggucacccuggccgacgccggcuucaucaagcaguacggggacugccucggcgacaucgccgcgcgcgaccugaucugcgcccagaaguucaacgggcugaccgugcugcccccgcuccugacggacgagaugaucgcccaguacaccagcgcccuccuggccggcaccaucaccuccggguggacguucggcgcgggcgccgcccugcagauccccuucgccaugcagauggcguaccgguucaacgggaucggcgugacccagaacguccucuacgagaaccagaagcugaucgccaaccaguucaacagcgccaucgggaagauccaggacucccugagcuccaccgccagcgcccucggcaagcugcaggacguggugaaccagaacgcgcaggcccugaacacccucgucaagcagcuguccagcaacuucggggccaucuccagcgugcugaacgacauccucgcccgccuggacccgcccgaggccgaggugcagaucgaccggcugaucacgggccgccuccagucccugcagaccuacgucacccagcagcugauccgggcggccgagauccgcgccagcgccaaccucgccgcgaccaagaugagcgagugcgugcugggccaguccaagcggguggacuucugcgggaagggcuaccaccugaugagcuucccccaguccgcgccccacggggucguguuccuccacgugaccuacguccccgcccaggagaagaacuucacgaccgcccccgccaucugccacgacggcaaggcccacuucccgcgcgaggggguguucgucagcaacggcacccacugguucgugacccagcggaacuucuacgagccccagaucaucacgacccacaacaccuucguguccggcaacugcgacgucgugaucgggaucgugaacaacaccgucuacgacccccugcagcccgagcuggacagcuucaaggaggagcucgacaaguacuucaagaaccacacguccccggacguggaccugggcgacaucagcgggaucaacgccuccguggucaacauccagaaggagaucgaccgccugaacgagguggccaagaaccucaacgagagccugaucgaccugcaggagcucggcaaguacgagcaguacaucaaguggcccugguacaucuggcugggcuucaucgccgggcugaucgcgaucgugauggucaccaucaugcucugcugcaugaccuccugcugcagcugccugaagggcugcugcuccugcgggagcugcugcaaguucgacgaggacgacuccgagcccgugcugaagggcgugaagcuccacuacaccugaggacuagucccuguucccagagcccacuuuuuuuucuuuuuuugaaauaaaauagccugucuuucagaucuaaaaaaaaaaaaaaaaaaaaaaaaaaaaaaaaaaaaaaaaaaaaaaaaaaaaaaaaaaaaaaaaaaaaaaaaaaaaaaaaaaaaaaaaaaaaaaaaaaaa

SEQ ID NO: 24868 - RNA, 4070 nt, Artificial Sequence
  SARS-CoV-2/Wuhan/WIV05/2019__EPI_ISL_402128 spike protein mRNA gc (1-1273)(K986P_V987P_K986P_V987P_K417N_E484K_N501Y_D614G)
aggagagucccgcagucggcguccagcggcucugcuuguucgugugugugucguugcaggccuuauucaagcuuaccauguucguguuccugguccuccugccccuggugagcucccagugcgugaaccucaccacccgcacgcagcugccgcccgccuacaccaacagcuucacccggggcgucuacuaccccgacaagguguuccgcuccagcgugcugcacuccacccaggaccucuuccugcccuucuucagcaacgucacgugguuccacgccauccacguguccgggaccaacggcaccaagcgguucgacaacccggugcugcccuucaacgacggggucuacuucgcgagcaccgagaaguccaacaucauccgcggcuggaucuucgggacgacccucgacagcaagacccagucccugcugaucgugaacaacgccaccaacguggucaucaaggugugcgaguuccaguucugcaacgaccccuuccucggcguguacuaccacaagaacaacaagagcuggauggaguccgaguuccgggucuacagcuccgccaacaacugcacguucgaguacgugagccagcccuuccugauggaccuggagggcaagcaggggaacuucaagaaccuccgcgaguucguguucaagaacaucgacggcuacuucaagaucuacuccaagcacaccccgaucaaccugguccgggaccugccccagggguucagcgcccucgagccccugguggaccugcccaucggcaucaacaucacccgcuuccagacccuccuggcccugcaccgguccuaccucacgccgggggacagcagcuccggcuggaccgcgggcgccgccgccuacuacgugggguaccugcagccccgcaccuuccugcucaaguacaacgagaacggcaccaucacggacgcggucgacugcgcccuggacccccugagcgagaccaagugcacccucaaguccuucaccguggagaaggggaucuaccagacgagcaacuuccgggugcagcccaccgaguccaucguccgcuucccgaacaucaccaaccugugccccuucggcgagguguucaacgccacccgguucgccagcgucuacgccuggaaccgcaagcggaucuccaacugcguggcggacuacagcgugcuguacaacuccgccagcuucuccacguucaagugcuacggcgucagccccaccaagcucaacgaccugugcuucaccaacguguacgccgacuccuucgugauccgcggggacgagguccggcagaucgcccccggccagaccgggaacaucgccgacuacaacuacaagcugccggacgacuucacgggcugcgugaucgcguggaacagcaacaaccucgacuccaaggucgggggcaacuacaacuaccuguaccgccuguuccgcaagagcaaccucaagcccuucgagcgggacaucuccaccgagaucuaccaggccggcagcacccccugcaacggggugaagggcuucaacugcuacuucccccugcaguccuacggguuccagccgaccuacggcgugggguaccagcccuaccggguggucgugcugagcuucgagcuccugcacgcccccgccacggugugcggccccaagaaguccaccaaccuggucaagaacaagugcgugaacuucaacuucaacggccucaccgggaccggcgugcugaccgagagcaacaagaaguuccugccguuccagcaguucgggcgcgacaucgccgacacgaccgacgcgguccgcgacccccagacccuggagauccucgacaucacccccugcagcuucggcgggguguccgugaucacgccgggcaccaacaccagcaaccaggucgccgugcuguaccagggcgugaacugcaccgagguccccguggccauccacgccgaccagcugacgcccaccuggcggguguacuccaccgggagcaacgucuuccagacccgcgccggcugccucaucggggcggagcacgugaacaacuccuacgagugcgacauccccaucggcgccggcaucugcgccagcuaccagacgcagaccaacuccccgcggcgcgcccggagcguggcgucccagagcaucaucgccuacaccaugucccugggggccgagaacagcgucgccuacuccaacaacagcaucgccauccccaccaacuucacgaucuccgugaccaccgagauccugcccgugagcaugaccaagacgagcgucgacugcaccauguacaucugcggcgacuccaccgagugcagcaaccuccugcugcaguacggguccuucugcacccagcucaaccgcgcgcugacgggcaucgccguggagcaggacaagaacacccaggagguguucgcccaggucaagcagaucuacaagacgcccccgaucaaggacuucgggggcuucaacuucagccagauccugcccgaccccuccaagcccagcaagcgguccuucaucgaggaccuccuguucaacaaggugacccuggccgacgccggcuucaucaagcaguacggggacugccucggcgacaucgcggcccgcgaccugaucugcgcccagaaguucaacgggcugaccgugcucccgccccugcugaccgacgagaugaucgcccaguacaccagcgcccuccuggcgggcaccaucacguccggguggaccuucggcgccggcgccgcccugcagauccccuucgcgaugcagauggccuaccgguucaacgggaucggcgucacccagaacgugcucuacgagaaccagaagcugaucgccaaccaguucaacagcgccaucgggaagauccaggacucccugagcuccaccgccagcgcgcucggcaagcugcaggacguggucaaccagaacgcccaggcccugaacacgcucgugaagcagcuguccagcaacuucggggccaucuccagcgugcugaacgacauccucucccgccuggacccgcccgaggccgagguccagaucgaccggcugaucaccggccgccuccagagccugcagaccuacgugacccagcagcugauccgggcggccgagauccgcgccagcgccaaccucgccgcgaccaagauguccgagugcgugcugggccagagcaagcgggucgacuucugcgggaagggcuaccaccugauguccuucccccagagcgcgccccacggggugguguuccuccacgucacguacgugcccgcccaggagaagaacuucaccaccgccccggccaucugccacgacggcaaggcccacuucccccgcgagggggucuucguguccaacggcacccacugguucgugacgcagcggaacuucuacgagccccagaucaucaccaccgacaacaccuucgucagcggcaacugcgacguggugaucgggaucgucaacaacacgguguacgacccccugcagccggagcuggacuccuucaaggaggagcucgacaaguacuucaagaaccacaccagccccgacguggaccugggcgacaucuccgggaucaacgccagcgucgugaacauccagaaggagaucgaccgccugaacgagguggccaagaaccucaacgagucccugaucgaccugcaggagcucggcaaguacgagcaguacaucaaguggcccugguacaucuggcugggcuucaucgccgggcugaucgcgaucgucauggugaccaucaugcucugcugcaugaccagcugcugcuccugccugaagggcugcugcagcugcggguccugcugcaaguucgacgaggacgacagcgagccggugcugaagggcgucaagcuccacuacacgugaggacuagucccuguucccagagcccacuuuuuuuucuuuuuuugaaauaaaauagccugucuuucagaucuaaaaaaaaaaaaaaaaaaaaaaaaaaaaaaaaaaaaaaaaaaaaaaaaaaaaaaaaaaaaaaaaaaaaaaaaaaaaaaaaaaaaaaaaaaaaaaaaaaaa

SEQ ID NO: 24869 - RNA, 4061 nt, Artificial Sequence
  SARS-CoV-2/Wuhan/WIV05/2019__EPI_ISL_402128 spike protein mRNA gc (1-1273)(K986P_V987P_K986P_V987P_L18F_D80A_D215G_L242del_A243del_ L244del_R246I_K417N_E484K_N501Y_D614G_A701V)
aggagagucccgcagucggcguccagcggcucugcuuguucgugugugugucguugcaggccuuauucaagcuuaccauguucguguuccugguccuccugccccuggugagcucccagugcgugaacuucaccacccgcacgcagcucccgcccgccuacaccaacagcuucacccggggcgucuacuaccccgacaagguguuccgcuccagcgugcugcacuccacccaggaccuguuccuccccuucuucagcaacgucacgugguuccacgccauccacguguccgggaccaacggcaccaagcgguucgcgaacccggugcugcccuucaacgacggggucuacuucgccagcaccgagaaguccaacaucauccgcggcuggaucuucgggacgacccuggacagcaagacccagucccuccugaucgugaacaacgccaccaacguggucaucaaggugugcgaguuccaguucugcaacgaccccuuccugggcguguacuaccacaagaacaacaagagcuggauggaguccgaguuccgggucuacagcuccgccaacaacugcacguucgaguacgugagccagcccuuccucauggaccuggagggcaagcaggggaacuucaagaaccugcgcgaguucguguucaagaacaucgacggcuacuucaagaucuacuccaagcacaccccgaucaaccucguccgggggcugccccagggcuucagcgcccuggagccccucguggaccugcccaucgggaucaacaucacccgcuuccagacccugcacaucuccuaccucacgccgggcgacagcagcuccggcuggaccgcgggggccgccgccuacuacgugggcuaccugcagccccggaccuuccugcucaaguacaacgagaacgggaccaucacggacgcggucgacugcgcccuggacccccugagcgagaccaagugcacccucaaguccuucaccguggagaagggcaucuaccagacgagcaacuuccgcgugcagcccaccgaguccaucguccgguucccgaacaucaccaaccugugccccuucggcgagguguucaacgccacccgcuucgccagcgucuacgccuggaaccggaagcgcaucuccaacugcguggcggacuacagcgugcuguacaacuccgccagcuucuccacguucaagugcuacggggucagccccaccaagcucaacgaccugugcuucaccaacguguacgccgacuccuucgugauccggggcgacgagguccgccagaucgcccccgggcagaccggcaacaucgccgacuacaacuacaagcugccggacgacuucacggggugcgugaucgcguggaacagcaacaaccucgacuccaaggugggcggcaacuacaacuaccuguaccggcuguuccgcaagagcaaccucaagcccuucgagcgggacaucuccaccgagaucuaccaggccgggagcacccccugcaacggcgucaagggguucaacugcuacuucccccugcaguccuacggcuuccagccgaccuacggggugggcuaccagcccuaccgcguggucgugcugagcuucgagcuccugcacgcccccgccacggugugcggccccaagaaguccaccaaccuggucaagaacaagugcgugaacuucaacuucaacgggcucaccggcaccggggugcugaccgagagcaacaagaaguuccugccguuccagcaguucggccgggacaucgccgacacgaccgacgcgguccgcgacccccagacccucgagauccuggacaucacccccugcagcuucgggggcguguccgugaucacgccgggcaccaacaccagcaaccaggucgccgugcuguaccagggggugaacugcaccgagguccccguggccauccacgccgaccagcugacgcccaccuggcgcguguacuccaccggcagcaacgucuuccagacccgggccgggugccucaucggcgcggagcacgugaacaacuccuacgagugcgacauccccaucggcgccgggaucugcgccagcuaccagacgcagaccaacuccccgcgccgggcccgcagcguggcgucccagagcaucaucgccuacaccaugucccugggcgucgagaacagcguggccuacuccaacaacagcaucgccauccccaccaacuucacgaucuccgugaccaccgagauccugcccgucagcaugaccaagacgagcguggacugcaccauguacaucugcggggacuccaccgagugcagcaaccuccugcugcaguacggcuccuucugcacccagcucaaccgggcccugacggggaucgcgguggagcaggacaagaacacccaggaggucuucgcccaggugaagcagaucuacaagacgcccccgaucaaggacuucggcggcuucaacuucagccagauccugcccgaccccuccaagcccagcaagcgcuccuucaucgaggaccuccuguucaacaaggugacccuggccgacgccggguucaucaagcaguacggcgacugccucggggacaucgccgcgcgggaccugaucugcgcccagaaguucaacggccugaccguccucccgccccugcugaccgacgagaugaucgcccaguacaccagcgcccuccuggccgggaccaucacguccggcuggaccuucggcgcgggggccgcccugcagauccccuucgccaugcagauggcguaccgcuucaacggcaucggggugacccagaacgugcucuacgagaaccagaagcugaucgccaaccaguucaacagcgccaucggcaagauccaggacucccugagcuccaccgccagcgcccucgggaagcugcaggacgucgugaaccagaacgcgcaggcccugaacacgcucgugaagcagcuguccagcaacuucggcgccaucuccagcguccugaacgacauccucucccggcuggacccgcccgaggccgaggugcagaucgaccgccugaucaccggccggcuccagagccugcagaccuacgugacccagcagcugauccgcgccgcggagauccgggccagcgccaaccucgccgccaccaagauguccgagugcguccuggggcagagcaagcgcguggacuucugcggcaagggguaccaccugauguccuucccccagagcgcgccccacggcguggucuuccuccacgugacguacguccccgcccaggagaagaacuucaccaccgccccggccaucugccacgacgggaaggcgcacuucccccgggagggcguguucguguccaacggcacccacugguucgucacgcagcgcaacuucuacgagccccagaucaucaccaccgacaacaccuucgugagcgggaacugcgacguggucaucggcaucgugaacaacacgguguacgacccccugcagccggagcuggacuccuucaaggaggagcucgacaaguacuucaagaaccacaccagccccgacgucgaccugggggacaucuccggcaucaacgccagcguggugaacauccagaaggagaucgaccggcugaacgaggucgccaagaaccucaacgagucccugaucgaccugcaggagcucggcaaguacgagcaguacaucaaguggcccugguacaucuggcugggguucaucgccggccugaucgccaucgugauggugaccaucaugcucugcugcaugaccagcugcugcuccugccugaaggggugcugcagcugcggcuccugcugcaaguucgacgaggacgacagcgagccgguccugaagggggugaagcuccacuacacgugaggacuagucccuguucccagagcccacuuuuuuuucuuuuuuugaaauaaaauagccugucuuucagaucuaaaaaaaaaaaaaaaaaaaaaaaaaaaaaaaaaaaaaaaaaaaaaaaaaaaaaaaaaaaaaaaaaaaaaaaaaaaaaaaaaaaaaaaaaaaaaaaaaaaa

SEQ ID NO: 24870 - RNA, 4070 nt, Artificial Sequence
  SARS-CoV-2/Wuhan/WIV05/2019__EPI_ISL_402128 spike protein mRNA gc (1-1273)(K986P_V987P_K986P_V987P_E484K_D614G)
aggagagucccgcagucggcguccagcggcucugcuuguucgugugugugucguugcaggccuuauucaagcuuaccauguucguguuccugguccuccugccccuggugagcucccagugcgugaaccucaccacccgcacgcagcugccgcccgccuacaccaacagcuucacccggggcgucuacuaccccgacaagguguuccgcuccagcgugcugcacuccacccaggaccucuuccugcccuucuucagcaacgucacgugguuccacgccauccacguguccgggaccaacggcaccaagcgguucgacaacccggugcugcccuucaacgacggggucuacuucgcgagcaccgagaaguccaacaucauccgcggcuggaucuucgggacgacccucgacagcaagacccagucccugcugaucgugaacaacgccaccaacguggucaucaaggugugcgaguuccaguucugcaacgaccccuuccucggcguguacuaccacaagaacaacaagagcuggauggaguccgaguuccgggucuacagcuccgccaacaacugcacguucgaguacgugagccagcccuuccugauggaccuggagggcaagcaggggaacuucaagaaccuccgcgaguucguguucaagaacaucgacggcuacuucaagaucuacuccaagcacaccccgaucaaccugguccgggaccugccccagggguucagcgcccucgagccccugguggaccugcccaucggcaucaacaucacccgcuuccagacccuccuggcccugcaccgguccuaccucacgccgggggacagcagcuccggcuggaccgcgggcgccgccgccuacuacgugggguaccugcagccccgcaccuuccugcucaaguacaacgagaacggcaccaucacggacgcggucgacugcgcccuggacccccugagcgagaccaagugcacccucaaguccuucaccguggagaaggggaucuaccagacgagcaacuuccgggugcagcccaccgaguccaucguccgcuucccgaacaucaccaaccugugccccuucggcgagguguucaacgccacccgguucgccagcgucuacgccuggaaccgcaagcggaucuccaacugcguggcggacuacagcgugcuguacaacuccgccagcuucuccacguucaagugcuacggcgucagccccaccaagcucaacgaccugugcuucaccaacguguacgccgacuccuucgugauccgcggggacgagguccggcagaucgcccccggccagaccgggaagaucgccgacuacaacuacaagcugccggacgacuucacgggcugcgugaucgcguggaacagcaacaaccucgacuccaaggucgggggcaacuacaacuaccuguaccgccuguuccgcaagagcaaccucaagcccuucgagcgggacaucuccaccgagaucuaccaggccggcagcacccccugcaacggggugaagggcuucaacugcuacuucccccugcaguccuacggguuccagccgaccaacggcgugggguaccagcccuaccggguggucgugcugagcuucgagcuccugcacgcccccgccacggugugcggccccaagaaguccaccaaccuggucaagaacaagugcgugaacuucaacuucaacggccucaccgggaccggcgugcugaccgagagcaacaagaaguuccugccguuccagcaguucgggcgcgacaucgccgacacgaccgacgcgguccgcgacccccagacccuggagauccucgacaucacccccugcagcuucggcgggguguccgugaucacgccgggcaccaacaccagcaaccaggucgccgugcuguaccagggcgugaacugcaccgagguccccguggccauccacgccgaccagcugacgcccaccuggcggguguacuccaccgggagcaacgucuuccagacccgcgccggcugccucaucggggcggagcacgugaacaacuccuacgagugcgacauccccaucggcgccggcaucugcgccagcuaccagacgcagaccaacuccccgcggcgcgcccggagcguggcgucccagagcaucaucgccuacaccaugucccugggggccgagaacagcgucgccuacuccaacaacagcaucgccauccccaccaacuucacgaucuccgugaccaccgagauccugcccgugagcaugaccaagacgagcgucgacugcaccauguacaucugcggcgacuccaccgagugcagcaaccuccugcugcaguacggguccuucugcacccagcucaaccgcgcgcugacgggcaucgccguggagcaggacaagaacacccaggagguguucgcccaggucaagcagaucuacaagacgcccccgaucaaggacuucgggggcuucaacuucagccagauccugcccgaccccuccaagcccagcaagcgguccuucaucgaggaccuccuguucaacaaggugacccuggccgacgccggcuucaucaagcaguacggggacugccucggcgacaucgcggcccgcgaccugaucugcgcccagaaguucaacgggcugaccgugcucccgccccugcugaccgacgagaugaucgcccaguacaccagcgcccuccuggcgggcaccaucacguccggguggaccuucggcgccggcgccgcccugcagauccccuucgcgaugcagauggccuaccgguucaacgggaucggcgucacccagaacgugcucuacgagaaccagaagcugaucgccaaccaguucaacagcgccaucgggaagauccaggacucccugagcuccaccgccagcgcgcucggcaagcugcaggacguggucaaccagaacgcccaggcccugaacacgcucgugaagcagcuguccagcaacuucggggccaucuccagcgugcugaacgacauccucucccgccuggacccgcccgaggccgagguccagaucgaccggcugaucaccggccgccuccagagccugcagaccuacgugacccagcagcugauccgggcggccgagauccgcgccagcgccaaccucgccgcgaccaagauguccgagugcgugcugggccagagcaagcgggucgacuucugcgggaagggcuaccaccugauguccuucccccagagcgcgccccacggggugguguuccuccacgucacguacgugcccgcccaggagaagaacuucaccaccgccccggccaucugccacgacggcaaggcccacuucccccgcgagggggucuucguguccaacggcacccacugguucgugacgcagcggaacuucuacgagccccagaucaucaccaccgacaacaccuucgucagcggcaacugcgacguggugaucgggaucgucaacaacacgguguacgacccccugcagccggagcuggacuccuucaaggaggagcucgacaaguacuucaagaaccacaccagccccgacguggaccugggcgacaucuccgggaucaacgccagcgucgugaacauccagaaggagaucgaccgccugaacgagguggccaagaaccucaacgagucccugaucgaccugcaggagcucggcaaguacgagcaguacaucaaguggcccugguacaucuggcugggcuucaucgccgggcugaucgcgaucgucauggugaccaucaugcucugcugcaugaccagcugcugcuccugccugaagggcugcugcagcugcggguccugcugcaaguucgacgaggacgacagcgagccggugcugaagggcgucaagcuccacuacacgugaggacuagucccuguucccagagcccacuuuuuuuucuuuuuuugaaauaaaauagccugucuuucagaucuaaaaaaaaaaaaaaaaaaaaaaaaaaaaaaaaaaaaaaaaaaaaaaaaaaaaaaaaaaaaaaaaaaaaaaaaaaaaaaaaaaaaaaaaaaaaaaaaaaaa

SEQ ID NO: 24871 - RNA, 4070 nt, Artificial Sequence
  SARS-CoV-2/Wuhan/WIV05/2019__EPI_ISL_402128 spike protein mRNA gc (1-1273)(K986P_V987P_K986P_V987P_L18F_T20N_P26S_D138Y_R190S_K417T _E484K_N501Y_D614G_H655Y_T1027I)
aggagagucccgcagucggcguccagcggcucugcuuguucgugugugugucguugcaggccuuauucaagcuuaccauguucguguuccugguccuccugccccuggugagcucccagugcgugaacuucaccaaccgcacccagcucccgagcgccuacacgaacuccuucacccggggcgucuacuaccccgacaagguguuccgcagcuccgugcugcacagcacccaggaccuguuccuccccuucuucuccaacgucaccugguuccacgccauccacgugagcgggacgaacggcaccaagcgguucgacaaccccgugcugccguucaacgacggggucuacuucgcguccaccgagaaguccaacaucauccgcggcuggaucuucgggaccacgcuggacuccaagacccagagccuccugaucgugaacaacgccaccaacguggucaucaaggugugcgaguuccaguucugcaacuaccccuuccugggcguguacuaccacaagaacaacaaguccuggauggagagcgaguuccgggucuacuccagcgccaacaacugcaccuucgaguacgugucccagcccuuccucauggaccuggagggcaagcaggggaacuucaagaaccugagcgaguucguguucaagaacaucgacggcuacuucaagaucuacuccaagcacacgcccaucaaccucguccgcgaccugccgcagggguucagcgcccuggagccccucguggaccugcccaucggcaucaacaucacccgguuccagacccugcucgcccugcaccgcagcuaccugacccccggggacuccagcuccggcuggacggcgggcgccgccgccuacuacgugggguaccuccagccgcggaccuuccugcugaaguacaacgagaacggcaccaucaccgacgcggucgacugcgcccucgacccccugagcgagacgaagugcacccugaaguccuucaccguggagaaggggaucuaccagaccagcaacuuccgcgugcagcccacggaguccaucguccgguuccccaacaucaccaaccucugcccguucggcgagguguucaacgccacccgcuucgccagcgucuacgccuggaaccggaagcgcaucuccaacugcguggcggacuacagcgugcuguacaacuccgccagcuucuccaccuucaagugcuacggcgucagccccacgaagcugaacgaccucugcuucaccaacguguacgccgacuccuucgugauccgcggggacgagguccggcagaucgcccccggccagaccgggaccaucgccgacuacaacuacaagcugcccgacgacuucacgggcugcgugaucgcguggaacagcaacaaccuggacuccaaggucgggggcaacuacaacuaccucuaccggcuguuccgcaagagcaaccugaagccguucgagcgggacaucuccaccgagaucuaccaggccggcagcacccccugcaacggggugaagggcuucaacugcuacuucccccuccagagcuacggguuccagcccaccuacggcgugggguaccagccguaccgcguggucgugcuguccuucgagcugcuccacgcccccgccacggugugcggccccaagaaguccaccaaccuggucaagaacaagugcgugaacuucaacuucaacggccugaccgggaccggcgugcucaccgagagcaacaagaaguuccugcccuuccagcaguucgggcgggacaucgccgacacgaccgacgcgguccgcgacccgcagacccuggagauccuggacaucacccccugcagcuucggcgggguguccgugaucacgcccggcaccaacaccagcaaccaggucgccgugcucuaccagggcgugaacugcaccgaggucccgguggccauccacgccgaccagcugacgcccaccuggcgcguguacuccaccgggagcaacgucuuccagacccgggccggcugccugaucggggcggaguacgugaacaacuccuacgagugcgacauccccaucggcgccggcaucugcgccagcuaccagacgcagaccaacagcccccgccgggcccgcagcguggcgucccagagcaucaucgccuacaccaugucccucggggccgagaacagcgucgccuacuccaacaacagcaucgccaucccgaccaacuucacgaucagcgugaccaccgagauccugcccguguccaugaccaagacgagcgucgacugcaccauguacaucugcggcgacuccaccgagugcagcaaccugcuccugcaguacggguccuucugcacccagcugaaccgggcgcucacgggcaucgccguggagcaggacaagaacacccaggagguguucgcccaggucaagcagaucuacaagaccccgcccaucaaggacuucgggggcuucaacuucagccagauccugcccgaccccuccaagcccagcaagcgcuccuucaucgaggaccuccuguucaacaaggugacccuggccgacgccggcuucaucaagcaguacggggacugccugggcgacaucgcggcccgggaccucaucugcgcccagaaguucaacgggcugacggugcugcccccgcuccugaccgacgagaugaucgcccaguacaccagcgcccugcucgcgggcaccaucacguccggguggaccuucggcgccggcgccgcccugcagauccccuucgcgaugcagauggccuaccgcuucaacgggaucggcgucacccagaacgugcuguacgagaaccagaagcucaucgccaaccaguucaacagcgccaucgggaagauccaggacucccugagcuccaccgccagcgcgcugggcaagcuccaggacguggucaaccagaacgcccaggcccugaacacgcuggugaagcagcucuccagcaacuucggggccaucuccagcgugcugaacgacauccugagccggcucgacccgcccgaggccgagguccagaucgaccgccugaucaccggccggcugcagucccuccagaccuacgugacccagcagcugauccgcgcggccgagauccgggccagcgccaaccuggccgcgaucaagauguccgagugcgugcucggccagagcaagcgcgucgacuucugcgggaagggcuaccaccugauguccuucccccagagcgcgccccacggggugguguuccugcacgucaccuacgugcccgcccaggagaagaacuucacgaccgcccccgccaucugccacgacggcaaggcccacuucccgcgggagggggucuucguguccaacggcacccacugguucgugacccagcgcaacuucuacgagccccagaucaucacgaccgacaacaccuucgucagcggcaacugcgacguggugaucgggaucgucaacaacaccguguacgacccccuccagcccgagcuggacuccuucaaggaggagcuggacaaguacuucaagaaccacacgagcccggacguggaccucggcgacaucuccgggaucaacgccagcgucgugaacauccagaaggagaucgaccggcugaacgagguggccaagaaccugaacgagucccucaucgaccugcaggagcugggcaaguacgagcaguacaucaaguggcccugguacaucuggcucggcuucaucgccgggcugaucgcgaucgucauggugaccaucaugcugugcugcaugaccagcugcugcuccugccucaagggcugcugcagcugcggguccugcugcaaguucgacgaggacgacagcgagcccgugcugaagggcgucaagcugcacuacaccugaggacuagucccuguucccagagcccacuuuuuuuucuuuuuuugaaauaaaauagccugucuuucagaucuaaaaaaaaaaaaaaaaaaaaaaaaaaaaaaaaaaaaaaaaaaaaaaaaaaaaaaaaaaaaaaaaaaaaaaaaaaaaaaaaaaaaaaaaaaaaaaaaaaaa

SEQ ID NO: 24872 - RNA, 4070 nt, Artificial Sequence
  SARS-CoV-2/Wuhan/WIV05/2019__EPI_ISL_402128 spike protein mRNA gc (1-1273)(K986P_V987P_K986P_V987P_S13I_W152C_L452R_D614G)
aggagagucccgcagucggcguccagcggcucugcuuguucgugugugugucguugcaggccuuauucaagcuuaccauguucguguuccugguccuccugccccuggugagcauccagugcgugaaccucaccacccgcacgcagcugccgcccgccuacaccaacuccuucacccggggcgucuacuaccccgacaagguguuccgcagcuccgugcugcacagcacccaggaccucuuccugcccuucuucuccaacgucacgugguuccacgccauccacgugagcgggaccaacggcaccaagcgguucgacaacccggugcugcccuucaacgacggggucuacuucgcguccaccgagaaguccaacaucauccgcggcuggaucuucgggacgacccucgacagcaagacccagagccugcugaucgugaacaacgccaccaacguggucaucaaggugugcgaguuccaguucugcaacgaccccuuccucggcguguacuaccacaagaacaacaaguccugcauggagagcgaguuccgggucuacuccagcgccaacaacugcacguucgaguacgugucccagcccuuccugauggaccuggagggcaagcaggggaacuucaagaaccuccgcgaguucguguucaagaacaucgacggcuacuucaagaucuacagcaagcacaccccgaucaaccugguccgggaccugccccagggguucuccgcccucgagccccugguggaccugcccaucggcaucaacaucacccgcuuccagacccuccuggcccugcaccggagcuaccucacgccgggggacuccagcagcggcuggaccgcgggcgccgccgccuacuacgugggguaccugcagccccgcaccuuccugcucaaguacaacgagaacggcaccaucacggacgcggucgacugcgcccuggacccccuguccgagaccaagugcacccucaagagcuucaccguggagaaggggaucuaccagacguccaacuuccgggugcagcccaccgagagcaucguccgcuucccgaacaucaccaaccugugccccuucggcgagguguucaacgccacccgguucgccuccgucuacgccuggaaccgcaagcggaucagcaacugcguggcggacuacuccgugcuguacaacagcgccuccuucagcacguucaagugcuacggcgucucccccaccaagcucaacgaccugugcuucaccaacguguacgccgacagcuucgugauccgcggggacgagguccggcagaucgcccccggccagaccgggaagaucgccgacuacaacuacaagcugccggacgacuucacgggcugcgugaucgcguggaacuccaacaaccucgacagcaaggucgggggcaacuacaacuaccgcuaccggcuguuccgcaaguccaaccugaagcccuucgagcgggacaucagcaccgagaucuaccaggccggcuccacccccugcaacgggguggagggcuucaacugcuacuucccccuccagagcuacggguuccagccgaccaacggcgugggguaccagcccuaccgcguggucgugcuguccuucgagcugcuccacgcccccgccacggugugcggccccaagaaguccaccaaccuggucaagaacaagugcgugaacuucaacuucaacggccugaccgggaccggcgugcucaccgagagcaacaagaaguuccugccguuccagcaguucgggcgcgacaucgccgacacgaccgacgcgguccgggacccccagacccuggagauccuggacaucacccccugcagcuucggcggggugagcgugaucacgccgggcaccaacaccuccaaccaggucgccgugcucuaccagggcgugaacugcaccgagguccccguggccauccacgccgaccagcugacgcccaccuggcgcguguacagcaccggguccaacgucuuccagacccgggccggcugccugaucggggcggagcacgugaacaacagcuacgagugcgacauccccaucggcgccggcaucugcgccuccuaccagacgcagaccaacagcccgcgccgggcccgcuccguggcgagccaguccaucaucgccuacaccaugagccucggggccgagaacuccgucgccuacagcaacaacuccaucgccauccccaccaacuucacgaucagcgugaccaccgagauccugcccguguccaugaccaagacgagcgucgacugcaccauguacaucugcggcgacagcaccgagugcuccaaccugcuccugcaguacgggagcuucugcacccagcugaaccgggcgcucacgggcaucgccguggagcaggacaagaacacccaggagguguucgcccaggucaagcagaucuacaagacgcccccgaucaaggacuucgggggcuucaacuucucccagauccugcccgaccccagcaagcccuccaagcgcagcuucaucgaggaccuccuguucaacaaggugacccuggccgacgccggcuucaucaagcaguacggggacugccugggcgacaucgcggcccgggaccucaucugcgcccagaaguucaacgggcugaccgugcugccgccccuccugaccgacgagaugaucgcccaguacaccuccgcccugcucgcgggcaccaucacgagcggguggaccuucggcgccggcgccgcccugcagauccccuucgcgaugcagauggccuaccgcuucaacgggaucggcgucacccagaacgugcuguacgagaaccagaagcucaucgccaaccaguucaacuccgccaucgggaagauccaggacagccuguccagcaccgccuccgcgcugggcaagcuccaggacguggucaaccagaacgcccaggcccugaacacgcuggugaagcagcucagcuccaacuucggggccaucagcuccgugcugaacgacauccugagccggcucgacccgcccgaggccgagguccagaucgaccgccugaucaccggccggcugcagucccuccagaccuacgugacccagcagcugauccgcgcggccgagauccgggccagcgccaaccuggccgcgaccaagaugagcgagugcgugcucggccaguccaagcgcgucgacuucugcgggaagggcuaccaccugaugagcuucccccaguccgcgccccacggggugguguuccugcacgucacguacgugcccgcccaggagaagaacuucaccaccgccccggccaucugccacgacggcaaggcccacuucccccgggagggggucuucgugagcaacggcacccacugguucgugacgcagcgcaacuucuacgagccccagaucaucaccaccgacaacaccuucgucuccggcaacugcgacguggugaucgggaucgucaacaacacgguguacgacccccuccagccggagcuggacagcuucaaggaggagcuggacaaguacuucaagaaccacaccucccccgacguggaccucggcgacaucagcgggaucaacgccuccgucgugaacauccagaaggagaucgaccggcugaacgagguggccaagaaccugaacgagagccucaucgaccugcaggagcugggcaaguacgagcaguacaucaaguggcccugguacaucuggcucggcuucaucgccgggcugaucgcgaucgucauggugaccaucaugcugugcugcaugaccuccugcugcagcugccucaagggcugcugcuccugcgggagcugcugcaaguucgacgaggacgacuccgagccggugcugaagggcgucaagcugcacuacacgugaggacuagucccuguucccagagcccacuuuuuuuucuuuuuuugaaauaaaauagccugucuuucagaucuaaaaaaaaaaaaaaaaaaaaaaaaaaaaaaaaaaaaaaaaaaaaaaaaaaaaaaaaaaaaaaaaaaaaaaaaaaaaaaaaaaaaaaaaaaaaaaaaaaaa

SEQ ID NO: 24873 - RNA, 4070 nt, Artificial Sequence
  SARS-CoV-2/Wuhan/WIV05/2019__EPI_ISL_402128 spike protein mRNA gc (1-1273)(K986P_V987P)
aggagagucccgcagucggcguccagcggcucugcuuguucgugugugugucguugcaggccuuauucaagcuuaccauguucguguuccuggugcugcugccccuggugagcagccagugcgugaaccugaccacccggacccagcugccaccagccuacaccaacagcuucacccggggcgucuacuaccccgacaagguguuccggagcagcguccugcacagcacccaggaccuguuccugcccuucuucagcaacgugaccugguuccacgccauccacgugagcggcaccaacggcaccaagcgguucgacaaccccgugcugcccuucaacgacggcguguacuucgccagcaccgagaagagcaacaucauccggggcuggaucuucggcaccacccuggacagcaagacccagagccugcugaucgugaauaacgccaccaacguggugaucaaggugugcgaguuccaguucugcaacgaccccuuccugggcguguacuaccacaagaacaacaagagcuggauggagagcgaguuccggguguacagcagcgccaacaacugcaccuucgaguacgugagccagcccuuccugauggaccuggagggcaagcagggcaacuucaagaaccugcgggaguucguguucaagaacaucgacggcuacuucaagaucuacagcaagcacaccccaaucaaccuggugcgggaucugccccagggcuucucagcccuggagccccugguggaccugcccaucggcaucaacaucacccgguuccagacccugcuggcccugcaccggagcuaccugaccccaggcgacagcagcagcggguggacagcaggcgcggcugcuuacuacgugggcuaccugcagccccggaccuuccugcugaaguacaacgagaacggcaccaucaccgacgccguggacugcgcccuggacccucugagcgagaccaagugcacccugaagagcuucaccguggagaagggcaucuaccagaccagcaacuuccgggugcagcccaccgagagcaucgugcgguuccccaacaucaccaaccugugccccuucggcgagguguucaacgccacccgguucgccagcguguacgccuggaaccggaagcggaucagcaacugcguggccgacuacagcgugcuguacaacagcgccagcuucagcaccuucaagugcuacggcgugagccccaccaagcugaacgaccugugcuucaccaacguguacgccgacagcuucgugauccguggcgacgaggugcggcagaucgcacccggccagacaggcaagaucgccgacuacaacuacaagcugcccgacgacuucaccggcugcgugaucgccuggaacagcaacaaccucgacagcaaggugggcggcaacuacaacuaccuguaccggcuguuccggaagagcaaccugaagcccuucgagcgggacaucagcaccgagaucuaccaagccggcuccaccccuugcaacggcguggagggcuucaacugcuacuucccucugcagagcuacggcuuccagcccaccaacggcgugggcuaccagcccuaccgggugguggugcugagcuucgagcugcugcacgccccagccaccguguguggccccaagaagagcaccaaccuggugaagaacaagugcgugaacuucaacuucaacggccuuaccggcaccggcgugcugaccgagagcaacaagaaauuccugcccuuucagcaguucggccgggacaucgccgacaccaccgacgcugugcgggauccccagacccuggagauccuggacaucaccccuugcagcuucggcggcgugagcgugaucaccccaggcaccaacaccagcaaccagguggccgugcuguaccaggacgugaacugcaccgaggugcccguggccauccacgccgaccagcugacacccaccuggcgggucuacagcaccggcagcaacguguuccagacccgggccgguugccugaucggcgccgagcacgugaacaacagcuacgagugcgacauccccaucggcgccggcaucugugccagcuaccagacccagaccaauucaccccggagggcaaggagcguggccagccagagcaucaucgccuacaccaugagccugggcgccgagaacagcguggccuacagcaacaacagcaucgccauccccaccaacuucaccaucagcgugaccaccgagauucugcccgugagcaugaccaagaccagcguggacugcaccauguacaucugcggcgacagcaccgagugcagcaaccugcugcugcaguacggcagcuucugcacccagcugaaccgggcccugaccggcaucgccguggagcaggacaagaacacccaggagguguucgcccaggugaagcagaucuacaagaccccucccaucaaggacuucggcggcuucaacuucagccagauccugcccgaccccagcaagcccagcaagcggagcuucaucgaggaccugcuguucaacaaggugacccuagccgacgccggcuucaucaagcaguacggcgacugccucggcgacauagccgcccgggaccugaucugcgcccagaaguucaacggccugaccgugcugccuccccugcugaccgacgagaugaucgcccaguacaccagcgcccuguuagccggaaccaucaccagcggcuggacuuucggcgcuggagccgcucugcagauccccuucgccaugcagauggccuaccgguucaacggcaucggcgugacccagaacgugcuguacgagaaccagaagcugaucgccaaccaguucaacagcgccaucggcaagauccaggacagccugagcagcaccgcuagcgcccugggcaagcugcaggacguggugaaccagaacgcccaggcccugaacacccuggugaagcagcugagcagcaacuucggcgccaucagcagcgugcugaacgacauccugagccggcuggacccucccgaggccgaggugcagaucgaccggcugaucacuggccggcugcagagccugcagaccuacgugacccagcagcugauccgggccgccgagauucgggccagcgccaaccuggccgccaccaagaugagcgagugcgugcugggccagagcaagcggguggacuucugcggcaagggcuaccaccugaugagcuuuccccagagcgcaccccacggagugguguuccugcacgugaccuacgugcccgcccaggagaagaacuucaccaccgccccagccaucugccacgacggcaaggcccacuuuccccgggagggcguguucgugagcaacggcacccacugguucgugacccagcggaacuucuacgagccccagaucaucaccaccgacaacaccuucgugagcggcaacugcgacguggugaucggcaucgugaacaacaccguguacgauccccugcagcccgagcuggacagcuucaaggaggagcuggacaaguacuucaagaaucacaccagccccgacguggaccugggcgacaucagcggcaucaacgccagcguggugaacauccagaaggagaucgaucggcugaacgagguggccaagaaccugaacgagagccugaucgaccugcaggagcugggcaaguacgagcaguacaucaaguggcccugguacaucuggcugggcuucaucgccggccugaucgccaucgugauggugaccaucaugcugugcugcaugaccagcugcugcagcugccugaagggcuguugcagcugcggcagcugcugcaaguucgacgaggacgacagcgagcccgugcugaagggcgugaagcugcacuacaccugaggacuagucccuguucccagagcccacuuuuuuuucuuuuuuugaaauaaaauagccugucuuucagaucuaaaaaaaaaaaaaaaaaaaaaaaaaaaaaaaaaaaaaaaaaaaaaaaaaaaaaaaaaaaaaaaaaaaaaaaaaaaaaaaaaaaaaaaaaaaaaaaaaaaa

SEQ ID NO: 24874 - RNA, 4070 nt, Artificial Sequence
  SARS-CoV-2/Wuhan/WIV05/2019__EPI_ISL_402128 spike protein mRNA gc (1-1273)(K986P_V987P_ D614G)
aggagagucccgcagucggcguccagcggcucugcuuguucgugugugugucguugcaggccuuauucaagcuuaccauguucguguuccuggugcugcugccccuggugagcagccagugcgugaaccugaccacccggacccagcugccaccagccuacaccaacagcuucacccggggcgucuacuaccccgacaagguguuccggagcagcguccugcacagcacccaggaccuguuccugcccuucuucagcaacgugaccugguuccacgccauccacgugagcggcaccaacggcaccaagcgguucgacaaccccgugcugcccuucaacgacggcguguacuucgccagcaccgagaagagcaacaucauccggggcuggaucuucggcaccacccuggacagcaagacccagagccugcugaucgugaauaacgccaccaacguggugaucaaggugugcgaguuccaguucugcaacgaccccuuccugggcguguacuaccacaagaacaacaagagcuggauggagagcgaguuccggguguacagcagcgccaacaacugcaccuucgaguacgugagccagcccuuccugauggaccuggagggcaagcagggcaacuucaagaaccugcgggaguucguguucaagaacaucgacggcuacuucaagaucuacagcaagcacaccccaaucaaccuggugcgggaucugccccagggcuucucagcccuggagccccugguggaccugcccaucggcaucaacaucacccgguuccagacccugcuggcccugcaccggagcuaccugaccccaggcgacagcagcagcggguggacagcaggcgcggcugcuuacuacgugggcuaccugcagccccggaccuuccugcugaaguacaacgagaacggcaccaucaccgacgccguggacugcgcccuggacccucugagcgagaccaagugcacccugaagagcuucaccguggagaagggcaucuaccagaccagcaacuuccgggugcagcccaccgagagcaucgugcgguuccccaacaucaccaaccugugccccuucggcgagguguucaacgccacccgguucgccagcguguacgccuggaaccggaagcggaucagcaacugcguggccgacuacagcgugcuguacaacagcgccagcuucagcaccuucaagugcuacggcgugagccccaccaagcugaacgaccugugcuucaccaacguguacgccgacagcuucgugauccguggcgacgaggugcggcagaucgcacccggccagacaggcaagaucgccgacuacaacuacaagcugcccgacgacuucaccggcugcgugaucgccuggaacagcaacaaccucgacagcaaggugggcggcaacuacaacuaccuguaccggcuguuccggaagagcaaccugaagcccuucgagcgggacaucagcaccgagaucuaccaagccggcuccaccccuugcaacggcguggagggcuucaacugcuacuucccucugcagagcuacggcuuccagcccaccaacggcgugggcuaccagcccuaccgggugguggugcugagcuucgagcugcugcacgccccagccaccguguguggccccaagaagagcaccaaccuggugaagaacaagugcgugaacuucaacuucaacggccuuaccggcaccggcgugcugaccgagagcaacaagaaauuccugcccuuucagcaguucggccgggacaucgccgacaccaccgacgcugugcgggauccccagacccuggagauccuggacaucaccccuugcagcuucggcggcgugagcgugaucaccccaggcaccaacaccagcaaccagguggccgugcuguaccagggcgugaacugcaccgaggugcccguggccauccacgccgaccagcugacacccaccuggcgggucuacagcaccggcagcaacguguuccagacccgggccgguugccugaucggcgccgagcacgugaacaacagcuacgagugcgacauccccaucggcgccggcaucugugccagcuaccagacccagaccaauucaccccggagggcaaggagcguggccagccagagcaucaucgccuacaccaugagccugggcgccgagaacagcguggccuacagcaacaacagcaucgccauccccaccaacuucaccaucagcgugaccaccgagauucugcccgugagcaugaccaagaccagcguggacugcaccauguacaucugcggcgacagcaccgagugcagcaaccugcugcugcaguacggcagcuucugcacccagcugaaccgggcccugaccggcaucgccguggagcaggacaagaacacccaggagguguucgcccaggugaagcagaucuacaagaccccucccaucaaggacuucggcggcuucaacuucagccagauccugcccgaccccagcaagcccagcaagcggagcuucaucgaggaccugcuguucaacaaggugacccuagccgacgccggcuucaucaagcaguacggcgacugccucggcgacauagccgcccgggaccugaucugcgcccagaaguucaacggccugaccgugcugccuccccugcugaccgacgagaugaucgcccaguacaccagcgcccuguuagccggaaccaucaccagcggcuggacuuucggcgcuggagccgcucugcagauccccuucgccaugcagauggccuaccgguucaacggcaucggcgugacccagaacgugcuguacgagaaccagaagcugaucgccaaccaguucaacagcgccaucggcaagauccaggacagccugagcagcaccgcuagcgcccugggcaagcugcaggacguggugaaccagaacgcccaggcccugaacacccuggugaagcagcugagcagcaacuucggcgccaucagcagcgugcugaacgacauccugagccggcuggacccucccgaggccgaggugcagaucgaccggcugaucacuggccggcugcagagccugcagaccuacgugacccagcagcugauccgggccgccgagauucgggccagcgccaaccuggccgccaccaagaugagcgagugcgugcugggccagagcaagcggguggacuucugcggcaagggcuaccaccugaugagcuuuccccagagcgcaccccacggagugguguuccugcacgugaccuacgugcccgcccaggagaagaacuucaccaccgccccagccaucugccacgacggcaaggcccacuuuccccgggagggcguguucgugagcaacggcacccacugguucgugacccagcggaacuucuacgagccccagaucaucaccaccgacaacaccuucgugagcggcaacugcgacguggugaucggcaucgugaacaacaccguguacgauccccugcagcccgagcuggacagcuucaaggaggagcuggacaaguacuucaagaaucacaccagccccgacguggaccugggcgacaucagcggcaucaacgccagcguggugaacauccagaaggagaucgaucggcugaacgagguggccaagaaccugaacgagagccugaucgaccugcaggagcugggcaaguacgagcaguacaucaaguggcccugguacaucuggcugggcuucaucgccggccugaucgccaucgugauggugaccaucaugcugugcugcaugaccagcugcugcagcugccugaagggcuguugcagcugcggcagcugcugcaaguucgacgaggacgacagcgagcccgugcugaagggcgugaagcugcacuacaccugaggacuagucccuguucccagagcccacuuuuuuuucuuuuuuugaaauaaaauagccugucuuucagaucuaaaaaaaaaaaaaaaaaaaaaaaaaaaaaaaaaaaaaaaaaaaaaaaaaaaaaaaaaaaaaaaaaaaaaaaaaaaaaaaaaaaaaaaaaaaaaaaaaaaa

SEQ ID NO: 24875 - RNA, 4070 nt, Artificial Sequence
  SARS-CoV-2/Wuhan/WIV05/2019__EPI_ISL_402128 spike protein mRNA gc (1-1273)(K986P_V987P_A222V_D614G)
aggagagucccgcagucggcguccagcggcucugcuuguucgugugugugucguugcaggccuuauucaagcuuaccauguucguguuccuggugcugcugccccuggugagcagccagugcgugaaccugaccacccggacccagcugccaccagccuacaccaacagcuucacccggggcgucuacuaccccgacaagguguuccggagcagcguccugcacagcacccaggaccuguuccugcccuucuucagcaacgugaccugguuccacgccauccacgugagcggcaccaacggcaccaagcgguucgacaaccccgugcugcccuucaacgacggcguguacuucgccagcaccgagaagagcaacaucauccggggcuggaucuucggcaccacccuggacagcaagacccagagccugcugaucgugaauaacgccaccaacguggugaucaaggugugcgaguuccaguucugcaacgaccccuuccugggcguguacuaccacaagaacaacaagagcuggauggagagcgaguuccggguguacagcagcgccaacaacugcaccuucgaguacgugagccagcccuuccugauggaccuggagggcaagcagggcaacuucaagaaccugcgggaguucguguucaagaacaucgacggcuacuucaagaucuacagcaagcacaccccaaucaaccuggugcgggaucugccccagggcuucucagugcuggagccccugguggaccugcccaucggcaucaacaucacccgguuccagacccugcuggcccugcaccggagcuaccugaccccaggcgacagcagcagcggguggacagcaggcgcggcugcuuacuacgugggcuaccugcagccccggaccuuccugcugaaguacaacgagaacggcaccaucaccgacgccguggacugcgcccuggacccucugagcgagaccaagugcacccugaagagcuucaccguggagaagggcaucuaccagaccagcaacuuccgggugcagcccaccgagagcaucgugcgguuccccaacaucaccaaccugugccccuucggcgagguguucaacgccacccgguucgccagcguguacgccuggaaccggaagcggaucagcaacugcguggccgacuacagcgugcuguacaacagcgccagcuucagcaccuucaagugcuacggcgugagccccaccaagcugaacgaccugugcuucaccaacguguacgccgacagcuucgugauccguggcgacgaggugcggcagaucgcacccggccagacaggcaagaucgccgacuacaacuacaagcugcccgacgacuucaccggcugcgugaucgccuggaacagcaacaaccucgacagcaaggugggcggcaacuacaacuaccuguaccggcuguuccggaagagcaaccugaagcccuucgagcgggacaucagcaccgagaucuaccaagccggcuccaccccuugcaacggcguggagggcuucaacugcuacuucccucugcagagcuacggcuuccagcccaccaacggcgugggcuaccagcccuaccgggugguggugcugagcuucgagcugcugcacgccccagccaccguguguggccccaagaagagcaccaaccuggugaagaacaagugcgugaacuucaacuucaacggccuuaccggcaccggcgugcugaccgagagcaacaagaaauuccugcccuuucagcaguucggccgggacaucgccgacaccaccgacgcugugcgggauccccagacccuggagauccuggacaucaccccuugcagcuucggcggcgugagcgugaucaccccaggcaccaacaccagcaaccagguggccgugcuguaccagggcgugaacugcaccgaggugcccguggccauccacgccgaccagcugacacccaccuggcgggucuacagcaccggcagcaacguguuccagacccgggccgguugccugaucggcgccgagcacgugaacaacagcuacgagugcgacauccccaucggcgccggcaucugugccagcuaccagacccagaccaauucaccccggagggcaaggagcguggccagccagagcaucaucgccuacaccaugagccugggcgccgagaacagcguggccuacagcaacaacagcaucgccauccccaccaacuucaccaucagcgugaccaccgagauucugcccgugagcaugaccaagaccagcguggacugcaccauguacaucugcggcgacagcaccgagugcagcaaccugcugcugcaguacggcagcuucugcacccagcugaaccgggcccugaccggcaucgccguggagcaggacaagaacacccaggagguguucgcccaggugaagcagaucuacaagaccccucccaucaaggacuucggcggcuucaacuucagccagauccugcccgaccccagcaagcccagcaagcggagcuucaucgaggaccugcuguucaacaaggugacccuagccgacgccggcuucaucaagcaguacggcgacugccucggcgacauagccgcccgggaccugaucugcgcccagaaguucaacggccugaccgugcugccuccccugcugaccgacgagaugaucgcccaguacaccagcgcccuguuagccggaaccaucaccagcggcuggacuuucggcgcuggagccgcucugcagauccccuucgccaugcagauggccuaccgguucaacggcaucggcgugacccagaacgugcuguacgagaaccagaagcugaucgccaaccaguucaacagcgccaucggcaagauccaggacagccugagcagcaccgcuagcgcccugggcaagcugcaggacguggugaaccagaacgcccaggcccugaacacccuggugaagcagcugagcagcaacuucggcgccaucagcagcgugcugaacgacauccugagccggcuggacccucccgaggccgaggugcagaucgaccggcugaucacuggccggcugcagagccugcagaccuacgugacccagcagcugauccgggccgccgagauucgggccagcgccaaccuggccgccaccaagaugagcgagugcgugcugggccagagcaagcggguggacuucugcggcaagggcuaccaccugaugagcuuuccccagagcgcaccccacggagugguguuccugcacgugaccuacgugcccgcccaggagaagaacuucaccaccgccccagccaucugccacgacggcaaggcccacuuuccccgggagggcguguucgugagcaacggcacccacugguucgugacccagcggaacuucuacgagccccagaucaucaccaccgacaacaccuucgugagcggcaacugcgacguggugaucggcaucgugaacaacaccguguacgauccccugcagcccgagcuggacagcuucaaggaggagcuggacaaguacuucaagaaucacaccagccccgacguggaccugggcgacaucagcggcaucaacgccagcguggugaacauccagaaggagaucgaucggcugaacgagguggccaagaaccugaacgagagccugaucgaccugcaggagcugggcaaguacgagcaguacaucaaguggcccugguacaucuggcugggcuucaucgccggccugaucgccaucgugauggugaccaucaugcugugcugcaugaccagcugcugcagcugccugaagggcuguugcagcugcggcagcugcugcaaguucgacgaggacgacagcgagcccgugcugaagggcgugaagcugcacuacaccugaggacuagucccuguucccagagcccacuuuuuuuucuuuuuuugaaauaaaauagccugucuuucagaucuaaaaaaaaaaaaaaaaaaaaaaaaaaaaaaaaaaaaaaaaaaaaaaaaaaaaaaaaaaaaaaaaaaaaaaaaaaaaaaaaaaaaaaaaaaaaaaaaaaaa

SEQ ID NO: 24876 - RNA, 4070 nt, Artificial Sequence
  SARS-CoV-2/Wuhan/WIV05/2019__EPI_ISL_402128 spike protein mRNA gc (1-1273)(K986P_V987P_N439K_D614G)
aggagagucccgcagucggcguccagcggcucugcuuguucgugugugugucguugcaggccuuauucaagcuuaccauguucguguuccuggugcugcugccccuggugagcagccagugcgugaaccugaccacccggacccagcugccaccagccuacaccaacagcuucacccggggcgucuacuaccccgacaagguguuccggagcagcguccugcacagcacccaggaccuguuccugcccuucuucagcaacgugaccugguuccacgccauccacgugagcggcaccaacggcaccaagcgguucgacaaccccgugcugcccuucaacgacggcguguacuucgccagcaccgagaagagcaacaucauccggggcuggaucuucggcaccacccuggacagcaagacccagagccugcugaucgugaauaacgccaccaacguggugaucaaggugugcgaguuccaguucugcaacgaccccuuccugggcguguacuaccacaagaacaacaagagcuggauggagagcgaguuccggguguacagcagcgccaacaacugcaccuucgaguacgugagccagcccuuccugauggaccuggagggcaagcagggcaacuucaagaaccugcgggaguucguguucaagaacaucgacggcuacuucaagaucuacagcaagcacaccccaaucaaccuggugcgggaucugccccagggcuucucagcccuggagccccugguggaccugcccaucggcaucaacaucacccgguuccagacccugcuggcccugcaccggagcuaccugaccccaggcgacagcagcagcggguggacagcaggcgcggcugcuuacuacgugggcuaccugcagccccggaccuuccugcugaaguacaacgagaacggcaccaucaccgacgccguggacugcgcccuggacccucugagcgagaccaagugcacccugaagagcuucaccguggagaagggcaucuaccagaccagcaacuuccgggugcagcccaccgagagcaucgugcgguuccccaacaucaccaaccugugccccuucggcgagguguucaacgccacccgguucgccagcguguacgccuggaaccggaagcggaucagcaacugcguggccgacuacagcgugcuguacaacagcgccagcuucagcaccuucaagugcuacggcgugagccccaccaagcugaacgaccugugcuucaccaacguguacgccgacagcuucgugauccguggcgacgaggugcggcagaucgcacccggccagacaggcaagaucgccgacuacaacuacaagcugcccgacgacuucaccggcugcgugaucgccuggaacagcaagaaccucgacagcaaggugggcggcaacuacaacuaccuguaccggcuguuccggaagagcaaccugaagcccuucgagcgggacaucagcaccgagaucuaccaagccggcuccaccccuugcaacggcguggagggcuucaacugcuacuucccucugcagagcuacggcuuccagcccaccaacggcgugggcuaccagcccuaccgggugguggugcugagcuucgagcugcugcacgccccagccaccguguguggccccaagaagagcaccaaccuggugaagaacaagugcgugaacuucaacuucaacggccuuaccggcaccggcgugcugaccgagagcaacaagaaauuccugcccuuucagcaguucggccgggacaucgccgacaccaccgacgcugugcgggauccccagacccuggagauccuggacaucaccccuugcagcuucggcggcgugagcgugaucaccccaggcaccaacaccagcaaccagguggccgugcuguaccagggcgugaacugcaccgaggugcccguggccauccacgccgaccagcugacacccaccuggcgggucuacagcaccggcagcaacguguuccagacccgggccgguugccugaucggcgccgagcacgugaacaacagcuacgagugcgacauccccaucggcgccggcaucugugccagcuaccagacccagaccaauucaccccggagggcaaggagcguggccagccagagcaucaucgccuacaccaugagccugggcgccgagaacagcguggccuacagcaacaacagcaucgccauccccaccaacuucaccaucagcgugaccaccgagauucugcccgugagcaugaccaagaccagcguggacugcaccauguacaucugcggcgacagcaccgagugcagcaaccugcugcugcaguacggcagcuucugcacccagcugaaccgggcccugaccggcaucgccguggagcaggacaagaacacccaggagguguucgcccaggugaagcagaucuacaagaccccucccaucaaggacuucggcggcuucaacuucagccagauccugcccgaccccagcaagcccagcaagcggagcuucaucgaggaccugcuguucaacaaggugacccuagccgacgccggcuucaucaagcaguacggcgacugccucggcgacauagccgcccgggaccugaucugcgcccagaaguucaacggccugaccgugcugccuccccugcugaccgacgagaugaucgcccaguacaccagcgcccuguuagccggaaccaucaccagcggcuggacuuucggcgcuggagccgcucugcagauccccuucgccaugcagauggccuaccgguucaacggcaucggcgugacccagaacgugcuguacgagaaccagaagcugaucgccaaccaguucaacagcgccaucggcaagauccaggacagccugagcagcaccgcuagcgcccugggcaagcugcaggacguggugaaccagaacgcccaggcccugaacacccuggugaagcagcugagcagcaacuucggcgccaucagcagcgugcugaacgacauccugagccggcuggacccucccgaggccgaggugcagaucgaccggcugaucacuggccggcugcagagccugcagaccuacgugacccagcagcugauccgggccgccgagauucgggccagcgccaaccuggccgccaccaagaugagcgagugcgugcugggccagagcaagcggguggacuucugcggcaagggcuaccaccugaugagcuuuccccagagcgcaccccacggagugguguuccugcacgugaccuacgugcccgcccaggagaagaacuucaccaccgccccagccaucugccacgacggcaaggcccacuuuccccgggagggcguguucgugagcaacggcacccacugguucgugacccagcggaacuucuacgagccccagaucaucaccaccgacaacaccuucgugagcggcaacugcgacguggugaucggcaucgugaacaacaccguguacgauccccugcagcccgagcuggacagcuucaaggaggagcuggacaaguacuucaagaaucacaccagccccgacguggaccugggcgacaucagcggcaucaacgccagcguggugaacauccagaaggagaucgaucggcugaacgagguggccaagaaccugaacgagagccugaucgaccugcaggagcugggcaaguacgagcaguacaucaaguggcccugguacaucuggcugggcuucaucgccggccugaucgccaucgugauggugaccaucaugcugugcugcaugaccagcugcugcagcugccugaagggcuguugcagcugcggcagcugcugcaaguucgacgaggacgacagcgagcccgugcugaagggcgugaagcugcacuacaccugaggacuagucccuguucccagagcccacuuuuuuuucuuuuuuugaaauaaaauagccugucuuucagaucuaaaaaaaaaaaaaaaaaaaaaaaaaaaaaaaaaaaaaaaaaaaaaaaaaaaaaaaaaaaaaaaaaaaaaaaaaaaaaaaaaaaaaaaaaaaaaaaaaaaa

SEQ ID NO: 24877 - RNA, 4070 nt, Artificial Sequence
  SARS-CoV-2/Wuhan/WIV05/2019__EPI_ISL_402128 spike protein mRNA gc (1-1273)(K986P_V987P_S477N_D614G)
aggagagucccgcagucggcguccagcggcucugcuuguucgugugugugucguugcaggccuuauucaagcuuaccauguucguguuccuggugcugcugccccuggugagcagccagugcgugaaccugaccacccggacccagcugccaccagccuacaccaacagcuucacccggggcgucuacuaccccgacaagguguuccggagcagcguccugcacagcacccaggaccuguuccugcccuucuucagcaacgugaccugguuccacgccauccacgugagcggcaccaacggcaccaagcgguucgacaaccccgugcugcccuucaacgacggcguguacuucgccagcaccgagaagagcaacaucauccggggcuggaucuucggcaccacccuggacagcaagacccagagccugcugaucgugaauaacgccaccaacguggugaucaaggugugcgaguuccaguucugcaacgaccccuuccugggcguguacuaccacaagaacaacaagagcuggauggagagcgaguuccggguguacagcagcgccaacaacugcaccuucgaguacgugagccagcccuuccugauggaccuggagggcaagcagggcaacuucaagaaccugcgggaguucguguucaagaacaucgacggcuacuucaagaucuacagcaagcacaccccaaucaaccuggugcgggaucugccccagggcuucucagcccuggagccccugguggaccugcccaucggcaucaacaucacccgguuccagacccugcuggcccugcaccggagcuaccugaccccaggcgacagcagcagcggguggacagcaggcgcggcugcuuacuacgugggcuaccugcagccccggaccuuccugcugaaguacaacgagaacggcaccaucaccgacgccguggacugcgcccuggacccucugagcgagaccaagugcacccugaagagcuucaccguggagaagggcaucuaccagaccagcaacuuccgggugcagcccaccgagagcaucgugcgguuccccaacaucaccaaccugugccccuucggcgagguguucaacgccacccgguucgccagcguguacgccuggaaccggaagcggaucagcaacugcguggccgacuacagcgugcuguacaacagcgccagcuucagcaccuucaagugcuacggcgugagccccaccaagcugaacgaccugugcuucaccaacguguacgccgacagcuucgugauccguggcgacgaggugcggcagaucgcacccggccagacaggcaagaucgccgacuacaacuacaagcugcccgacgacuucaccggcugcgugaucgccuggaacagcaacaaccucgacagcaaggugggcggcaacuacaacuaccuguaccggcuguuccggaagagcaaccugaagcccuucgagcgggacaucagcaccgagaucuaccaagccggcaacaccccuugcaacggcguggagggcuucaacugcuacuucccucugcagagcuacggcuuccagcccaccaacggcgugggcuaccagcccuaccgggugguggugcugagcuucgagcugcugcacgccccagccaccguguguggccccaagaagagcaccaaccuggugaagaacaagugcgugaacuucaacuucaacggccuuaccggcaccggcgugcugaccgagagcaacaagaaauuccugcccuuucagcaguucggccgggacaucgccgacaccaccgacgcugugcgggauccccagacccuggagauccuggacaucaccccuugcagcuucggcggcgugagcgugaucaccccaggcaccaacaccagcaaccagguggccgugcuguaccagggcgugaacugcaccgaggugcccguggccauccacgccgaccagcugacacccaccuggcgggucuacagcaccggcagcaacguguuccagacccgggccgguugccugaucggcgccgagcacgugaacaacagcuacgagugcgacauccccaucggcgccggcaucugugccagcuaccagacccagaccaauucaccccggagggcaaggagcguggccagccagagcaucaucgccuacaccaugagccugggcgccgagaacagcguggccuacagcaacaacagcaucgccauccccaccaacuucaccaucagcgugaccaccgagauucugcccgugagcaugaccaagaccagcguggacugcaccauguacaucugcggcgacagcaccgagugcagcaaccugcugcugcaguacggcagcuucugcacccagcugaaccgggcccugaccggcaucgccguggagcaggacaagaacacccaggagguguucgcccaggugaagcagaucuacaagaccccucccaucaaggacuucggcggcuucaacuucagccagauccugcccgaccccagcaagcccagcaagcggagcuucaucgaggaccugcuguucaacaaggugacccuagccgacgccggcuucaucaagcaguacggcgacugccucggcgacauagccgcccgggaccugaucugcgcccagaaguucaacggccugaccgugcugccuccccugcugaccgacgagaugaucgcccaguacaccagcgcccuguuagccggaaccaucaccagcggcuggacuuucggcgcuggagccgcucugcagauccccuucgccaugcagauggccuaccgguucaacggcaucggcgugacccagaacgugcuguacgagaaccagaagcugaucgccaaccaguucaacagcgccaucggcaagauccaggacagccugagcagcaccgcuagcgcccugggcaagcugcaggacguggugaaccagaacgcccaggcccugaacacccuggugaagcagcugagcagcaacuucggcgccaucagcagcgugcugaacgacauccugagccggcuggacccucccgaggccgaggugcagaucgaccggcugaucacuggccggcugcagagccugcagaccuacgugacccagcagcugauccgggccgccgagauucgggccagcgccaaccuggccgccaccaagaugagcgagugcgugcugggccagagcaagcggguggacuucugcggcaagggcuaccaccugaugagcuuuccccagagcgcaccccacggagugguguuccugcacgugaccuacgugcccgcccaggagaagaacuucaccaccgccccagccaucugccacgacggcaaggcccacuuuccccgggagggcguguucgugagcaacggcacccacugguucgugacccagcggaacuucuacgagccccagaucaucaccaccgacaacaccuucgugagcggcaacugcgacguggugaucggcaucgugaacaacaccguguacgauccccugcagcccgagcuggacagcuucaaggaggagcuggacaaguacuucaagaaucacaccagccccgacguggaccugggcgacaucagcggcaucaacgccagcguggugaacauccagaaggagaucgaucggcugaacgagguggccaagaaccugaacgagagccugaucgaccugcaggagcugggcaaguacgagcaguacaucaaguggcccugguacaucuggcugggcuucaucgccggccugaucgccaucgugauggugaccaucaugcugugcugcaugaccagcugcugcagcugccugaagggcuguugcagcugcggcagcugcugcaaguucgacgaggacgacagcgagcccgugcugaagggcgugaagcugcacuacaccugaggacuagucccuguucccagagcccacuuuuuuuucuuuuuuugaaauaaaauagccugucuuucagaucuaaaaaaaaaaaaaaaaaaaaaaaaaaaaaaaaaaaaaaaaaaaaaaaaaaaaaaaaaaaaaaaaaaaaaaaaaaaaaaaaaaaaaaaaaaaaaaaaaaaa

SEQ ID NO: 24878 - RNA, 4070 nt, Artificial Sequence
  SARS-CoV-2/Wuhan/WIV05/2019__EPI_ISL_402128 spike protein mRNA gc (1-1273)(K986P_V987P_N501Y_D614G)
aggagagucccgcagucggcguccagcggcucugcuuguucgugugugugucguugcaggccuuauucaagcuuaccauguucguguuccuggugcugcugccccuggugagcagccagugcgugaaccugaccacccggacccagcugccaccagccuacaccaacagcuucacccggggcgucuacuaccccgacaagguguuccggagcagcguccugcacagcacccaggaccuguuccugcccuucuucagcaacgugaccugguuccacgccauccacgugagcggcaccaacggcaccaagcgguucgacaaccccgugcugcccuucaacgacggcguguacuucgccagcaccgagaagagcaacaucauccggggcuggaucuucggcaccacccuggacagcaagacccagagccugcugaucgugaauaacgccaccaacguggugaucaaggugugcgaguuccaguucugcaacgaccccuuccugggcguguacuaccacaagaacaacaagagcuggauggagagcgaguuccggguguacagcagcgccaacaacugcaccuucgaguacgugagccagcccuuccugauggaccuggagggcaagcagggcaacuucaagaaccugcgggaguucguguucaagaacaucgacggcuacuucaagaucuacagcaagcacaccccaaucaaccuggugcgggaucugccccagggcuucucagcccuggagccccugguggaccugcccaucggcaucaacaucacccgguuccagacccugcuggcccugcaccggagcuaccugaccccaggcgacagcagcagcggguggacagcaggcgcggcugcuuacuacgugggcuaccugcagccccggaccuuccugcugaaguacaacgagaacggcaccaucaccgacgccguggacugcgcccuggacccucugagcgagaccaagugcacccugaagagcuucaccguggagaagggcaucuaccagaccagcaacuuccgggugcagcccaccgagagcaucgugcgguuccccaacaucaccaaccugugccccuucggcgagguguucaacgccacccgguucgccagcguguacgccuggaaccggaagcggaucagcaacugcguggccgacuacagcgugcuguacaacagcgccagcuucagcaccuucaagugcuacggcgugagccccaccaagcugaacgaccugugcuucaccaacguguacgccgacagcuucgugauccguggcgacgaggugcggcagaucgcacccggccagacaggcaagaucgccgacuacaacuacaagcugcccgacgacuucaccggcugcgugaucgccuggaacagcaacaaccucgacagcaaggugggcggcaacuacaacuaccuguaccggcuguuccggaagagcaaccugaagcccuucgagcgggacaucagcaccgagaucuaccaagccggcuccaccccuugcaacggcguggagggcuucaacugcuacuucccucugcagagcuacggcuuccagcccaccuacggcgugggcuaccagcccuaccgggugguggugcugagcuucgagcugcugcacgccccagccaccguguguggccccaagaagagcaccaaccuggugaagaacaagugcgugaacuucaacuucaacggccuuaccggcaccggcgugcugaccgagagcaacaagaaauuccugcccuuucagcaguucggccgggacaucgccgacaccaccgacgcugugcgggauccccagacccuggagauccuggacaucaccccuugcagcuucggcggcgugagcgugaucaccccaggcaccaacaccagcaaccagguggccgugcuguaccagggcgugaacugcaccgaggugcccguggccauccacgccgaccagcugacacccaccuggcgggucuacagcaccggcagcaacguguuccagacccgggccgguugccugaucggcgccgagcacgugaacaacagcuacgagugcgacauccccaucggcgccggcaucugugccagcuaccagacccagaccaauucaccccggagggcaaggagcguggccagccagagcaucaucgccuacaccaugagccugggcgccgagaacagcguggccuacagcaacaacagcaucgccauccccaccaacuucaccaucagcgugaccaccgagauucugcccgugagcaugaccaagaccagcguggacugcaccauguacaucugcggcgacagcaccgagugcagcaaccugcugcugcaguacggcagcuucugcacccagcugaaccgggcccugaccggcaucgccguggagcaggacaagaacacccaggagguguucgcccaggugaagcagaucuacaagaccccucccaucaaggacuucggcggcuucaacuucagccagauccugcccgaccccagcaagcccagcaagcggagcuucaucgaggaccugcuguucaacaaggugacccuagccgacgccggcuucaucaagcaguacggcgacugccucggcgacauagccgcccgggaccugaucugcgcccagaaguucaacggccugaccgugcugccuccccugcugaccgacgagaugaucgcccaguacaccagcgcccuguuagccggaaccaucaccagcggcuggacuuucggcgcuggagccgcucugcagauccccuucgccaugcagauggccuaccgguucaacggcaucggcgugacccagaacgugcuguacgagaaccagaagcugaucgccaaccaguucaacagcgccaucggcaagauccaggacagccugagcagcaccgcuagcgcccugggcaagcugcaggacguggugaaccagaacgcccaggcccugaacacccuggugaagcagcugagcagcaacuucggcgccaucagcagcgugcugaacgacauccugagccggcuggacccucccgaggccgaggugcagaucgaccggcugaucacuggccggcugcagagccugcagaccuacgugacccagcagcugauccgggccgccgagauucgggccagcgccaaccuggccgccaccaagaugagcgagugcgugcugggccagagcaagcggguggacuucugcggcaagggcuaccaccugaugagcuuuccccagagcgcaccccacggagugguguuccugcacgugaccuacgugcccgcccaggagaagaacuucaccaccgccccagccaucugccacgacggcaaggcccacuuuccccgggagggcguguucgugagcaacggcacccacugguucgugacccagcggaacuucuacgagccccagaucaucaccaccgacaacaccuucgugagcggcaacugcgacguggugaucggcaucgugaacaacaccguguacgauccccugcagcccgagcuggacagcuucaaggaggagcuggacaaguacuucaagaaucacaccagccccgacguggaccugggcgacaucagcggcaucaacgccagcguggugaacauccagaaggagaucgaucggcugaacgagguggccaagaaccugaacgagagccugaucgaccugcaggagcugggcaaguacgagcaguacaucaaguggcccugguacaucuggcugggcuucaucgccggccugaucgccaucgugauggugaccaucaugcugugcugcaugaccagcugcugcagcugccugaagggcuguugcagcugcggcagcugcugcaaguucgacgaggacgacagcgagcccgugcugaagggcgugaagcugcacuacaccugaggacuagucccuguucccagagcccacuuuuuuuucuuuuuuugaaauaaaauagccugucuuucagaucuaaaaaaaaaaaaaaaaaaaaaaaaaaaaaaaaaaaaaaaaaaaaaaaaaaaaaaaaaaaaaaaaaaaaaaaaaaaaaaaaaaaaaaaaaaaaaaaaaaaa

SEQ ID NO: 24879 - RNA, 4064 nt, Artificial Sequence
  SARS-CoV-2/Wuhan/WIV05/2019__EPI_ISL_402128 spike protein mRNA gc (1-1273)(K986P_V987P_H69del_V70del_D614G)
aggagagucccgcagucggcguccagcggcucugcuuguucgugugugugucguugcaggccuuauucaagcuuaccauguucguguuccuggugcugcugccccuggugagcagccagugcgugaaccugaccacccggacccagcugccaccagccuacaccaacagcuucacccggggcgucuacuaccccgacaagguguuccggagcagcguccugcacagcacccaggaccuguuccugcccuucuucagcaacgugaccugguuccacgccaucagcggcaccaacggcaccaagcgguucgacaaccccgugcugcccuucaacgacggcguguacuucgccagcaccgagaagagcaacaucauccggggcuggaucuucggcaccacccuggacagcaagacccagagccugcugaucgugaauaacgccaccaacguggugaucaaggugugcgaguuccaguucugcaacgaccccuuccugggcguguacuaccacaagaacaacaagagcuggauggagagcgaguuccggguguacagcagcgccaacaacugcaccuucgaguacgugagccagcccuuccugauggaccuggagggcaagcagggcaacuucaagaaccugcgggaguucguguucaagaacaucgacggcuacuucaagaucuacagcaagcacaccccaaucaaccuggugcgggaucugccccagggcuucucagcccuggagccccugguggaccugcccaucggcaucaacaucacccgguuccagacccugcuggcccugcaccggagcuaccugaccccaggcgacagcagcagcggguggacagcaggcgcggcugcuuacuacgugggcuaccugcagccccggaccuuccugcugaaguacaacgagaacggcaccaucaccgacgccguggacugcgcccuggacccucugagcgagaccaagugcacccugaagagcuucaccguggagaagggcaucuaccagaccagcaacuuccgggugcagcccaccgagagcaucgugcgguuccccaacaucaccaaccugugccccuucggcgagguguucaacgccacccgguucgccagcguguacgccuggaaccggaagcggaucagcaacugcguggccgacuacagcgugcuguacaacagcgccagcuucagcaccuucaagugcuacggcgugagccccaccaagcugaacgaccugugcuucaccaacguguacgccgacagcuucgugauccguggcgacgaggugcggcagaucgcacccggccagacaggcaagaucgccgacuacaacuacaagcugcccgacgacuucaccggcugcgugaucgccuggaacagcaacaaccucgacagcaaggugggcggcaacuacaacuaccuguaccggcuguuccggaagagcaaccugaagcccuucgagcgggacaucagcaccgagaucuaccaagccggcuccaccccuugcaacggcguggagggcuucaacugcuacuucccucugcagagcuacggcuuccagcccaccaacggcgugggcuaccagcccuaccgggugguggugcugagcuucgagcugcugcacgccccagccaccguguguggccccaagaagagcaccaaccuggugaagaacaagugcgugaacuucaacuucaacggccuuaccggcaccggcgugcugaccgagagcaacaagaaauuccugcccuuucagcaguucggccgggacaucgccgacaccaccgacgcugugcgggauccccagacccuggagauccuggacaucaccccuugcagcuucggcggcgugagcgugaucaccccaggcaccaacaccagcaaccagguggccgugcuguaccagggcgugaacugcaccgaggugcccguggccauccacgccgaccagcugacacccaccuggcgggucuacagcaccggcagcaacguguuccagacccgggccgguugccugaucggcgccgagcacgugaacaacagcuacgagugcgacauccccaucggcgccggcaucugugccagcuaccagacccagaccaauucaccccggagggcaaggagcguggccagccagagcaucaucgccuacaccaugagccugggcgccgagaacagcguggccuacagcaacaacagcaucgccauccccaccaacuucaccaucagcgugaccaccgagauucugcccgugagcaugaccaagaccagcguggacugcaccauguacaucugcggcgacagcaccgagugcagcaaccugcugcugcaguacggcagcuucugcacccagcugaaccgggcccugaccggcaucgccguggagcaggacaagaacacccaggagguguucgcccaggugaagcagaucuacaagaccccucccaucaaggacuucggcggcuucaacuucagccagauccugcccgaccccagcaagcccagcaagcggagcuucaucgaggaccugcuguucaacaaggugacccuagccgacgccggcuucaucaagcaguacggcgacugccucggcgacauagccgcccgggaccugaucugcgcccagaaguucaacggccugaccgugcugccuccccugcugaccgacgagaugaucgcccaguacaccagcgcccuguuagccggaaccaucaccagcggcuggacuuucggcgcuggagccgcucugcagauccccuucgccaugcagauggccuaccgguucaacggcaucggcgugacccagaacgugcuguacgagaaccagaagcugaucgccaaccaguucaacagcgccaucggcaagauccaggacagccugagcagcaccgcuagcgcccugggcaagcugcaggacguggugaaccagaacgcccaggcccugaacacccuggugaagcagcugagcagcaacuucggcgccaucagcagcgugcugaacgacauccugagccggcuggacccucccgaggccgaggugcagaucgaccggcugaucacuggccggcugcagagccugcagaccuacgugacccagcagcugauccgggccgccgagauucgggccagcgccaaccuggccgccaccaagaugagcgagugcgugcugggccagagcaagcggguggacuucugcggcaagggcuaccaccugaugagcuuuccccagagcgcaccccacggagugguguuccugcacgugaccuacgugcccgcccaggagaagaacuucaccaccgccccagccaucugccacgacggcaaggcccacuuuccccgggagggcguguucgugagcaacggcacccacugguucgugacccagcggaacuucuacgagccccagaucaucaccaccgacaacaccuucgugagcggcaacugcgacguggugaucggcaucgugaacaacaccguguacgauccccugcagcccgagcuggacagcuucaaggaggagcuggacaaguacuucaagaaucacaccagccccgacguggaccugggcgacaucagcggcaucaacgccagcguggugaacauccagaaggagaucgaucggcugaacgagguggccaagaaccugaacgagagccugaucgaccugcaggagcugggcaaguacgagcaguacaucaaguggcccugguacaucuggcugggcuucaucgccggccugaucgccaucgugauggugaccaucaugcugugcugcaugaccagcugcugcagcugccugaagggcuguugcagcugcggcagcugcugcaaguucgacgaggacgacagcgagcccgugcugaagggcgugaagcugcacuacaccugaggacuagucccuguucccagagcccacuuuuuuuucuuuuuuugaaauaaaauagccugucuuucagaucuaaaaaaaaaaaaaaaaaaaaaaaaaaaaaaaaaaaaaaaaaaaaaaaaaaaaaaaaaaaaaaaaaaaaaaaaaaaaaaaaaaaaaaaaaaaaaaaaaaaa

SEQ ID NO: 24880 - RNA, 4070 nt, Artificial Sequence
  SARS-CoV-2/Wuhan/WIV05/2019__EPI_ISL_402128 spike protein mRNA gc (1-1273)(K986P_V987P_Y453F_D614G)
aggagagucccgcagucggcguccagcggcucugcuuguucgugugugugucguugcaggccuuauucaagcuuaccauguucguguuccuggugcugcugccccuggugagcagccagugcgugaaccugaccacccggacccagcugccaccagccuacaccaacagcuucacccggggcgucuacuaccccgacaagguguuccggagcagcguccugcacagcacccaggaccuguuccugcccuucuucagcaacgugaccugguuccacgccauccacgugagcggcaccaacggcaccaagcgguucgacaaccccgugcugcccuucaacgacggcguguacuucgccagcaccgagaagagcaacaucauccggggcuggaucuucggcaccacccuggacagcaagacccagagccugcugaucgugaauaacgccaccaacguggugaucaaggugugcgaguuccaguucugcaacgaccccuuccugggcguguacuaccacaagaacaacaagagcuggauggagagcgaguuccggguguacagcagcgccaacaacugcaccuucgaguacgugagccagcccuuccugauggaccuggagggcaagcagggcaacuucaagaaccugcgggaguucguguucaagaacaucgacggcuacuucaagaucuacagcaagcacaccccaaucaaccuggugcgggaucugccccagggcuucucagcccuggagccccugguggaccugcccaucggcaucaacaucacccgguuccagacccugcuggcccugcaccggagcuaccugaccccaggcgacagcagcagcggguggacagcaggcgcggcugcuuacuacgugggcuaccugcagccccggaccuuccugcugaaguacaacgagaacggcaccaucaccgacgccguggacugcgcccuggacccucugagcgagaccaagugcacccugaagagcuucaccguggagaagggcaucuaccagaccagcaacuuccgggugcagcccaccgagagcaucgugcgguuccccaacaucaccaaccugugccccuucggcgagguguucaacgccacccgguucgccagcguguacgccuggaaccggaagcggaucagcaacugcguggccgacuacagcgugcuguacaacagcgccagcuucagcaccuucaagugcuacggcgugagccccaccaagcugaacgaccugugcuucaccaacguguacgccgacagcuucgugauccguggcgacgaggugcggcagaucgcacccggccagacaggcaagaucgccgacuacaacuacaagcugcccgacgacuucaccggcugcgugaucgccuggaacagcaacaaccucgacagcaaggugggcggcaacuacaacuaccuguuccggcuguuccggaagagcaaccugaagcccuucgagcgggacaucagcaccgagaucuaccaagccggcuccaccccuugcaacggcguggagggcuucaacugcuacuucccucugcagagcuacggcuuccagcccaccaacggcgugggcuaccagcccuaccgggugguggugcugagcuucgagcugcugcacgccccagccaccguguguggccccaagaagagcaccaaccuggugaagaacaagugcgugaacuucaacuucaacggccuuaccggcaccggcgugcugaccgagagcaacaagaaauuccugcccuuucagcaguucggccgggacaucgccgacaccaccgacgcugugcgggauccccagacccuggagauccuggacaucaccccuugcagcuucggcggcgugagcgugaucaccccaggcaccaacaccagcaaccagguggccgugcuguaccagggcgugaacugcaccgaggugcccguggccauccacgccgaccagcugacacccaccuggcgggucuacagcaccggcagcaacguguuccagacccgggccgguugccugaucggcgccgagcacgugaacaacagcuacgagugcgacauccccaucggcgccggcaucugugccagcuaccagacccagaccaauucaccccggagggcaaggagcguggccagccagagcaucaucgccuacaccaugagccugggcgccgagaacagcguggccuacagcaacaacagcaucgccauccccaccaacuucaccaucagcgugaccaccgagauucugcccgugagcaugaccaagaccagcguggacugcaccauguacaucugcggcgacagcaccgagugcagcaaccugcugcugcaguacggcagcuucugcacccagcugaaccgggcccugaccggcaucgccguggagcaggacaagaacacccaggagguguucgcccaggugaagcagaucuacaagaccccucccaucaaggacuucggcggcuucaacuucagccagauccugcccgaccccagcaagcccagcaagcggagcuucaucgaggaccugcuguucaacaaggugacccuagccgacgccggcuucaucaagcaguacggcgacugccucggcgacauagccgcccgggaccugaucugcgcccagaaguucaacggccugaccgugcugccuccccugcugaccgacgagaugaucgcccaguacaccagcgcccuguuagccggaaccaucaccagcggcuggacuuucggcgcuggagccgcucugcagauccccuucgccaugcagauggccuaccgguucaacggcaucggcgugacccagaacgugcuguacgagaaccagaagcugaucgccaaccaguucaacagcgccaucggcaagauccaggacagccugagcagcaccgcuagcgcccugggcaagcugcaggacguggugaaccagaacgcccaggcccugaacacccuggugaagcagcugagcagcaacuucggcgccaucagcagcgugcugaacgacauccugagccggcuggacccucccgaggccgaggugcagaucgaccggcugaucacuggccggcugcagagccugcagaccuacgugacccagcagcugauccgggccgccgagauucgggccagcgccaaccuggccgccaccaagaugagcgagugcgugcugggccagagcaagcggguggacuucugcggcaagggcuaccaccugaugagcuuuccccagagcgcaccccacggagugguguuccugcacgugaccuacgugcccgcccaggagaagaacuucaccaccgccccagccaucugccacgacggcaaggcccacuuuccccgggagggcguguucgugagcaacggcacccacugguucgugacccagcggaacuucuacgagccccagaucaucaccaccgacaacaccuucgugagcggcaacugcgacguggugaucggcaucgugaacaacaccguguacgauccccugcagcccgagcuggacagcuucaaggaggagcuggacaaguacuucaagaaucacaccagccccgacguggaccugggcgacaucagcggcaucaacgccagcguggugaacauccagaaggagaucgaucggcugaacgagguggccaagaaccugaacgagagccugaucgaccugcaggagcugggcaaguacgagcaguacaucaaguggcccugguacaucuggcugggcuucaucgccggccugaucgccaucgugauggugaccaucaugcugugcugcaugaccagcugcugcagcugccugaagggcuguugcagcugcggcagcugcugcaaguucgacgaggacgacagcgagcccgugcugaagggcgugaagcugcacuacaccugaggacuagucccuguucccagagcccacuuuuuuuucuuuuuuugaaauaaaauagccugucuuucagaucuaaaaaaaaaaaaaaaaaaaaaaaaaaaaaaaaaaaaaaaaaaaaaaaaaaaaaaaaaaaaaaaaaaaaaaaaaaaaaaaaaaaaaaaaaaaaaaaaaaaa

SEQ ID NO: 24881 - RNA, 4070 nt, Artificial Sequence
  SARS-CoV-2/Wuhan/WIV05/2019__EPI_ISL_402128 spike protein mRNA gc (1-1273)(K986P_V987P_D614G_I692V)
aggagagucccgcagucggcguccagcggcucugcuuguucgugugugugucguugcaggccuuauucaagcuuaccauguucguguuccuggugcugcugccccuggugagcagccagugcgugaaccugaccacccggacccagcugccaccagccuacaccaacagcuucacccggggcgucuacuaccccgacaagguguuccggagcagcguccugcacagcacccaggaccuguuccugcccuucuucagcaacgugaccugguuccacgccauccacgugagcggcaccaacggcaccaagcgguucgacaaccccgugcugcccuucaacgacggcguguacuucgccagcaccgagaagagcaacaucauccggggcuggaucuucggcaccacccuggacagcaagacccagagccugcugaucgugaauaacgccaccaacguggugaucaaggugugcgaguuccaguucugcaacgaccccuuccugggcguguacuaccacaagaacaacaagagcuggauggagagcgaguuccggguguacagcagcgccaacaacugcaccuucgaguacgugagccagcccuuccugauggaccuggagggcaagcagggcaacuucaagaaccugcgggaguucguguucaagaacaucgacggcuacuucaagaucuacagcaagcacaccccaaucaaccuggugcgggaucugccccagggcuucucagcccuggagccccugguggaccugcccaucggcaucaacaucacccgguuccagacccugcuggcccugcaccggagcuaccugaccccaggcgacagcagcagcggguggacagcaggcgcggcugcuuacuacgugggcuaccugcagccccggaccuuccugcugaaguacaacgagaacggcaccaucaccgacgccguggacugcgcccuggacccucugagcgagaccaagugcacccugaagagcuucaccguggagaagggcaucuaccagaccagcaacuuccgggugcagcccaccgagagcaucgugcgguuccccaacaucaccaaccugugccccuucggcgagguguucaacgccacccgguucgccagcguguacgccuggaaccggaagcggaucagcaacugcguggccgacuacagcgugcuguacaacagcgccagcuucagcaccuucaagugcuacggcgugagccccaccaagcugaacgaccugugcuucaccaacguguacgccgacagcuucgugauccguggcgacgaggugcggcagaucgcacccggccagacaggcaagaucgccgacuacaacuacaagcugcccgacgacuucaccggcugcgugaucgccuggaacagcaacaaccucgacagcaaggugggcggcaacuacaacuaccuguaccggcuguuccggaagagcaaccugaagcccuucgagcgggacaucagcaccgagaucuaccaagccggcuccaccccuugcaacggcguggagggcuucaacugcuacuucccucugcagagcuacggcuuccagcccaccaacggcgugggcuaccagcccuaccgggugguggugcugagcuucgagcugcugcacgccccagccaccguguguggccccaagaagagcaccaaccuggugaagaacaagugcgugaacuucaacuucaacggccuuaccggcaccggcgugcugaccgagagcaacaagaaauuccugcccuuucagcaguucggccgggacaucgccgacaccaccgacgcugugcgggauccccagacccuggagauccuggacaucaccccuugcagcuucggcggcgugagcgugaucaccccaggcaccaacaccagcaaccagguggccgugcuguaccagggcgugaacugcaccgaggugcccguggccauccacgccgaccagcugacacccaccuggcgggucuacagcaccggcagcaacguguuccagacccgggccgguugccugaucggcgccgagcacgugaacaacagcuacgagugcgacauccccaucggcgccggcaucugugccagcuaccagacccagaccaauucaccccggagggcaaggagcguggccagccagagcgugaucgccuacaccaugagccugggcgccgagaacagcguggccuacagcaacaacagcaucgccauccccaccaacuucaccaucagcgugaccaccgagauucugcccgugagcaugaccaagaccagcguggacugcaccauguacaucugcggcgacagcaccgagugcagcaaccugcugcugcaguacggcagcuucugcacccagcugaaccgggcccugaccggcaucgccguggagcaggacaagaacacccaggagguguucgcccaggugaagcagaucuacaagaccccucccaucaaggacuucggcggcuucaacuucagccagauccugcccgaccccagcaagcccagcaagcggagcuucaucgaggaccugcuguucaacaaggugacccuagccgacgccggcuucaucaagcaguacggcgacugccucggcgacauagccgcccgggaccugaucugcgcccagaaguucaacggccugaccgugcugccuccccugcugaccgacgagaugaucgcccaguacaccagcgcccuguuagccggaaccaucaccagcggcuggacuuucggcgcuggagccgcucugcagauccccuucgccaugcagauggccuaccgguucaacggcaucggcgugacccagaacgugcuguacgagaaccagaagcugaucgccaaccaguucaacagcgccaucggcaagauccaggacagccugagcagcaccgcuagcgcccugggcaagcugcaggacguggugaaccagaacgcccaggcccugaacacccuggugaagcagcugagcagcaacuucggcgccaucagcagcgugcugaacgacauccugagccggcuggacccucccgaggccgaggugcagaucgaccggcugaucacuggccggcugcagagccugcagaccuacgugacccagcagcugauccgggccgccgagauucgggccagcgccaaccuggccgccaccaagaugagcgagugcgugcugggccagagcaagcggguggacuucugcggcaagggcuaccaccugaugagcuuuccccagagcgcaccccacggagugguguuccugcacgugaccuacgugcccgcccaggagaagaacuucaccaccgccccagccaucugccacgacggcaaggcccacuuuccccgggagggcguguucgugagcaacggcacccacugguucgugacccagcggaacuucuacgagccccagaucaucaccaccgacaacaccuucgugagcggcaacugcgacguggugaucggcaucgugaacaacaccguguacgauccccugcagcccgagcuggacagcuucaaggaggagcuggacaaguacuucaagaaucacaccagccccgacguggaccugggcgacaucagcggcaucaacgccagcguggugaacauccagaaggagaucgaucggcugaacgagguggccaagaaccugaacgagagccugaucgaccugcaggagcugggcaaguacgagcaguacaucaaguggcccugguacaucuggcugggcuucaucgccggccugaucgccaucgugauggugaccaucaugcugugcugcaugaccagcugcugcagcugccugaagggcuguugcagcugcggcagcugcugcaaguucgacgaggacgacagcgagcccgugcugaagggcgugaagcugcacuacaccugaggacuagucccuguucccagagcccacuuuuuuuucuuuuuuugaaauaaaauagccugucuuucagaucuaaaaaaaaaaaaaaaaaaaaaaaaaaaaaaaaaaaaaaaaaaaaaaaaaaaaaaaaaaaaaaaaaaaaaaaaaaaaaaaaaaaaaaaaaaaaaaaaaaaa

SEQ ID NO: 24882 - RNA, 4070 nt, Artificial Sequence
  SARS-CoV-2/Wuhan/WIV05/2019__EPI_ISL_402128 spike protein mRNA gc (1-1273)(K986P_V987P_D614G_M1229I)
aggagagucccgcagucggcguccagcggcucugcuuguucgugugugugucguugcaggccuuauucaagcuuaccauguucguguuccuggugcugcugccccuggugagcagccagugcgugaaccugaccacccggacccagcugccaccagccuacaccaacagcuucacccggggcgucuacuaccccgacaagguguuccggagcagcguccugcacagcacccaggaccuguuccugcccuucuucagcaacgugaccugguuccacgccauccacgugagcggcaccaacggcaccaagcgguucgacaaccccgugcugcccuucaacgacggcguguacuucgccagcaccgagaagagcaacaucauccggggcuggaucuucggcaccacccuggacagcaagacccagagccugcugaucgugaauaacgccaccaacguggugaucaaggugugcgaguuccaguucugcaacgaccccuuccugggcguguacuaccacaagaacaacaagagcuggauggagagcgaguuccggguguacagcagcgccaacaacugcaccuucgaguacgugagccagcccuuccugauggaccuggagggcaagcagggcaacuucaagaaccugcgggaguucguguucaagaacaucgacggcuacuucaagaucuacagcaagcacaccccaaucaaccuggugcgggaucugccccagggcuucucagcccuggagccccugguggaccugcccaucggcaucaacaucacccgguuccagacccugcuggcccugcaccggagcuaccugaccccaggcgacagcagcagcggguggacagcaggcgcggcugcuuacuacgugggcuaccugcagccccggaccuuccugcugaaguacaacgagaacggcaccaucaccgacgccguggacugcgcccuggacccucugagcgagaccaagugcacccugaagagcuucaccguggagaagggcaucuaccagaccagcaacuuccgggugcagcccaccgagagcaucgugcgguuccccaacaucaccaaccugugccccuucggcgagguguucaacgccacccgguucgccagcguguacgccuggaaccggaagcggaucagcaacugcguggccgacuacagcgugcuguacaacagcgccagcuucagcaccuucaagugcuacggcgugagccccaccaagcugaacgaccugugcuucaccaacguguacgccgacagcuucgugauccguggcgacgaggugcggcagaucgcacccggccagacaggcaagaucgccgacuacaacuacaagcugcccgacgacuucaccggcugcgugaucgccuggaacagcaacaaccucgacagcaaggugggcggcaacuacaacuaccuguaccggcuguuccggaagagcaaccugaagcccuucgagcgggacaucagcaccgagaucuaccaagccggcuccaccccuugcaacggcguggagggcuucaacugcuacuucccucugcagagcuacggcuuccagcccaccaacggcgugggcuaccagcccuaccgggugguggugcugagcuucgagcugcugcacgccccagccaccguguguggccccaagaagagcaccaaccuggugaagaacaagugcgugaacuucaacuucaacggccuuaccggcaccggcgugcugaccgagagcaacaagaaauuccugcccuuucagcaguucggccgggacaucgccgacaccaccgacgcugugcgggauccccagacccuggagauccuggacaucaccccuugcagcuucggcggcgugagcgugaucaccccaggcaccaacaccagcaaccagguggccgugcuguaccagggcgugaacugcaccgaggugcccguggccauccacgccgaccagcugacacccaccuggcgggucuacagcaccggcagcaacguguuccagacccgggccgguugccugaucggcgccgagcacgugaacaacagcuacgagugcgacauccccaucggcgccggcaucugugccagcuaccagacccagaccaauucaccccggagggcaaggagcguggccagccagagcaucaucgccuacaccaugagccugggcgccgagaacagcguggccuacagcaacaacagcaucgccauccccaccaacuucaccaucagcgugaccaccgagauucugcccgugagcaugaccaagaccagcguggacugcaccauguacaucugcggcgacagcaccgagugcagcaaccugcugcugcaguacggcagcuucugcacccagcugaaccgggcccugaccggcaucgccguggagcaggacaagaacacccaggagguguucgcccaggugaagcagaucuacaagaccccucccaucaaggacuucggcggcuucaacuucagccagauccugcccgaccccagcaagcccagcaagcggagcuucaucgaggaccugcuguucaacaaggugacccuagccgacgccggcuucaucaagcaguacggcgacugccucggcgacauagccgcccgggaccugaucugcgcccagaaguucaacggccugaccgugcugccuccccugcugaccgacgagaugaucgcccaguacaccagcgcccuguuagccggaaccaucaccagcggcuggacuuucggcgcuggagccgcucugcagauccccuucgccaugcagauggccuaccgguucaacggcaucggcgugacccagaacgugcuguacgagaaccagaagcugaucgccaaccaguucaacagcgccaucggcaagauccaggacagccugagcagcaccgcuagcgcccugggcaagcugcaggacguggugaaccagaacgcccaggcccugaacacccuggugaagcagcugagcagcaacuucggcgccaucagcagcgugcugaacgacauccugagccggcuggacccucccgaggccgaggugcagaucgaccggcugaucacuggccggcugcagagccugcagaccuacgugacccagcagcugauccgggccgccgagauucgggccagcgccaaccuggccgccaccaagaugagcgagugcgugcugggccagagcaagcggguggacuucugcggcaagggcuaccaccugaugagcuuuccccagagcgcaccccacggagugguguuccugcacgugaccuacgugcccgcccaggagaagaacuucaccaccgccccagccaucugccacgacggcaaggcccacuuuccccgggagggcguguucgugagcaacggcacccacugguucgugacccagcggaacuucuacgagccccagaucaucaccaccgacaacaccuucgugagcggcaacugcgacguggugaucggcaucgugaacaacaccguguacgauccccugcagcccgagcuggacagcuucaaggaggagcuggacaaguacuucaagaaucacaccagccccgacguggaccugggcgacaucagcggcaucaacgccagcguggugaacauccagaaggagaucgaucggcugaacgagguggccaagaaccugaacgagagccugaucgaccugcaggagcugggcaaguacgagcaguacaucaaguggcccugguacaucuggcugggcuucaucgccggccugaucgccaucgugaucgugaccaucaugcugugcugcaugaccagcugcugcagcugccugaagggcuguugcagcugcggcagcugcugcaaguucgacgaggacgacagcgagcccgugcugaagggcgugaagcugcacuacaccugaggacuagucccuguucccagagcccacuuuuuuuucuuuuuuugaaauaaaauagccugucuuucagaucuaaaaaaaaaaaaaaaaaaaaaaaaaaaaaaaaaaaaaaaaaaaaaaaaaaaaaaaaaaaaaaaaaaaaaaaaaaaaaaaaaaaaaaaaaaaaaaaaaaaa

SEQ ID NO: 24883 - RNA, 4064 nt, Artificial Sequence
  SARS-CoV-2/Wuhan/WIV05/2019__EPI_ISL_402128 spike protein mRNA gc (1-1273)(K986P_V987P_H69del_V70del_A222V_Y453F_S477N_D614G_I692V)
aggagagucccgcagucggcguccagcggcucugcuuguucgugugugugucguugcaggccuuauucaagcuuaccauguucguguuccuggugcugcugccccuggugagcagccagugcgugaaccugaccacccggacccagcugccaccagccuacaccaacagcuucacccggggcgucuacuaccccgacaagguguuccggagcagcguccugcacagcacccaggaccuguuccugcccuucuucagcaacgugaccugguuccacgccaucagcggcaccaacggcaccaagcgguucgacaaccccgugcugcccuucaacgacggcguguacuucgccagcaccgagaagagcaacaucauccggggcuggaucuucggcaccacccuggacagcaagacccagagccugcugaucgugaauaacgccaccaacguggugaucaaggugugcgaguuccaguucugcaacgaccccuuccugggcguguacuaccacaagaacaacaagagcuggauggagagcgaguuccggguguacagcagcgccaacaacugcaccuucgaguacgugagccagcccuuccugauggaccuggagggcaagcagggcaacuucaagaaccugcgggaguucguguucaagaacaucgacggcuacuucaagaucuacagcaagcacaccccaaucaaccuggugcgggaucugccccagggcuucucagugcuggagccccugguggaccugcccaucggcaucaacaucacccgguuccagacccugcuggcccugcaccggagcuaccugaccccaggcgacagcagcagcggguggacagcaggcgcggcugcuuacuacgugggcuaccugcagccccggaccuuccugcugaaguacaacgagaacggcaccaucaccgacgccguggacugcgcccuggacccucugagcgagaccaagugcacccugaagagcuucaccguggagaagggcaucuaccagaccagcaacuuccgggugcagcccaccgagagcaucgugcgguuccccaacaucaccaaccugugccccuucggcgagguguucaacgccacccgguucgccagcguguacgccuggaaccggaagcggaucagcaacugcguggccgacuacagcgugcuguacaacagcgccagcuucagcaccuucaagugcuacggcgugagccccaccaagcugaacgaccugugcuucaccaacguguacgccgacagcuucgugauccguggcgacgaggugcggcagaucgcacccggccagacaggcaagaucgccgacuacaacuacaagcugcccgacgacuucaccggcugcgugaucgccuggaacagcaacaaccucgacagcaaggugggcggcaacuacaacuaccuguuccggcuguuccggaagagcaaccugaagcccuucgagcgggacaucagcaccgagaucuaccaagccggcaacaccccuugcaacggcguggagggcuucaacugcuacuucccucugcagagcuacggcuuccagcccaccaacggcgugggcuaccagcccuaccgggugguggugcugagcuucgagcugcugcacgccccagccaccguguguggccccaagaagagcaccaaccuggugaagaacaagugcgugaacuucaacuucaacggccuuaccggcaccggcgugcugaccgagagcaacaagaaauuccugcccuuucagcaguucggccgggacaucgccgacaccaccgacgcugugcgggauccccagacccuggagauccuggacaucaccccuugcagcuucggcggcgugagcgugaucaccccaggcaccaacaccagcaaccagguggccgugcuguaccagggcgugaacugcaccgaggugcccguggccauccacgccgaccagcugacacccaccuggcgggucuacagcaccggcagcaacguguuccagacccgggccgguugccugaucggcgccgagcacgugaacaacagcuacgagugcgacauccccaucggcgccggcaucugugccagcuaccagacccagaccaauucaccccggagggcaaggagcguggccagccagagcgugaucgccuacaccaugagccugggcgccgagaacagcguggccuacagcaacaacagcaucgccauccccaccaacuucaccaucagcgugaccaccgagauucugcccgugagcaugaccaagaccagcguggacugcaccauguacaucugcggcgacagcaccgagugcagcaaccugcugcugcaguacggcagcuucugcacccagcugaaccgggcccugaccggcaucgccguggagcaggacaagaacacccaggagguguucgcccaggugaagcagaucuacaagaccccucccaucaaggacuucggcggcuucaacuucagccagauccugcccgaccccagcaagcccagcaagcggagcuucaucgaggaccugcuguucaacaaggugacccuagccgacgccggcuucaucaagcaguacggcgacugccucggcgacauagccgcccgggaccugaucugcgcccagaaguucaacggccugaccgugcugccuccccugcugaccgacgagaugaucgcccaguacaccagcgcccuguuagccggaaccaucaccagcggcuggacuuucggcgcuggagccgcucugcagauccccuucgccaugcagauggccuaccgguucaacggcaucggcgugacccagaacgugcuguacgagaaccagaagcugaucgccaaccaguucaacagcgccaucggcaagauccaggacagccugagcagcaccgcuagcgcccugggcaagcugcaggacguggugaaccagaacgcccaggcccugaacacccuggugaagcagcugagcagcaacuucggcgccaucagcagcgugcugaacgacauccugagccggcuggacccucccgaggccgaggugcagaucgaccggcugaucacuggccggcugcagagccugcagaccuacgugacccagcagcugauccgggccgccgagauucgggccagcgccaaccuggccgccaccaagaugagcgagugcgugcugggccagagcaagcggguggacuucugcggcaagggcuaccaccugaugagcuuuccccagagcgcaccccacggagugguguuccugcacgugaccuacgugcccgcccaggagaagaacuucaccaccgccccagccaucugccacgacggcaaggcccacuuuccccgggagggcguguucgugagcaacggcacccacugguucgugacccagcggaacuucuacgagccccagaucaucaccaccgacaacaccuucgugagcggcaacugcgacguggugaucggcaucgugaacaacaccguguacgauccccugcagcccgagcuggacagcuucaaggaggagcuggacaaguacuucaagaaucacaccagccccgacguggaccugggcgacaucagcggcaucaacgccagcguggugaacauccagaaggagaucgaucggcugaacgagguggccaagaaccugaacgagagccugaucgaccugcaggagcugggcaaguacgagcaguacaucaaguggcccugguacaucuggcugggcuucaucgccggccugaucgccaucgugauggugaccaucaugcugugcugcaugaccagcugcugcagcugccugaagggcuguugcagcugcggcagcugcugcaaguucgacgaggacgacagcgagcccgugcugaagggcgugaagcugcacuacaccugaggacuagucccuguucccagagcccacuuuuuuuucuuuuuuugaaauaaaauagccugucuuucagaucuaaaaaaaaaaaaaaaaaaaaaaaaaaaaaaaaaaaaaaaaaaaaaaaaaaaaaaaaaaaaaaaaaaaaaaaaaaaaaaaaaaaaaaaaaaaaaaaaaaaa

SEQ ID NO: 24884 - RNA, 4064 nt, Artificial Sequence
  SARS-CoV-2/Wuhan/WIV05/2019__EPI_ISL_402128 spike protein mRNA gc (1-1273)(K986P_V987P_H69del_V70del_Y453F_D614G_I692V_M1229I)
aggagagucccgcagucggcguccagcggcucugcuuguucgugugugugucguugcaggccuuauucaagcuuaccauguucguguuccuggugcugcugccccuggugagcagccagugcgugaaccugaccacccggacccagcugccaccagccuacaccaacagcuucacccggggcgucuacuaccccgacaagguguuccggagcagcguccugcacagcacccaggaccuguuccugcccuucuucagcaacgugaccugguuccacgccaucagcggcaccaacggcaccaagcgguucgacaaccccgugcugcccuucaacgacggcguguacuucgccagcaccgagaagagcaacaucauccggggcuggaucuucggcaccacccuggacagcaagacccagagccugcugaucgugaauaacgccaccaacguggugaucaaggugugcgaguuccaguucugcaacgaccccuuccugggcguguacuaccacaagaacaacaagagcuggauggagagcgaguuccggguguacagcagcgccaacaacugcaccuucgaguacgugagccagcccuuccugauggaccuggagggcaagcagggcaacuucaagaaccugcgggaguucguguucaagaacaucgacggcuacuucaagaucuacagcaagcacaccccaaucaaccuggugcgggaucugccccagggcuucucagcccuggagccccugguggaccugcccaucggcaucaacaucacccgguuccagacccugcuggcccugcaccggagcuaccugaccccaggcgacagcagcagcggguggacagcaggcgcggcugcuuacuacgugggcuaccugcagccccggaccuuccugcugaaguacaacgagaacggcaccaucaccgacgccguggacugcgcccuggacccucugagcgagaccaagugcacccugaagagcuucaccguggagaagggcaucuaccagaccagcaacuuccgggugcagcccaccgagagcaucgugcgguuccccaacaucaccaaccugugccccuucggcgagguguucaacgccacccgguucgccagcguguacgccuggaaccggaagcggaucagcaacugcguggccgacuacagcgugcuguacaacagcgccagcuucagcaccuucaagugcuacggcgugagccccaccaagcugaacgaccugugcuucaccaacguguacgccgacagcuucgugauccguggcgacgaggugcggcagaucgcacccggccagacaggcaagaucgccgacuacaacuacaagcugcccgacgacuucaccggcugcgugaucgccuggaacagcaacaaccucgacagcaaggugggcggcaacuacaacuaccuguuccggcuguuccggaagagcaaccugaagcccuucgagcgggacaucagcaccgagaucuaccaagccggcuccaccccuugcaacggcguggagggcuucaacugcuacuucccucugcagagcuacggcuuccagcccaccaacggcgugggcuaccagcccuaccgggugguggugcugagcuucgagcugcugcacgccccagccaccguguguggccccaagaagagcaccaaccuggugaagaacaagugcgugaacuucaacuucaacggccuuaccggcaccggcgugcugaccgagagcaacaagaaauuccugcccuuucagcaguucggccgggacaucgccgacaccaccgacgcugugcgggauccccagacccuggagauccuggacaucaccccuugcagcuucggcggcgugagcgugaucaccccaggcaccaacaccagcaaccagguggccgugcuguaccagggcgugaacugcaccgaggugcccguggccauccacgccgaccagcugacacccaccuggcgggucuacagcaccggcagcaacguguuccagacccgggccgguugccugaucggcgccgagcacgugaacaacagcuacgagugcgacauccccaucggcgccggcaucugugccagcuaccagacccagaccaauucaccccggagggcaaggagcguggccagccagagcgugaucgccuacaccaugagccugggcgccgagaacagcguggccuacagcaacaacagcaucgccauccccaccaacuucaccaucagcgugaccaccgagauucugcccgugagcaugaccaagaccagcguggacugcaccauguacaucugcggcgacagcaccgagugcagcaaccugcugcugcaguacggcagcuucugcacccagcugaaccgggcccugaccggcaucgccguggagcaggacaagaacacccaggagguguucgcccaggugaagcagaucuacaagaccccucccaucaaggacuucggcggcuucaacuucagccagauccugcccgaccccagcaagcccagcaagcggagcuucaucgaggaccugcuguucaacaaggugacccuagccgacgccggcuucaucaagcaguacggcgacugccucggcgacauagccgcccgggaccugaucugcgcccagaaguucaacggccugaccgugcugccuccccugcugaccgacgagaugaucgcccaguacaccagcgcccuguuagccggaaccaucaccagcggcuggacuuucggcgcuggagccgcucugcagauccccuucgccaugcagauggccuaccgguucaacggcaucggcgugacccagaacgugcuguacgagaaccagaagcugaucgccaaccaguucaacagcgccaucggcaagauccaggacagccugagcagcaccgcuagcgcccugggcaagcugcaggacguggugaaccagaacgcccaggcccugaacacccuggugaagcagcugagcagcaacuucggcgccaucagcagcgugcugaacgacauccugagccggcuggacccucccgaggccgaggugcagaucgaccggcugaucacuggccggcugcagagccugcagaccuacgugacccagcagcugauccgggccgccgagauucgggccagcgccaaccuggccgccaccaagaugagcgagugcgugcugggccagagcaagcggguggacuucugcggcaagggcuaccaccugaugagcuuuccccagagcgcaccccacggagugguguuccugcacgugaccuacgugcccgcccaggagaagaacuucaccaccgccccagccaucugccacgacggcaaggcccacuuuccccgggagggcguguucgugagcaacggcacccacugguucgugacccagcggaacuucuacgagccccagaucaucaccaccgacaacaccuucgugagcggcaacugcgacguggugaucggcaucgugaacaacaccguguacgauccccugcagcccgagcuggacagcuucaaggaggagcuggacaaguacuucaagaaucacaccagccccgacguggaccugggcgacaucagcggcaucaacgccagcguggugaacauccagaaggagaucgaucggcugaacgagguggccaagaaccugaacgagagccugaucgaccugcaggagcugggcaaguacgagcaguacaucaaguggcccugguacaucuggcugggcuucaucgccggccugaucgccaucgugaucgugaccaucaugcugugcugcaugaccagcugcugcagcugccugaagggcuguugcagcugcggcagcugcugcaaguucgacgaggacgacagcgagcccgugcugaagggcgugaagcugcacuacaccugaggacuagucccuguucccagagcccacuuuuuuuucuuuuuuugaaauaaaauagccugucuuucagaucuaaaaaaaaaaaaaaaaaaaaaaaaaaaaaaaaaaaaaaaaaaaaaaaaaaaaaaaaaaaaaaaaaaaaaaaaaaaaaaaaaaaaaaaaaaaaaaaaaaaa

SEQ ID NO: 24885 - RNA, 4061 nt, Artificial Sequence
  SARS-CoV-2/Wuhan/WIV05/2019__EPI_ISL_402128 spike protein mRNA gc (1-1273)(K986P_V987P_K986P_V987P_H69del_V70del_Y144del_N501Y_A570 D_D614G_P681H_T716I_S982A_D1118H)
aggagagucccgcagucggcguccagcggcucugcuuguucgugugugugucguugcaggccuuauucaagcuuaccauguucguguuccuggugcugcugccccuggugagcagccagugcgugaaccugaccacccggacccagcugccaccagccuacaccaacagcuucacccggggcgucuacuaccccgacaagguguuccggagcagcguccugcacagcacccaggaccuguuccugcccuucuucagcaacgugaccugguuccacgccaucagcggcaccaacggcaccaagcgguucgacaaccccgugcugcccuucaacgacggcguguacuucgccagcaccgagaagagcaacaucauccggggcuggaucuucggcaccacccuggacagcaagacccagagccugcugaucgugaauaacgccaccaacguggugaucaaggugugcgaguuccaguucugcaacgaccccuuccugggcguguaccacaagaacaacaagagcuggauggagagcgaguuccggguguacagcagcgccaacaacugcaccuucgaguacgugagccagcccuuccugauggaccuggagggcaagcagggcaacuucaagaaccugcgggaguucguguucaagaacaucgacggcuacuucaagaucuacagcaagcacaccccaaucaaccuggugcgggaucugccccagggcuucucagcccuggagccccugguggaccugcccaucggcaucaacaucacccgguuccagacccugcuggcccugcaccggagcuaccugaccccaggcgacagcagcagcggguggacagcaggcgcggcugcuuacuacgugggcuaccugcagccccggaccuuccugcugaaguacaacgagaacggcaccaucaccgacgccguggacugcgcccuggacccucugagcgagaccaagugcacccugaagagcuucaccguggagaagggcaucuaccagaccagcaacuuccgggugcagcccaccgagagcaucgugcgguuccccaacaucaccaaccugugccccuucggcgagguguucaacgccacccgguucgccagcguguacgccuggaaccggaagcggaucagcaacugcguggccgacuacagcgugcuguacaacagcgccagcuucagcaccuucaagugcuacggcgugagccccaccaagcugaacgaccugugcuucaccaacguguacgccgacagcuucgugauccguggcgacgaggugcggcagaucgcacccggccagacaggcaagaucgccgacuacaacuacaagcugcccgacgacuucaccggcugcgugaucgccuggaacagcaacaaccucgacagcaaggugggcggcaacuacaacuaccuguaccggcuguuccggaagagcaaccugaagcccuucgagcgggacaucagcaccgagaucuaccaagccggcuccaccccuugcaacggcguggagggcuucaacugcuacuucccucugcagagcuacggcuuccagcccaccuacggcgugggcuaccagcccuaccgggugguggugcugagcuucgagcugcugcacgccccagccaccguguguggccccaagaagagcaccaaccuggugaagaacaagugcgugaacuucaacuucaacggccuuaccggcaccggcgugcugaccgagagcaacaagaaauuccugcccuuucagcaguucggccgggacaucgacgacaccaccgacgcugugcgggauccccagacccuggagauccuggacaucaccccuugcagcuucggcggcgugagcgugaucaccccaggcaccaacaccagcaaccagguggccgugcuguaccagggcgugaacugcaccgaggugcccguggccauccacgccgaccagcugacacccaccuggcgggucuacagcaccggcagcaacguguuccagacccgggccgguugccugaucggcgccgagcacgugaacaacagcuacgagugcgacauccccaucggcgccggcaucugugccagcuaccagacccagaccaauucacaccggagggcaaggagcguggccagccagagcaucaucgccuacaccaugagccugggcgccgagaacagcguggccuacagcaacaacagcaucgccauccccaucaacuucaccaucagcgugaccaccgagauucugcccgugagcaugaccaagaccagcguggacugcaccauguacaucugcggcgacagcaccgagugcagcaaccugcugcugcaguacggcagcuucugcacccagcugaaccgggcccugaccggcaucgccguggagcaggacaagaacacccaggagguguucgcccaggugaagcagaucuacaagaccccucccaucaaggacuucggcggcuucaacuucagccagauccugcccgaccccagcaagcccagcaagcggagcuucaucgaggaccugcuguucaacaaggugacccuagccgacgccggcuucaucaagcaguacggcgacugccucggcgacauagccgcccgggaccugaucugcgcccagaaguucaacggccugaccgugcugccuccccugcugaccgacgagaugaucgcccaguacaccagcgcccuguuagccggaaccaucaccagcggcuggacuuucggcgcuggagccgcucugcagauccccuucgccaugcagauggccuaccgguucaacggcaucggcgugacccagaacgugcuguacgagaaccagaagcugaucgccaaccaguucaacagcgccaucggcaagauccaggacagccugagcagcaccgcuagcgcccugggcaagcugcaggacguggugaaccagaacgcccaggcccugaacacccuggugaagcagcugagcagcaacuucggcgccaucagcagcgugcugaacgacauccuggcccggcuggacccucccgaggccgaggugcagaucgaccggcugaucacuggccggcugcagagccugcagaccuacgugacccagcagcugauccgggccgccgagauucgggccagcgccaaccuggccgccaccaagaugagcgagugcgugcugggccagagcaagcggguggacuucugcggcaagggcuaccaccugaugagcuuuccccagagcgcaccccacggagugguguuccugcacgugaccuacgugcccgcccaggagaagaacuucaccaccgccccagccaucugccacgacggcaaggcccacuuuccccgggagggcguguucgugagcaacggcacccacugguucgugacccagcggaacuucuacgagccccagaucaucaccacccacaacaccuucgugagcggcaacugcgacguggugaucggcaucgugaacaacaccguguacgauccccugcagcccgagcuggacagcuucaaggaggagcuggacaaguacuucaagaaucacaccagccccgacguggaccugggcgacaucagcggcaucaacgccagcguggugaacauccagaaggagaucgaucggcugaacgagguggccaagaaccugaacgagagccugaucgaccugcaggagcugggcaaguacgagcaguacaucaaguggcccugguacaucuggcugggcuucaucgccggccugaucgccaucgugauggugaccaucaugcugugcugcaugaccagcugcugcagcugccugaagggcuguugcagcugcggcagcugcugcaaguucgacgaggacgacagcgagcccgugcugaagggcgugaagcugcacuacaccugaggacuagucccuguucccagagcccacuuuuuuuucuuuuuuugaaauaaaauagccugucuuucagaucuaaaaaaaaaaaaaaaaaaaaaaaaaaaaaaaaaaaaaaaaaaaaaaaaaaaaaaaaaaaaaaaaaaaaaaaaaaaaaaaaaaaaaaaaaaaaaaaaaaaa

SEQ ID NO: 24886 - RNA, 4070 nt, Artificial Sequence
  SARS-CoV-2/Wuhan/WIV05/2019__EPI_ISL_402128 spike protein mRNA gc (1-1273)(K986P_V987P_K986P_V987P_K417N_E484K_N501Y_D614G)
aggagagucccgcagucggcguccagcggcucugcuuguucgugugugugucguugcaggccuuauucaagcuuaccauguucguguuccuggugcugcugccccuggugagcagccagugcgugaaccugaccacccggacccagcugccaccagccuacaccaacagcuucacccggggcgucuacuaccccgacaagguguuccggagcagcguccugcacagcacccaggaccuguuccugcccuucuucagcaacgugaccugguuccacgccauccacgugagcggcaccaacggcaccaagcgguucgacaaccccgugcugcccuucaacgacggcguguacuucgccagcaccgagaagagcaacaucauccggggcuggaucuucggcaccacccuggacagcaagacccagagccugcugaucgugaauaacgccaccaacguggugaucaaggugugcgaguuccaguucugcaacgaccccuuccugggcguguacuaccacaagaacaacaagagcuggauggagagcgaguuccggguguacagcagcgccaacaacugcaccuucgaguacgugagccagcccuuccugauggaccuggagggcaagcagggcaacuucaagaaccugcgggaguucguguucaagaacaucgacggcuacuucaagaucuacagcaagcacaccccaaucaaccuggugcgggaucugccccagggcuucucagcccuggagccccugguggaccugcccaucggcaucaacaucacccgguuccagacccugcuggcccugcaccggagcuaccugaccccaggcgacagcagcagcggguggacagcaggcgcggcugcuuacuacgugggcuaccugcagccccggaccuuccugcugaaguacaacgagaacggcaccaucaccgacgccguggacugcgcccuggacccucugagcgagaccaagugcacccugaagagcuucaccguggagaagggcaucuaccagaccagcaacuuccgggugcagcccaccgagagcaucgugcgguuccccaacaucaccaaccugugccccuucggcgagguguucaacgccacccgguucgccagcguguacgccuggaaccggaagcggaucagcaacugcguggccgacuacagcgugcuguacaacagcgccagcuucagcaccuucaagugcuacggcgugagccccaccaagcugaacgaccugugcuucaccaacguguacgccgacagcuucgugauccguggcgacgaggugcggcagaucgcacccggccagacaggcaacaucgccgacuacaacuacaagcugcccgacgacuucaccggcugcgugaucgccuggaacagcaacaaccucgacagcaaggugggcggcaacuacaacuaccuguaccggcuguuccggaagagcaaccugaagcccuucgagcgggacaucagcaccgagaucuaccaagccggcuccaccccuugcaacggcgugaagggcuucaacugcuacuucccucugcagagcuacggcuuccagcccaccuacggcgugggcuaccagcccuaccgggugguggugcugagcuucgagcugcugcacgccccagccaccguguguggccccaagaagagcaccaaccuggugaagaacaagugcgugaacuucaacuucaacggccuuaccggcaccggcgugcugaccgagagcaacaagaaauuccugcccuuucagcaguucggccgggacaucgccgacaccaccgacgcugugcgggauccccagacccuggagauccuggacaucaccccuugcagcuucggcggcgugagcgugaucaccccaggcaccaacaccagcaaccagguggccgugcuguaccagggcgugaacugcaccgaggugcccguggccauccacgccgaccagcugacacccaccuggcgggucuacagcaccggcagcaacguguuccagacccgggccgguugccugaucggcgccgagcacgugaacaacagcuacgagugcgacauccccaucggcgccggcaucugugccagcuaccagacccagaccaauucaccccggagggcaaggagcguggccagccagagcaucaucgccuacaccaugagccugggcgccgagaacagcguggccuacagcaacaacagcaucgccauccccaccaacuucaccaucagcgugaccaccgagauucugcccgugagcaugaccaagaccagcguggacugcaccauguacaucugcggcgacagcaccgagugcagcaaccugcugcugcaguacggcagcuucugcacccagcugaaccgggcccugaccggcaucgccguggagcaggacaagaacacccaggagguguucgcccaggugaagcagaucuacaagaccccucccaucaaggacuucggcggcuucaacuucagccagauccugcccgaccccagcaagcccagcaagcggagcuucaucgaggaccugcuguucaacaaggugacccuagccgacgccggcuucaucaagcaguacggcgacugccucggcgacauagccgcccgggaccugaucugcgcccagaaguucaacggccugaccgugcugccuccccugcugaccgacgagaugaucgcccaguacaccagcgcccuguuagccggaaccaucaccagcggcuggacuuucggcgcuggagccgcucugcagauccccuucgccaugcagauggccuaccgguucaacggcaucggcgugacccagaacgugcuguacgagaaccagaagcugaucgccaaccaguucaacagcgccaucggcaagauccaggacagccugagcagcaccgcuagcgcccugggcaagcugcaggacguggugaaccagaacgcccaggcccugaacacccuggugaagcagcugagcagcaacuucggcgccaucagcagcgugcugaacgacauccugagccggcuggacccucccgaggccgaggugcagaucgaccggcugaucacuggccggcugcagagccugcagaccuacgugacccagcagcugauccgggccgccgagauucgggccagcgccaaccuggccgccaccaagaugagcgagugcgugcugggccagagcaagcggguggacuucugcggcaagggcuaccaccugaugagcuuuccccagagcgcaccccacggagugguguuccugcacgugaccuacgugcccgcccaggagaagaacuucaccaccgccccagccaucugccacgacggcaaggcccacuuuccccgggagggcguguucgugagcaacggcacccacugguucgugacccagcggaacuucuacgagccccagaucaucaccaccgacaacaccuucgugagcggcaacugcgacguggugaucggcaucgugaacaacaccguguacgauccccugcagcccgagcuggacagcuucaaggaggagcuggacaaguacuucaagaaucacaccagccccgacguggaccugggcgacaucagcggcaucaacgccagcguggugaacauccagaaggagaucgaucggcugaacgagguggccaagaaccugaacgagagccugaucgaccugcaggagcugggcaaguacgagcaguacaucaaguggcccugguacaucuggcugggcuucaucgccggccugaucgccaucgugauggugaccaucaugcugugcugcaugaccagcugcugcagcugccugaagggcuguugcagcugcggcagcugcugcaaguucgacgaggacgacagcgagcccgugcugaagggcgugaagcugcacuacaccugaggacuagucccuguucccagagcccacuuuuuuuucuuuuuuugaaauaaaauagccugucuuucagaucuaaaaaaaaaaaaaaaaaaaaaaaaaaaaaaaaaaaaaaaaaaaaaaaaaaaaaaaaaaaaaaaaaaaaaaaaaaaaaaaaaaaaaaaaaaaaaaaaaaaa

SEQ ID NO: 24887 - RNA, 4061 nt, Artificial Sequence
  SARS-CoV-2/Wuhan/WIV05/2019__EPI_ISL_402128 spike protein mRNA gc (1-1273)(K986P_V987P_K986P_V987P_L18F_D80A_D215G_L242del_A243del_ L244del_R246I_K417N_E484K_N501Y_D614G_A701V)
aggagagucccgcagucggcguccagcggcucugcuuguucgugugugugucguugcaggccuuauucaagcuuaccauguucguguuccuggugcugcugccccuggugagcagccagugcgugaacuucaccacccggacccagcugccaccagccuacaccaacagcuucacccggggcgucuacuaccccgacaagguguuccggagcagcguccugcacagcacccaggaccuguuccugcccuucuucagcaacgugaccugguuccacgccauccacgugagcggcaccaacggcaccaagcgguucgccaaccccgugcugcccuucaacgacggcguguacuucgccagcaccgagaagagcaacaucauccggggcuggaucuucggcaccacccuggacagcaagacccagagccugcugaucgugaauaacgccaccaacguggugaucaaggugugcgaguuccaguucugcaacgaccccuuccugggcguguacuaccacaagaacaacaagagcuggauggagagcgaguuccggguguacagcagcgccaacaacugcaccuucgaguacgugagccagcccuuccugauggaccuggagggcaagcagggcaacuucaagaaccugcgggaguucguguucaagaacaucgacggcuacuucaagaucuacagcaagcacaccccaaucaaccuggugcggggccugccccagggcuucucagcccuggagccccugguggaccugcccaucggcaucaacaucacccgguuccagacccugcacaucagcuaccugaccccaggcgacagcagcagcggguggacagcaggcgcggcugcuuacuacgugggcuaccugcagccccggaccuuccugcugaaguacaacgagaacggcaccaucaccgacgccguggacugcgcccuggacccucugagcgagaccaagugcacccugaagagcuucaccguggagaagggcaucuaccagaccagcaacuuccgggugcagcccaccgagagcaucgugcgguuccccaacaucaccaaccugugccccuucggcgagguguucaacgccacccgguucgccagcguguacgccuggaaccggaagcggaucagcaacugcguggccgacuacagcgugcuguacaacagcgccagcuucagcaccuucaagugcuacggcgugagccccaccaagcugaacgaccugugcuucaccaacguguacgccgacagcuucgugauccguggcgacgaggugcggcagaucgcacccggccagacaggcaacaucgccgacuacaacuacaagcugcccgacgacuucaccggcugcgugaucgccuggaacagcaacaaccucgacagcaaggugggcggcaacuacaacuaccuguaccggcuguuccggaagagcaaccugaagcccuucgagcgggacaucagcaccgagaucuaccaagccggcuccaccccuugcaacggcgugaagggcuucaacugcuacuucccucugcagagcuacggcuuccagcccaccuacggcgugggcuaccagcccuaccgggugguggugcugagcuucgagcugcugcacgccccagccaccguguguggccccaagaagagcaccaaccuggugaagaacaagugcgugaacuucaacuucaacggccuuaccggcaccggcgugcugaccgagagcaacaagaaauuccugcccuuucagcaguucggccgggacaucgccgacaccaccgacgcugugcgggauccccagacccuggagauccuggacaucaccccuugcagcuucggcggcgugagcgugaucaccccaggcaccaacaccagcaaccagguggccgugcuguaccagggcgugaacugcaccgaggugcccguggccauccacgccgaccagcugacacccaccuggcgggucuacagcaccggcagcaacguguuccagacccgggccgguugccugaucggcgccgagcacgugaacaacagcuacgagugcgacauccccaucggcgccggcaucugugccagcuaccagacccagaccaauucaccccggagggcaaggagcguggccagccagagcaucaucgccuacaccaugagccugggcguggagaacagcguggccuacagcaacaacagcaucgccauccccaccaacuucaccaucagcgugaccaccgagauucugcccgugagcaugaccaagaccagcguggacugcaccauguacaucugcggcgacagcaccgagugcagcaaccugcugcugcaguacggcagcuucugcacccagcugaaccgggcccugaccggcaucgccguggagcaggacaagaacacccaggagguguucgcccaggugaagcagaucuacaagaccccucccaucaaggacuucggcggcuucaacuucagccagauccugcccgaccccagcaagcccagcaagcggagcuucaucgaggaccugcuguucaacaaggugacccuagccgacgccggcuucaucaagcaguacggcgacugccucggcgacauagccgcccgggaccugaucugcgcccagaaguucaacggccugaccgugcugccuccccugcugaccgacgagaugaucgcccaguacaccagcgcccuguuagccggaaccaucaccagcggcuggacuuucggcgcuggagccgcucugcagauccccuucgccaugcagauggccuaccgguucaacggcaucggcgugacccagaacgugcuguacgagaaccagaagcugaucgccaaccaguucaacagcgccaucggcaagauccaggacagccugagcagcaccgcuagcgcccugggcaagcugcaggacguggugaaccagaacgcccaggcccugaacacccuggugaagcagcugagcagcaacuucggcgccaucagcagcgugcugaacgacauccugagccggcuggacccucccgaggccgaggugcagaucgaccggcugaucacuggccggcugcagagccugcagaccuacgugacccagcagcugauccgggccgccgagauucgggccagcgccaaccuggccgccaccaagaugagcgagugcgugcugggccagagcaagcggguggacuucugcggcaagggcuaccaccugaugagcuuuccccagagcgcaccccacggagugguguuccugcacgugaccuacgugcccgcccaggagaagaacuucaccaccgccccagccaucugccacgacggcaaggcccacuuuccccgggagggcguguucgugagcaacggcacccacugguucgugacccagcggaacuucuacgagccccagaucaucaccaccgacaacaccuucgugagcggcaacugcgacguggugaucggcaucgugaacaacaccguguacgauccccugcagcccgagcuggacagcuucaaggaggagcuggacaaguacuucaagaaucacaccagccccgacguggaccugggcgacaucagcggcaucaacgccagcguggugaacauccagaaggagaucgaucggcugaacgagguggccaagaaccugaacgagagccugaucgaccugcaggagcugggcaaguacgagcaguacaucaaguggcccugguacaucuggcugggcuucaucgccggccugaucgccaucgugauggugaccaucaugcugugcugcaugaccagcugcugcagcugccugaagggcuguugcagcugcggcagcugcugcaaguucgacgaggacgacagcgagcccgugcugaagggcgugaagcugcacuacaccugaggacuagucccuguucccagagcccacuuuuuuuucuuuuuuugaaauaaaauagccugucuuucagaucuaaaaaaaaaaaaaaaaaaaaaaaaaaaaaaaaaaaaaaaaaaaaaaaaaaaaaaaaaaaaaaaaaaaaaaaaaaaaaaaaaaaaaaaaaaaaaaaaaaaa

SEQ ID NO: 24888 - RNA, 4070 nt, Artificial Sequence
  SARS-CoV-2/Wuhan/WIV05/2019__EPI_ISL_402128 spike protein mRNA gc (1-1273)(K986P_V987P_K986P_V987P_E484K_D614G)
aggagagucccgcagucggcguccagcggcucugcuuguucgugugugugucguugcaggccuuauucaagcuuaccauguucguguuccuggugcugcugccccuggugagcagccagugcgugaaccugaccacccggacccagcugccaccagccuacaccaacagcuucacccggggcgucuacuaccccgacaagguguuccggagcagcguccugcacagcacccaggaccuguuccugcccuucuucagcaacgugaccugguuccacgccauccacgugagcggcaccaacggcaccaagcgguucgacaaccccgugcugcccuucaacgacggcguguacuucgccagcaccgagaagagcaacaucauccggggcuggaucuucggcaccacccuggacagcaagacccagagccugcugaucgugaauaacgccaccaacguggugaucaaggugugcgaguuccaguucugcaacgaccccuuccugggcguguacuaccacaagaacaacaagagcuggauggagagcgaguuccggguguacagcagcgccaacaacugcaccuucgaguacgugagccagcccuuccugauggaccuggagggcaagcagggcaacuucaagaaccugcgggaguucguguucaagaacaucgacggcuacuucaagaucuacagcaagcacaccccaaucaaccuggugcgggaucugccccagggcuucucagcccuggagccccugguggaccugcccaucggcaucaacaucacccgguuccagacccugcuggcccugcaccggagcuaccugaccccaggcgacagcagcagcggguggacagcaggcgcggcugcuuacuacgugggcuaccugcagccccggaccuuccugcugaaguacaacgagaacggcaccaucaccgacgccguggacugcgcccuggacccucugagcgagaccaagugcacccugaagagcuucaccguggagaagggcaucuaccagaccagcaacuuccgggugcagcccaccgagagcaucgugcgguuccccaacaucaccaaccugugccccuucggcgagguguucaacgccacccgguucgccagcguguacgccuggaaccggaagcggaucagcaacugcguggccgacuacagcgugcuguacaacagcgccagcuucagcaccuucaagugcuacggcgugagccccaccaagcugaacgaccugugcuucaccaacguguacgccgacagcuucgugauccguggcgacgaggugcggcagaucgcacccggccagacaggcaagaucgccgacuacaacuacaagcugcccgacgacuucaccggcugcgugaucgccuggaacagcaacaaccucgacagcaaggugggcggcaacuacaacuaccuguaccggcuguuccggaagagcaaccugaagcccuucgagcgggacaucagcaccgagaucuaccaagccggcuccaccccuugcaacggcgugaagggcuucaacugcuacuucccucugcagagcuacggcuuccagcccaccaacggcgugggcuaccagcccuaccgggugguggugcugagcuucgagcugcugcacgccccagccaccguguguggccccaagaagagcaccaaccuggugaagaacaagugcgugaacuucaacuucaacggccuuaccggcaccggcgugcugaccgagagcaacaagaaauuccugcccuuucagcaguucggccgggacaucgccgacaccaccgacgcugugcgggauccccagacccuggagauccuggacaucaccccuugcagcuucggcggcgugagcgugaucaccccaggcaccaacaccagcaaccagguggccgugcuguaccagggcgugaacugcaccgaggugcccguggccauccacgccgaccagcugacacccaccuggcgggucuacagcaccggcagcaacguguuccagacccgggccgguugccugaucggcgccgagcacgugaacaacagcuacgagugcgacauccccaucggcgccggcaucugugccagcuaccagacccagaccaauucaccccggagggcaaggagcguggccagccagagcaucaucgccuacaccaugagccugggcgccgagaacagcguggccuacagcaacaacagcaucgccauccccaccaacuucaccaucagcgugaccaccgagauucugcccgugagcaugaccaagaccagcguggacugcaccauguacaucugcggcgacagcaccgagugcagcaaccugcugcugcaguacggcagcuucugcacccagcugaaccgggcccugaccggcaucgccguggagcaggacaagaacacccaggagguguucgcccaggugaagcagaucuacaagaccccucccaucaaggacuucggcggcuucaacuucagccagauccugcccgaccccagcaagcccagcaagcggagcuucaucgaggaccugcuguucaacaaggugacccuagccgacgccggcuucaucaagcaguacggcgacugccucggcgacauagccgcccgggaccugaucugcgcccagaaguucaacggccugaccgugcugccuccccugcugaccgacgagaugaucgcccaguacaccagcgcccuguuagccggaaccaucaccagcggcuggacuuucggcgcuggagccgcucugcagauccccuucgccaugcagauggccuaccgguucaacggcaucggcgugacccagaacgugcuguacgagaaccagaagcugaucgccaaccaguucaacagcgccaucggcaagauccaggacagccugagcagcaccgcuagcgcccugggcaagcugcaggacguggugaaccagaacgcccaggcccugaacacccuggugaagcagcugagcagcaacuucggcgccaucagcagcgugcugaacgacauccugagccggcuggacccucccgaggccgaggugcagaucgaccggcugaucacuggccggcugcagagccugcagaccuacgugacccagcagcugauccgggccgccgagauucgggccagcgccaaccuggccgccaccaagaugagcgagugcgugcugggccagagcaagcggguggacuucugcggcaagggcuaccaccugaugagcuuuccccagagcgcaccccacggagugguguuccugcacgugaccuacgugcccgcccaggagaagaacuucaccaccgccccagccaucugccacgacggcaaggcccacuuuccccgggagggcguguucgugagcaacggcacccacugguucgugacccagcggaacuucuacgagccccagaucaucaccaccgacaacaccuucgugagcggcaacugcgacguggugaucggcaucgugaacaacaccguguacgauccccugcagcccgagcuggacagcuucaaggaggagcuggacaaguacuucaagaaucacaccagccccgacguggaccugggcgacaucagcggcaucaacgccagcguggugaacauccagaaggagaucgaucggcugaacgagguggccaagaaccugaacgagagccugaucgaccugcaggagcugggcaaguacgagcaguacaucaaguggcccugguacaucuggcugggcuucaucgccggccugaucgccaucgugauggugaccaucaugcugugcugcaugaccagcugcugcagcugccugaagggcuguugcagcugcggcagcugcugcaaguucgacgaggacgacagcgagcccgugcugaagggcgugaagcugcacuacaccugaggacuagucccuguucccagagcccacuuuuuuuucuuuuuuugaaauaaaauagccugucuuucagaucuaaaaaaaaaaaaaaaaaaaaaaaaaaaaaaaaaaaaaaaaaaaaaaaaaaaaaaaaaaaaaaaaaaaaaaaaaaaaaaaaaaaaaaaaaaaaaaaaaaaa

SEQ ID NO: 24889 - RNA, 4070 nt, Artificial Sequence
  SARS-CoV-2/Wuhan/WIV05/2019__EPI_ISL_402128 spike protein mRNA gc (1-1273)(K986P_V987P_K986P_V987P_L18F_T20N_P26S_D138Y_R190S_K417T _E484K_N501Y_D614G_H655Y_T1027I)
aggagagucccgcagucggcguccagcggcucugcuuguucgugugugugucguugcaggccuuauucaagcuuaccauguucguguuccuggugcugcugccccuggugagcagccagugcgugaacuucaccaaccggacccagcugccaagcgccuacaccaacagcuucacccggggcgucuacuaccccgacaagguguuccggagcagcguccugcacagcacccaggaccuguuccugcccuucuucagcaacgugaccugguuccacgccauccacgugagcggcaccaacggcaccaagcgguucgacaaccccgugcugcccuucaacgacggcguguacuucgccagcaccgagaagagcaacaucauccggggcuggaucuucggcaccacccuggacagcaagacccagagccugcugaucgugaauaacgccaccaacguggugaucaaggugugcgaguuccaguucugcaacuaccccuuccugggcguguacuaccacaagaacaacaagagcuggauggagagcgaguuccggguguacagcagcgccaacaacugcaccuucgaguacgugagccagcccuuccugauggaccuggagggcaagcagggcaacuucaagaaccugagcgaguucguguucaagaacaucgacggcuacuucaagaucuacagcaagcacaccccaaucaaccuggugcgggaucugccccagggcuucucagcccuggagccccugguggaccugcccaucggcaucaacaucacccgguuccagacccugcuggcccugcaccggagcuaccugaccccaggcgacagcagcagcggguggacagcaggcgcggcugcuuacuacgugggcuaccugcagccccggaccuuccugcugaaguacaacgagaacggcaccaucaccgacgccguggacugcgcccuggacccucugagcgagaccaagugcacccugaagagcuucaccguggagaagggcaucuaccagaccagcaacuuccgggugcagcccaccgagagcaucgugcgguuccccaacaucaccaaccugugccccuucggcgagguguucaacgccacccgguucgccagcguguacgccuggaaccggaagcggaucagcaacugcguggccgacuacagcgugcuguacaacagcgccagcuucagcaccuucaagugcuacggcgugagccccaccaagcugaacgaccugugcuucaccaacguguacgccgacagcuucgugauccguggcgacgaggugcggcagaucgcacccggccagacaggcaccaucgccgacuacaacuacaagcugcccgacgacuucaccggcugcgugaucgccuggaacagcaacaaccucgacagcaaggugggcggcaacuacaacuaccuguaccggcuguuccggaagagcaaccugaagcccuucgagcgggacaucagcaccgagaucuaccaagccggcuccaccccuugcaacggcgugaagggcuucaacugcuacuucccucugcagagcuacggcuuccagcccaccuacggcgugggcuaccagcccuaccgggugguggugcugagcuucgagcugcugcacgccccagccaccguguguggccccaagaagagcaccaaccuggugaagaacaagugcgugaacuucaacuucaacggccuuaccggcaccggcgugcugaccgagagcaacaagaaauuccugcccuuucagcaguucggccgggacaucgccgacaccaccgacgcugugcgggauccccagacccuggagauccuggacaucaccccuugcagcuucggcggcgugagcgugaucaccccaggcaccaacaccagcaaccagguggccgugcuguaccagggcgugaacugcaccgaggugcccguggccauccacgccgaccagcugacacccaccuggcgggucuacagcaccggcagcaacguguuccagacccgggccgguugccugaucggcgccgaguacgugaacaacagcuacgagugcgacauccccaucggcgccggcaucugugccagcuaccagacccagaccaauucaccccggagggcaaggagcguggccagccagagcaucaucgccuacaccaugagccugggcgccgagaacagcguggccuacagcaacaacagcaucgccauccccaccaacuucaccaucagcgugaccaccgagauucugcccgugagcaugaccaagaccagcguggacugcaccauguacaucugcggcgacagcaccgagugcagcaaccugcugcugcaguacggcagcuucugcacccagcugaaccgggcccugaccggcaucgccguggagcaggacaagaacacccaggagguguucgcccaggugaagcagaucuacaagaccccucccaucaaggacuucggcggcuucaacuucagccagauccugcccgaccccagcaagcccagcaagcggagcuucaucgaggaccugcuguucaacaaggugacccuagccgacgccggcuucaucaagcaguacggcgacugccucggcgacauagccgcccgggaccugaucugcgcccagaaguucaacggccugaccgugcugccuccccugcugaccgacgagaugaucgcccaguacaccagcgcccuguuagccggaaccaucaccagcggcuggacuuucggcgcuggagccgcucugcagauccccuucgccaugcagauggccuaccgguucaacggcaucggcgugacccagaacgugcuguacgagaaccagaagcugaucgccaaccaguucaacagcgccaucggcaagauccaggacagccugagcagcaccgcuagcgcccugggcaagcugcaggacguggugaaccagaacgcccaggcccugaacacccuggugaagcagcugagcagcaacuucggcgccaucagcagcgugcugaacgacauccugagccggcuggacccucccgaggccgaggugcagaucgaccggcugaucacuggccggcugcagagccugcagaccuacgugacccagcagcugauccgggccgccgagauucgggccagcgccaaccuggccgccaucaagaugagcgagugcgugcugggccagagcaagcggguggacuucugcggcaagggcuaccaccugaugagcuuuccccagagcgcaccccacggagugguguuccugcacgugaccuacgugcccgcccaggagaagaacuucaccaccgccccagccaucugccacgacggcaaggcccacuuuccccgggagggcguguucgugagcaacggcacccacugguucgugacccagcggaacuucuacgagccccagaucaucaccaccgacaacaccuucgugagcggcaacugcgacguggugaucggcaucgugaacaacaccguguacgauccccugcagcccgagcuggacagcuucaaggaggagcuggacaaguacuucaagaaucacaccagccccgacguggaccugggcgacaucagcggcaucaacgccagcguggugaacauccagaaggagaucgaucggcugaacgagguggccaagaaccugaacgagagccugaucgaccugcaggagcugggcaaguacgagcaguacaucaaguggcccugguacaucuggcugggcuucaucgccggccugaucgccaucgugauggugaccaucaugcugugcugcaugaccagcugcugcagcugccugaagggcuguugcagcugcggcagcugcugcaaguucgacgaggacgacagcgagcccgugcugaagggcgugaagcugcacuacaccugaggacuagucccuguucccagagcccacuuuuuuuucuuuuuuugaaauaaaauagccugucuuucagaucuaaaaaaaaaaaaaaaaaaaaaaaaaaaaaaaaaaaaaaaaaaaaaaaaaaaaaaaaaaaaaaaaaaaaaaaaaaaaaaaaaaaaaaaaaaaaaaaaaaaa

SEQ ID NO: 24890 - RNA, 4070 nt, Artificial Sequence
  SARS-CoV-2/Wuhan/WIV05/2019__EPI_ISL_402128 spike protein mRNA gc (1-1273)(K986P_V987P_K986P_V987P_S13I_W152C_L452R_D614G)
aggagagucccgcagucggcguccagcggcucugcuuguucgugugugugucguugcaggccuuauucaagcuuaccauguucguguuccuggugcugcugccccuggugagcauccagugcgugaaccugaccacccggacccagcugccaccagccuacaccaacagcuucacccggggcgucuacuaccccgacaagguguuccggagcagcguccugcacagcacccaggaccuguuccugcccuucuucagcaacgugaccugguuccacgccauccacgugagcggcaccaacggcaccaagcgguucgacaaccccgugcugcccuucaacgacggcguguacuucgccagcaccgagaagagcaacaucauccggggcuggaucuucggcaccacccuggacagcaagacccagagccugcugaucgugaauaacgccaccaacguggugaucaaggugugcgaguuccaguucugcaacgaccccuuccugggcguguacuaccacaagaacaacaagagcugcauggagagcgaguuccggguguacagcagcgccaacaacugcaccuucgaguacgugagccagcccuuccugauggaccuggagggcaagcagggcaacuucaagaaccugcgggaguucguguucaagaacaucgacggcuacuucaagaucuacagcaagcacaccccaaucaaccuggugcgggaucugccccagggcuucucagcccuggagccccugguggaccugcccaucggcaucaacaucacccgguuccagacccugcuggcccugcaccggagcuaccugaccccaggcgacagcagcagcggguggacagcaggcgcggcugcuuacuacgugggcuaccugcagccccggaccuuccugcugaaguacaacgagaacggcaccaucaccgacgccguggacugcgcccuggacccucugagcgagaccaagugcacccugaagagcuucaccguggagaagggcaucuaccagaccagcaacuuccgggugcagcccaccgagagcaucgugcgguuccccaacaucaccaaccugugccccuucggcgagguguucaacgccacccgguucgccagcguguacgccuggaaccggaagcggaucagcaacugcguggccgacuacagcgugcuguacaacagcgccagcuucagcaccuucaagugcuacggcgugagccccaccaagcugaacgaccugugcuucaccaacguguacgccgacagcuucgugauccguggcgacgaggugcggcagaucgcacccggccagacaggcaagaucgccgacuacaacuacaagcugcccgacgacuucaccggcugcgugaucgccuggaacagcaacaaccucgacagcaaggugggcggcaacuacaacuaccgcuaccggcuguuccggaagagcaaccugaagcccuucgagcgggacaucagcaccgagaucuaccaagccggcuccaccccuugcaacggcguggagggcuucaacugcuacuucccucugcagagcuacggcuuccagcccaccaacggcgugggcuaccagcccuaccgggugguggugcugagcuucgagcugcugcacgccccagccaccguguguggccccaagaagagcaccaaccuggugaagaacaagugcgugaacuucaacuucaacggccuuaccggcaccggcgugcugaccgagagcaacaagaaauuccugcccuuucagcaguucggccgggacaucgccgacaccaccgacgcugugcgggauccccagacccuggagauccuggacaucaccccuugcagcuucggcggcgugagcgugaucaccccaggcaccaacaccagcaaccagguggccgugcuguaccagggcgugaacugcaccgaggugcccguggccauccacgccgaccagcugacacccaccuggcgggucuacagcaccggcagcaacguguuccagacccgggccgguugccugaucggcgccgagcacgugaacaacagcuacgagugcgacauccccaucggcgccggcaucugugccagcuaccagacccagaccaauucaccccggagggcaaggagcguggccagccagagcaucaucgccuacaccaugagccugggcgccgagaacagcguggccuacagcaacaacagcaucgccauccccaccaacuucaccaucagcgugaccaccgagauucugcccgugagcaugaccaagaccagcguggacugcaccauguacaucugcggcgacagcaccgagugcagcaaccugcugcugcaguacggcagcuucugcacccagcugaaccgggcccugaccggcaucgccguggagcaggacaagaacacccaggagguguucgcccaggugaagcagaucuacaagaccccucccaucaaggacuucggcggcuucaacuucagccagauccugcccgaccccagcaagcccagcaagcggagcuucaucgaggaccugcuguucaacaaggugacccuagccgacgccggcuucaucaagcaguacggcgacugccucggcgacauagccgcccgggaccugaucugcgcccagaaguucaacggccugaccgugcugccuccccugcugaccgacgagaugaucgcccaguacaccagcgcccuguuagccggaaccaucaccagcggcuggacuuucggcgcuggagccgcucugcagauccccuucgccaugcagauggccuaccgguucaacggcaucggcgugacccagaacgugcuguacgagaaccagaagcugaucgccaaccaguucaacagcgccaucggcaagauccaggacagccugagcagcaccgcuagcgcccugggcaagcugcaggacguggugaaccagaacgcccaggcccugaacacccuggugaagcagcugagcagcaacuucggcgccaucagcagcgugcugaacgacauccugagccggcuggacccucccgaggccgaggugcagaucgaccggcugaucacuggccggcugcagagccugcagaccuacgugacccagcagcugauccgggccgccgagauucgggccagcgccaaccuggccgccaccaagaugagcgagugcgugcugggccagagcaagcggguggacuucugcggcaagggcuaccaccugaugagcuuuccccagagcgcaccccacggagugguguuccugcacgugaccuacgugcccgcccaggagaagaacuucaccaccgccccagccaucugccacgacggcaaggcccacuuuccccgggagggcguguucgugagcaacggcacccacugguucgugacccagcggaacuucuacgagccccagaucaucaccaccgacaacaccuucgugagcggcaacugcgacguggugaucggcaucgugaacaacaccguguacgauccccugcagcccgagcuggacagcuucaaggaggagcuggacaaguacuucaagaaucacaccagccccgacguggaccugggcgacaucagcggcaucaacgccagcguggugaacauccagaaggagaucgaucggcugaacgagguggccaagaaccugaacgagagccugaucgaccugcaggagcugggcaaguacgagcaguacaucaaguggcccugguacaucuggcugggcuucaucgccggccugaucgccaucgugauggugaccaucaugcugugcugcaugaccagcugcugcagcugccugaagggcuguugcagcugcggcagcugcugcaaguucgacgaggacgacagcgagcccgugcugaagggcgugaagcugcacuacaccugaggacuagucccuguucccagagcccacuuuuuuuucuuuuuuugaaauaaaauagccugucuuucagaucuaaaaaaaaaaaaaaaaaaaaaaaaaaaaaaaaaaaaaaaaaaaaaaaaaaaaaaaaaaaaaaaaaaaaaaaaaaaaaaaaaaaaaaaaaaaaaaaaaaaa

SEQ ID NO: 24891 - RNA, 4070 nt, Artificial Sequence
  SARS-CoV-2/Wuhan/WIV05/2019__EPI_ISL_402128 spike protein mRNA gc (1-1273)(K986P_V987P)
aggagagucccgcagucggcguccagcggcucugcuuguucgugugugugucguugcaggccuuauucaagcuuaccauguucguguuccuggugcugcugccccuggugagcagccagugcgugaaccugaccacccggacccagcugcccccugccuacaccaacagcuucacccggggcguguacuaccccgacaagguguuccggagcagcgugcugcacagcacccaggaccuguuccugcccuucuucagcaacgugaccugguuccacgccauccacgugagcggcaccaacggcaccaagcgguucgacaacccagugcugcccuucaacgacggcguguacuucgccagcaccgagaagucaaacaucauccggggcuggaucuucggcaccacccuggacagcaagacacagagccugcugaucgugaacaacgccaccaacguggugaucaaggugugcgaguuucaguucugcaacgaccccuuccugggcguguacuaccacaagaacaacaagagcuggauggagagcgaguuccgggucuacagcagcgcuaacaauugcaccuucgaguacgugagccagcccuuccugauggaccucgagggcaagcagggcaacuucaagaaccugcgggaguucguguucaagaacaucgauggcuacuucaagaucuacagcaagcacacccccaucaaccuggugcgggaccugccccagggauucagcgcccuggagccucugguggaccugcccaucggcaucaacaucaccagguuccagacccugcuggcccugcaccggagcuaccugacccccggcgacagcagcagcggcuggaccgccggcgccgccgcauacuacgugggcuaccugcagccacggaccuuccugcugaaguacaacgagaacggcaccaucaccgacgccguggacugcgcccuggacccccugagcgagaccaagugcacccuaaagagcuucaccguggagaagggcaucuaccagaccagcaacuuccgggugcagcccacugagagcaucgugcgguuccccaacauuaccaaccugugucccuucggcgagguguucaacgccacccgguucgccagcguguacgccuggaaccggaagcggaucagcaacugcguggccgacuacagcgugcuguacaacagcgccagcuucagcaccuucaagugcuacggcgugagcccuaccaagcugaacgaccugugcuucaccaacguguacgcugacagcuucgugauccggggcgacgaggugcggcagaucgcccccggccagaccggcaagaucgccgacuacaacuacaagcugcccgacgacuucaccggcugcgugaucgccuggaacagcaacaaccuggacagcaaggugggcggcaacuacaacuaccuguaccggcuguuccguaagagcaaccugaagccauucgagcgggacaucagcaccgagaucuaccaggccggcagcacccccugcaacgguguggagggcuuuaacugcuacuucccccugcagagcuacggcuuccagcccaccaacggcgugggcuaccagcccuaccgggugguggugcugagcuucgagcugcugcacgcccccgccaccgugugcggcccuaaaaagagcaccaaccuggugaagaacaagugcgugaacuucaauuucaacggccugaccggcaccggcgugcugaccgagagcaacaagaaguuccugcccuuccagcaguucggccgggauaucgccgacaccaccgacgcagugcgggacccccagacccuggagauccuggacaucaccccaugcagcuucggcggcgugagcgucaucacccccggcacaaacaccagcaaccagguggccgugcuguaccaggacgugaacugcaccgaggugcccguggccauccacgccgaccagcugacccccaccuggcggguguacagcaccggaagcaacguguuccagacccgggccggcugccugaucggcgccgagcacgugaacaacuccuacgagugcgacauccccaucggcgcuggcaucugcgccagcuaccagacccagaccaacagcccccggcgggcccggagcguggccagccagagcaucaucgccuacaccaugagcuuaggcgccgagaacagcguggccuacagcaacaacagcaucgcgaucccuaccaacuucaccaucagcgugaccaccgagauacugcccgugagcaugaccaagaccagcguggacuguaccauguacaucugcggcgacagcaccgagugcagcaaccugcugcugcaguacggcagcuucugcacccagcugaaccgggcccugaccggcaucgccguggagcaggacaagaacacccaagagguguucgcccaggugaagcagaucuacaagacucccccaaucaaggacuucggcggcuucaacuucagccagauccugcccgaccccagcaagcccagcaagcggagcuucaucgaggaccugcuguucaacaaggugacccuggccgacgccggcuucaucaagcaguacggcgauugccugggcgacaucgccgcucgggaccugaucugcgcccagaaguucaacgggcugaccgugcugcccccucugcugaccgacgagaugaucgcccaguacaccagcgcccugcuugccggcaccaucaccagcggcuggaccuucggcgccggcgcagcccugcagauccccuucgccaugcagauggccuaccgguucaacggcaucggcgugacccagaacgugcuguacgagaaccagaagcugaucgccaaccaguucaacagcgccaucggcaagauccaggacagccugagcagcaccgccagcgcccugggcaagcugcaggacguggugaaccagaacgcucaggcccugaacacccuggugaagcagcugagcagcaacuucggcgccaucagcucagugcugaaugacauccugagcaggcuggaucccccagaggccgaggugcagaucgaccggcugaucaccggccggcugcagagccugcagaccuacgugacccagcagcugauccgggccgccgagauccgggccagcgccaaccuggcagccaccaagaugagcgagugcgugcugggccagagcaagcggguggacuuuugcggcaagggcuaccaccugaugagcuucccccagagcgcuccccacggcgugguguuccuccacgugacauacguccccgcccaggagaagaacuucaccaccgcccccgccauuugccacgacggcaaggcccacuucccccgggagggcguguucgugagcaacggaacccacugguucgugacccagcggaacuucuacgagccucagaucaucaccaccgacaacaccuucgugagcggcaacugcgacguggugaucggcaucgugaacaacaccguguacgacccccugcagcccgagcuggacagcuucaaggaggagcuggacaaguacuucaagaaccacaccagcccagacguggaccugggcgacaucagcggcaucaacgccagcguggugaacauccagaaggagaucgaccggcugaacgagguggccaagaaccugaacgagagccugaucgaccugcaggagcugggcaaguacgagcaguacaucaaguggcccugguacaucuggcugggcuucaucgccggccugaucgccaucgugauggugaccaucaugcugugcugcaugaccagcugcuguagcugccugaagggcugcugcagcugcggcagcugcugcaaguucgacgaggacgacagcgagcccgugcugaagggcgugaagcugcacuacaccugaggacuagucccuguucccagagcccacuuuuuuuucuuuuuuugaaauaaaauagccugucuuucagaucuaaaaaaaaaaaaaaaaaaaaaaaaaaaaaaaaaaaaaaaaaaaaaaaaaaaaaaaaaaaaaaaaaaaaaaaaaaaaaaaaaaaaaaaaaaaaaaaaaaaa

SEQ ID NO: 24892 - RNA, 4070 nt, Artificial Sequence
  SARS-CoV-2/Wuhan/WIV05/2019__EPI_ISL_402128 spike protein mRNA gc (1-1273)(K986P_V987P_ D614G)
aggagagucccgcagucggcguccagcggcucugcuuguucgugugugugucguugcaggccuuauucaagcuuaccauguucguguuccuggugcugcugccccuggugagcagccagugcgugaaccugaccacccggacccagcugcccccugccuacaccaacagcuucacccggggcguguacuaccccgacaagguguuccggagcagcgugcugcacagcacccaggaccuguuccugcccuucuucagcaacgugaccugguuccacgccauccacgugagcggcaccaacggcaccaagcgguucgacaacccagugcugcccuucaacgacggcguguacuucgccagcaccgagaagucaaacaucauccggggcuggaucuucggcaccacccuggacagcaagacacagagccugcugaucgugaacaacgccaccaacguggugaucaaggugugcgaguuucaguucugcaacgaccccuuccugggcguguacuaccacaagaacaacaagagcuggauggagagcgaguuccgggucuacagcagcgcuaacaauugcaccuucgaguacgugagccagcccuuccugauggaccucgagggcaagcagggcaacuucaagaaccugcgggaguucguguucaagaacaucgauggcuacuucaagaucuacagcaagcacacccccaucaaccuggugcgggaccugccccagggauucagcgcccuggagccucugguggaccugcccaucggcaucaacaucaccagguuccagacccugcuggcccugcaccggagcuaccugacccccggcgacagcagcagcggcuggaccgccggcgccgccgcauacuacgugggcuaccugcagccacggaccuuccugcugaaguacaacgagaacggcaccaucaccgacgccguggacugcgcccuggacccccugagcgagaccaagugcacccuaaagagcuucaccguggagaagggcaucuaccagaccagcaacuuccgggugcagcccacugagagcaucgugcgguuccccaacauuaccaaccugugucccuucggcgagguguucaacgccacccgguucgccagcguguacgccuggaaccggaagcggaucagcaacugcguggccgacuacagcgugcuguacaacagcgccagcuucagcaccuucaagugcuacggcgugagcccuaccaagcugaacgaccugugcuucaccaacguguacgcugacagcuucgugauccggggcgacgaggugcggcagaucgcccccggccagaccggcaagaucgccgacuacaacuacaagcugcccgacgacuucaccggcugcgugaucgccuggaacagcaacaaccuggacagcaaggugggcggcaacuacaacuaccuguaccggcuguuccguaagagcaaccugaagccauucgagcgggacaucagcaccgagaucuaccaggccggcagcacccccugcaacgguguggagggcuuuaacugcuacuucccccugcagagcuacggcuuccagcccaccaacggcgugggcuaccagcccuaccgggugguggugcugagcuucgagcugcugcacgcccccgccaccgugugcggcccuaaaaagagcaccaaccuggugaagaacaagugcgugaacuucaauuucaacggccugaccggcaccggcgugcugaccgagagcaacaagaaguuccugcccuuccagcaguucggccgggauaucgccgacaccaccgacgcagugcgggacccccagacccuggagauccuggacaucaccccaugcagcuucggcggcgugagcgucaucacccccggcacaaacaccagcaaccagguggccgugcuguaccagggagugaacugcaccgaggugcccguggccauccacgccgaccagcugacccccaccuggcggguguacagcaccggcagcaacguguuccagacccgggccggcugccugaucggcgccgagcacgugaacaacuccuacgagugcgacauccccaucggcgcuggcaucugcgccagcuaccagacccagaccaacagcccccggcgggcccggagcguggccagccagagcaucaucgccuacaccaugagcuuaggcgccgagaacagcguggccuacagcaacaacagcaucgcgaucccuaccaacuucaccaucagcgugaccaccgagauacugcccgugagcaugaccaagaccagcguggacuguaccauguacaucugcggcgacagcaccgagugcagcaaccugcugcugcaguacggcagcuucugcacccagcugaaccgggcccugaccggcaucgccguggagcaggacaagaacacccaagagguguucgcccaggugaagcagaucuacaagacucccccaaucaaggacuucggcggcuucaacuucagccagauccugcccgaccccagcaagcccagcaagcggagcuucaucgaggaccugcuguucaacaaggugacccuggccgacgccggcuucaucaagcaguacggcgacugccugggggauaucgccgcucgggaccugaucugcgcccagaaguucaacggccugaccgugcugcccccucugcugaccgacgagaugaucgcccaguacaccagcgcccugcuugccggcaccaucaccagcggcuggaccuucggcgccggcgcagcccugcagauccccuucgccaugcagauggccuaccgguucaacggcaucggcgugacccagaacgugcuguacgagaaccagaagcugaucgccaaccaguucaacagcgccaucggcaagauccaggacagccugagcagcaccgccagcgcccugggcaagcugcaggacguggugaaccagaacgcucaggcccugaacacccuggugaagcagcugagcagcaacuucggcgccaucagcucagugcugaaugacauccugagcaggcuggaucccccagaggccgaggugcagaucgaccggcugaucaccggccggcugcagagccugcagaccuacgugacccagcagcugauccgggccgccgagauccgggccagcgccaaccuggcagccaccaagaugagcgagugcgugcugggccagagcaagcggguggacuuuugcggcaagggcuaccaccugaugagcuucccccagagcgcuccccacggcgugguguuccuccacgugacauacguccccgcccaggagaagaacuucaccaccgcccccgccauuugccacgacggcaaggcccacuucccccgggagggaguguucgugagcaacggcacccacugguucgugacccagcggaacuucuacgagccucagaucaucaccaccgacaacaccuucgugagcggcaacugcgacguggugaucggcaucgugaacaacaccguguacgacccccugcagcccgagcuggacagcuucaaggaggagcuggacaaguacuucaagaaccacaccagcccagacguggaccugggcgacaucagcggcaucaacgccagcguggugaacauccagaaggagaucgaccggcugaacgagguggccaagaaccugaacgagagccugaucgaccugcaggagcugggcaaguacgagcaguacaucaaguggcccugguacaucuggcugggcuucaucgccggccugaucgccaucgugauggugaccaucaugcugugcugcaugaccagcugcuguagcugccugaagggcugcugcagcugcggcagcugcugcaaguucgacgaggacgacagcgagcccgugcugaagggcgugaagcugcacuacaccugaggacuagucccuguucccagagcccacuuuuuuuucuuuuuuugaaauaaaauagccugucuuucagaucuaaaaaaaaaaaaaaaaaaaaaaaaaaaaaaaaaaaaaaaaaaaaaaaaaaaaaaaaaaaaaaaaaaaaaaaaaaaaaaaaaaaaaaaaaaaaaaaaaaaa

SEQ ID NO: 24893 - RNA, 4070 nt, Artificial Sequence
  SARS-CoV-2/Wuhan/WIV05/2019__EPI_ISL_402128 spike protein mRNA gc (1-1273)(K986P_V987P_A222V_D614G)
aggagagucccgcagucggcguccagcggcucugcuuguucgugugugugucguugcaggccuuauucaagcuuaccauguucguguuccuggugcugcugccccuggugagcagccagugcgugaaccugaccacccggacccagcugcccccugccuacaccaacagcuucacccggggcguguacuaccccgacaagguguuccggagcagcgugcugcacagcacccaggaccuguuccugcccuucuucagcaacgugaccugguuccacgccauccacgugagcggcaccaacggcaccaagcgguucgacaacccagugcugcccuucaacgacggcguguacuucgccagcaccgagaagucaaacaucauccggggcuggaucuucggcaccacccuggacagcaagacacagagccugcugaucgugaacaacgccaccaacguggugaucaaggugugcgaguuucaguucugcaacgaccccuuccugggcguguacuaccacaagaacaacaagagcuggauggagagcgaguuccgggucuacagcagcgcuaacaauugcaccuucgaguacgugagccagcccuuccugauggaccucgagggcaagcagggcaacuucaagaaccugcgggaguucguguucaagaacaucgauggcuacuucaagaucuacagcaagcacacccccaucaaccuggugcgggaccugccccagggauucagcgugcuggagccucugguggaccugcccaucggcaucaacaucaccagguuccagacccugcuggcccugcaccggagcuaccugacccccggcgacagcagcagcggcuggaccgccggcgccgccgccuacuacgugggcuaccugcagccacggaccuuccugcugaaguacaacgagaacggcaccaucaccgacgcaguggacugcgcccuggacccccugagcgagaccaagugcacccuaaagagcuucaccguggagaagggcaucuaccagaccagcaacuuccgggugcagcccacugagagcaucgugcgguuccccaacauuaccaaccugugucccuucggcgagguguucaacgccacccgguucgccagcguguacgccuggaaccggaagcggaucagcaacugcguggccgacuacagcgugcuguacaacagcgccagcuucagcaccuucaagugcuacggcgugagcccuaccaagcugaacgaccugugcuucaccaacguguacgccgacagcuucgugauccggggcgacgaggugcggcagaucgcucccggccagaccggcaagaucgccgacuacaacuacaagcugcccgacgacuucaccggcugcgugaucgccuggaacagcaacaaccuggacagcaaggugggcggcaacuacaacuaccuguaccggcuguuccguaagagcaaccugaagccauucgagcgggacaucagcaccgagaucuaccaggccggcagcacccccugcaacgguguggagggcuuuaacugcuacuucccccugcagagcuacggcuuccagcccaccaacggcgugggcuaccagcccuaccgggugguggugcugagcuucgagcugcugcacgcccccgccaccgugugcggcccuaaaaagagcaccaaccuggugaagaacaagugcgugaacuucaauuucaacggccugaccggcaccggcgugcugaccgagagcaacaagaaguuccugcccuuccagcaguucggccgggauaucgccgacaccaccgacgccgugcgggacccccagacccuggagauccuggacaucaccccaugcagcuucggcggcgucagcgugaucacccccggcacaaacaccagcaaccagguggcagugcuguaccagggagugaacugcaccgaggugcccguggccauccacgccgaccagcugacccccaccuggcggguguacagcaccggcagcaacguguuccagacccgggccggcugccugaucggcgccgagcacgugaacaacuccuacgagugcgacauccccaucggcgccggcaucugcgcuagcuaccagacccagaccaacagcccccggcgggcccggagcguggccagccagagcaucaucgccuacaccaugagcuuaggcgccgagaacagcguggccuacagcaacaacagcaucgccaucccuaccaacuucaccaucagcgugaccaccgagauacugcccgugagcaugaccaagaccagcguggacuguaccauguacaucugcggcgacagcaccgagugcagcaaccugcugcugcaguacggcagcuucugcacccagcugaaccgggcgcugaccggcaucgccguggagcaggacaagaacacccaagagguguucgcccaggugaagcagaucuacaagacucccccaaucaaggacuucggcggcuucaacuucagccagauccugcccgaccccagcaagcccagcaagcggagcuucaucgaggaccugcuguucaacaaggugacccuggccgacgccggcuucaucaagcaguacggcgacugccugggggauaucgccgcccgggaccugaucugcgcucagaaguucaacggccugaccgugcugcccccucugcugaccgacgagaugaucgcccaguacaccagcgcccugcuugccggcaccaucaccagcggcuggaccuucggcgccggcgccgcacugcagauccccuucgccaugcagauggccuaccgguucaacggcaucggcgugacccagaacgugcuguacgagaaccagaagcugaucgccaaccaguucaacagcgccaucggcaagauccaggacagccugagcagcaccgccagcgcccugggcaagcugcaggacguggugaaccagaacgcccaggcucugaacacccuggugaagcagcugagcagcaacuucggcgccaucagcucagugcugaaugacauccugagcaggcuggaucccccagaggccgaggugcagaucgaccggcugaucaccggccggcugcagagccugcagaccuacgugacccagcagcugauccgggccgccgagauccgggccagcgccaaccuggccgcaaccaagaugagcgagugcgugcugggccagagcaagcggguggacuuuugcggcaagggcuaccaccugaugagcuucccccagagcgcuccccacggcgugguguuccuccacgucacauacgugcccgcccaggagaagaacuucaccaccgcccccgccauuugccacgacggcaaggcccacuucccccgggagggaguguucgugagcaacggcacccacugguucgugacccagcggaacuucuacgagccucagaucaucaccaccgacaacaccuucgugagcggcaacugcgacguggugaucggcaucgugaacaacaccguguacgacccccugcagcccgagcuggacagcuucaaggaggagcuggacaaguacuucaagaaccacaccagcccagacguggaccugggcgacaucagcggcaucaacgccagcguggugaacauccagaaggagaucgaccggcugaacgagguggccaagaaccugaacgagagccugaucgaccugcaggagcugggcaaguacgagcaguacaucaaguggcccugguacaucuggcugggcuucaucgccggccugaucgccaucgugauggugaccaucaugcugugcugcaugaccagcugcuguagcugccugaagggcugcugcagcugcggcagcugcugcaaguucgacgaggacgacagcgagcccgugcugaagggcgugaagcugcacuacaccugaggacuagucccuguucccagagcccacuuuuuuuucuuuuuuugaaauaaaauagccugucuuucagaucuaaaaaaaaaaaaaaaaaaaaaaaaaaaaaaaaaaaaaaaaaaaaaaaaaaaaaaaaaaaaaaaaaaaaaaaaaaaaaaaaaaaaaaaaaaaaaaaaaaaa

SEQ ID NO: 24894 - RNA, 4070 nt, Artificial Sequence
  SARS-CoV-2/Wuhan/WIV05/2019__EPI_ISL_402128 spike protein mRNA gc (1-1273)(K986P_V987P_N439K_D614G)
aggagagucccgcagucggcguccagcggcucugcuuguucgugugugugucguugcaggccuuauucaagcuuaccauguucguguuccuggugcugcugccccuggugagcagccagugcgugaaccugaccacccggacccagcugcccccugccuacaccaacagcuucacccggggcguguacuaccccgacaagguguuccggagcagcgugcugcacagcacccaggaccuguuccugcccuucuucagcaacgugaccugguuccacgccauccacgugagcggcaccaacggcaccaagcgguucgacaacccagugcugcccuucaacgacggcguguacuucgccagcaccgagaagucaaacaucauccggggcuggaucuucggcaccacccuggacagcaagacacagagccugcugaucgugaacaacgccaccaacguggugaucaaggugugcgaguuucaguucugcaacgaccccuuccugggcguguacuaccacaagaacaacaagagcuggauggagagcgaguuccgggucuacagcagcgcuaacaauugcaccuucgaguacgugagccagcccuuccugauggaccucgagggcaagcagggcaacuucaagaaccugcgggaguucguguucaagaacaucgauggcuacuucaagaucuacagcaagcacacccccaucaaccuggugcgggaccugccccagggauucagcgcccuggagccucugguggaccugcccaucggcaucaacaucaccagguuccagacccugcuggcccugcaccggagcuaccugacccccggcgacagcagcagcggcuggaccgccggcgccgccgcauacuacgugggcuaccugcagccacggaccuuccugcugaaguacaacgagaacggcaccaucaccgacgccguggacugcgcccuggacccccugagcgagaccaagugcacccuaaagagcuucaccguggagaagggcaucuaccagaccagcaacuuccgggugcagcccacugagagcaucgugcgguuccccaacauuaccaaccugugucccuucggcgagguguucaacgccacccgguucgccagcguguacgccuggaaccggaagcggaucagcaacugcguggccgacuacagcgugcuguacaacagcgccagcuucagcaccuucaagugcuacggcgugagcccuaccaagcugaacgaccugugcuucaccaacguguacgcugacagcuucgugauccggggcgacgaggugcggcagaucgcccccggccagaccggcaagaucgccgacuacaacuacaagcugcccgacgacuucaccggcugcgugaucgccuggaacagcaagaaccuggacagcaaggugggcggcaacuacaacuaccuguaccggcuguuccguaagagcaaccugaagccauucgagcgggacaucagcaccgagaucuaccaggccggcagcacccccugcaacgguguggagggcuuuaacugcuacuucccccugcagagcuacggcuuccagcccaccaacggcgugggcuaccagcccuaccgggugguggugcugagcuucgagcugcugcacgcccccgccaccgugugcggcccuaaaaagagcaccaaccuggugaagaacaagugcgugaacuucaacuucaauggccugaccggcaccggcgugcugaccgagagcaacaagaaguuccugcccuuccagcaguucggccgggauaucgccgacaccaccgacgcagugcgggacccccagacccuggagauccuggacaucaccccaugcagcuucggcggcgugagcgucaucacccccggcacaaacaccagcaaccagguggccgugcuguaccagggagugaacugcaccgaggugcccguggccauccacgccgaccagcugacccccaccuggcggguguacagcaccggcagcaacguguuccagacccgggccggcugccugaucggcgccgagcacgugaacaacuccuacgagugcgacauccccaucggcgcuggcaucugcgccagcuaccagacccagaccaacagcccccggcgggcccggagcguggccagccagagcaucaucgccuacaccaugagcuuaggcgccgagaacagcguggccuacagcaacaacagcaucgcgaucccuaccaacuucaccaucagcgugaccaccgagauacugcccgugagcaugaccaagaccagcguggacuguaccauguacaucugcggcgacagcaccgagugcagcaaccugcugcugcaguacggcagcuucugcacccagcugaaccgggcccugaccggcaucgccguggagcaggacaagaacacccaagagguguucgcccaggugaagcagaucuacaagacucccccaaucaaggacuucggcggcuucaacuucagccagauccugcccgaccccagcaagcccagcaagcggagcuucaucgaggaccugcuguucaacaaggugacccuggccgacgccggcuucaucaagcaguacggcgacugccugggggauaucgccgcucgggaccugaucugcgcccagaaguucaacggccugaccgugcugcccccucugcugaccgacgagaugaucgcccaguacaccagcgcccugcuugccggcaccaucaccagcggcuggaccuucggcgccggcgcagcccugcagauccccuucgccaugcagauggccuaccgguucaacggcaucggcgugacccagaacgugcuguacgagaaccagaagcugaucgccaaccaguucaacagcgccaucggcaagauccaggacagccugagcagcaccgccagcgcccugggcaagcugcaggacguggugaaccagaacgcucaggcccugaacacccuggugaagcagcugagcagcaacuucggcgccaucagcucagugcugaacgacauccugagcaggcuggaucccccagaggccgaggugcagaucgaccggcugaucaccggccggcugcagagccugcagaccuacgugacccagcagcugauccgggccgccgagauccgggccagcgccaaucuggcagccaccaagaugagcgagugcgugcugggccagagcaagcggguggacuuuugcggcaagggcuaccaccugaugagcuucccccagagcgcuccccacggcgugguguuccuccacgugacauacguccccgcccaggagaagaacuucaccaccgcccccgccauuugccacgacggcaaggcccacuucccccgggagggaguguucgugagcaacggcacccacugguucgugacccagcggaacuucuacgagccucagaucaucaccaccgacaacaccuucgugagcggcaacugcgacguggugaucggcaucgugaacaacaccguguacgacccccugcagcccgagcuggacagcuucaaggaggagcuggacaaguacuucaagaaccacaccagcccagacguggaccugggcgacaucagcggcaucaacgccagcguggugaacauccagaaggagaucgaccggcugaacgagguggccaagaaccugaacgagagccugaucgaccugcaggagcugggcaaguacgagcaguacaucaaguggcccugguacaucuggcugggcuucaucgccggccugaucgccaucgugauggugaccaucaugcugugcugcaugaccagcugcuguagcugccugaagggcugcugcagcugcggcagcugcugcaaguucgacgaggacgacagcgagcccgugcugaagggcgugaagcugcacuacaccugaggacuagucccuguucccagagcccacuuuuuuuucuuuuuuugaaauaaaauagccugucuuucagaucuaaaaaaaaaaaaaaaaaaaaaaaaaaaaaaaaaaaaaaaaaaaaaaaaaaaaaaaaaaaaaaaaaaaaaaaaaaaaaaaaaaaaaaaaaaaaaaaaaaaa

SEQ ID NO: 24895 - RNA, 4070 nt, Artificial Sequence
  SARS-CoV-2/Wuhan/WIV05/2019__EPI_ISL_402128 spike protein mRNA gc (1-1273)(K986P_V987P_S477N_D614G)
aggagagucccgcagucggcguccagcggcucugcuuguucgugugugugucguugcaggccuuauucaagcuuaccauguucguguuccuggugcugcugccccuggugagcagccagugcgugaaccugaccacccggacccagcugcccccugccuacaccaacagcuucacccggggcguguacuaccccgacaagguguuccggagcagcgugcugcacagcacccaggaccuguuccugcccuucuucagcaacgugaccugguuccacgccauccacgugagcggcaccaacggcaccaagcgguucgacaacccagugcugcccuucaacgacggcguguacuucgccagcaccgagaagucaaacaucauccggggcuggaucuucggcaccacccuggacagcaagacacagagccugcugaucgugaacaacgccaccaacguggugaucaaggugugcgaguuucaguucugcaacgaccccuuccugggcguguacuaccacaagaacaacaagagcuggauggagagcgaguuccgggucuacagcagcgcuaacaauugcaccuucgaguacgugagccagcccuuccugauggaccucgagggcaagcagggcaacuucaagaaccugcgggaguucguguucaagaacaucgauggcuacuucaagaucuacagcaagcacacccccaucaaccuggugcgggaccugccccagggauucagcgcccuggagccucugguggaccugcccaucggcaucaacaucaccagguuccagacccugcuggcccugcaccggagcuaccugacccccggcgacagcagcagcggcuggaccgccggcgccgccgcauacuacgugggcuaccugcagccacggaccuuccugcugaaguacaacgagaacggcaccaucaccgacgccguggacugcgcccuggacccccugagcgagaccaagugcacccuaaagagcuucaccguggagaagggcaucuaccagaccagcaacuuccgggugcagcccacugagagcaucgugcgguuccccaacauuaccaaccugugucccuucggcgagguguucaacgccacccgguucgccagcguguacgccuggaaccggaagcggaucagcaacugcguggccgacuacagcgugcuguacaacagcgccagcuucagcaccuucaagugcuacggcgugagcccuaccaagcugaacgaccugugcuucaccaacguguacgcugacagcuucgugauccggggcgacgaggugcggcagaucgcccccggccagaccggcaagaucgccgacuacaacuacaagcugcccgacgacuucaccggcugcgugaucgccuggaacagcaacaaccuggacagcaaggugggcggcaacuacaacuaccuguaccggcuguuccguaagagcaaccugaagccauucgagcgggacaucagcaccgagaucuaccaggccggcaacacccccugcaacgguguggagggcuuuaacugcuacuucccccugcagagcuacggcuuccagcccaccaacggcgugggcuaccagcccuaccgggugguggugcugagcuucgagcugcugcacgcccccgccaccgugugcggcccuaaaaagagcaccaaccuggugaagaacaagugcgugaauuucaacuucaacggccugaccggcaccggcgugcugaccgagagcaacaagaaguuccugcccuuccagcaguucggccgggauaucgccgacaccaccgacgcagugcgggacccccagacccuggagauccuggacaucaccccaugcagcuucggcggcgugagcgucaucacccccggcacaaacaccagcaaccagguggccgugcuguaccagggagugaacugcaccgaggugcccguggccauccacgccgaccagcugacccccaccuggcggguguacagcaccggcagcaacguguuccagacccgggccggcugccugaucggcgccgagcacgugaacaacagcuacgagugcgacauccccaucggcgcuggcaucugcgccuccuaccagacccagaccaacagcccccggcgggcccggagcguggccagccagagcaucaucgccuacaccaugagcuuaggcgccgagaacagcguggccuacagcaacaacagcaucgcgaucccuaccaacuucaccaucagcgugaccaccgagauacugcccgugagcaugaccaagaccagcguggacuguaccauguacaucugcggcgacagcaccgagugcagcaaccugcugcugcaguacggcagcuucugcacccagcugaaccgggcccugaccggcaucgccguggagcaggacaagaacacccaagagguguucgcccaggugaagcagaucuacaagacucccccaaucaaggacuucggcggcuucaacuucagccagauccugcccgaccccagcaagcccagcaagcggagcuucaucgaggaccugcuguucaacaaggugacccuggccgacgccggcuucaucaagcaguacggcgacugccugggggauaucgccgcucgggaccugaucugcgcccagaaguucaacggccugaccgugcugcccccucugcugaccgacgagaugaucgcccaguacaccagcgcccugcuugccggcaccaucaccagcggcuggaccuucggcgccggcgcagcccugcagauccccuucgccaugcagauggccuaccgguucaacggcaucggcgugacccagaacgugcuguacgagaaccagaagcugaucgccaaccaguucaacagcgccaucggcaagauccaggacagccugagcagcaccgccagcgcccugggcaagcugcaggacguggugaaccagaacgcucaggcccugaacacccuggugaagcagcugagcagcaauuucggcgccaucagcagcgugcugaacgacauccugucaaggcuggaucccccagaggccgaggugcagaucgaccggcugaucaccggccggcugcagagccugcagaccuacgugacccagcagcugauccgggccgccgagauccgggccagcgccaaccuggcagccaccaagaugagcgagugcgugcugggccagagcaagcggguggacuuuugcggcaagggcuaccaccugaugagcuucccccagagcgcuccccacggcgugguguuccuccacgugacauacguccccgcccaggagaagaacuucaccaccgcccccgccauuugccacgacggcaaggcccacuucccccgggagggaguguucgugagcaacggcacccacugguucgugacccagcggaacuucuacgagccucagaucaucaccaccgacaacaccuucgugagcggcaacugcgacguggugaucggcaucgugaacaacaccguguacgacccccugcagcccgagcuggacagcuucaaggaggagcuggacaaguacuucaagaaccacaccagcccagacguggaccugggcgacaucagcggcaucaacgccagcguggugaacauccagaaggagaucgaccggcugaacgagguggccaagaaccugaacgagagccugaucgaccugcaggagcugggcaaguacgagcaguacaucaaguggcccugguacaucuggcugggcuucaucgccggccugaucgccaucgugauggugaccaucaugcugugcugcaugaccagcugcuguagcugccugaagggcugcugcagcugcggcagcugcugcaaguucgacgaggacgacagcgagcccgugcugaagggcgugaagcugcacuacaccugaggacuagucccuguucccagagcccacuuuuuuuucuuuuuuugaaauaaaauagccugucuuucagaucuaaaaaaaaaaaaaaaaaaaaaaaaaaaaaaaaaaaaaaaaaaaaaaaaaaaaaaaaaaaaaaaaaaaaaaaaaaaaaaaaaaaaaaaaaaaaaaaaaaaa

SEQ ID NO: 24896 - RNA, 4070 nt, Artificial Sequence
  SARS-CoV-2/Wuhan/WIV05/2019__EPI_ISL_402128 spike protein mRNA gc (1-1273)(K986P_V987P_N501Y_D614G)
aggagagucccgcagucggcguccagcggcucugcuuguucgugugugugucguugcaggccuuauucaagcuuaccauguucguguuccuggugcugcugccccuggugagcagccagugcgugaaccugaccacccggacccagcugcccccugccuacaccaacagcuucacccggggcguguacuaccccgacaagguguuccggagcagcgugcugcacagcacccaggaccuguuccugcccuucuucagcaacgugaccugguuccacgccauccacgugagcggcaccaacggcaccaagcgguucgacaacccagugcugcccuucaacgacggcguguacuucgccagcaccgagaagucaaacaucauccggggcuggaucuucggcaccacccuggacagcaagacacagagccugcugaucgugaacaacgccaccaacguggugaucaaggugugcgaguuucaguucugcaacgaccccuuccugggcguguacuaccacaagaacaacaagagcuggauggagagcgaguuccgggucuacagcagcgcuaacaauugcaccuucgaguacgugagccagcccuuccugauggaccucgagggcaagcagggcaacuucaagaaccugcgggaguucguguucaagaacaucgauggcuacuucaagaucuacagcaagcacacccccaucaaccuggugcgggaccugccccagggauucagcgcccuggagccucugguggaccugcccaucggcaucaacaucaccagguuccagacccugcuggcccugcaccggagcuaccugacccccggcgacagcagcagcggcuggaccgccggcgccgccgcauacuacgugggcuaccugcagccacggaccuuccugcugaaguacaacgagaacggcaccaucaccgacgccguggacugcgcccuggacccccugagcgagaccaagugcacccuaaagagcuucaccguggagaagggcaucuaccagaccagcaacuuccgggugcagcccacugagagcaucgugcgguuccccaacauuaccaaccugugucccuucggcgagguguucaacgccacccgguucgccagcguguacgccuggaaccggaagcggaucagcaacugcguggccgacuacagcgugcuguacaacagcgccagcuucagcaccuucaagugcuacggcgugagcccuaccaagcugaacgaccugugcuucaccaacguguacgcugacagcuucgugauccggggcgacgaggugcggcagaucgcccccggccagaccggcaagaucgccgacuacaacuacaagcugcccgacgacuucaccggcugcgugaucgccuggaacagcaacaaccuggacagcaaggugggcggcaacuacaacuaccuguaccggcuguuccguaagagcaaccugaagccauucgagcgggacaucagcaccgagaucuaccaggccggcagcacccccugcaacgguguggagggcuuuaacugcuacuucccccugcagagcuacggcuuccagcccaccuacggcgugggcuaccagcccuaccgggugguggugcugagcuucgagcugcugcacgcccccgccaccgugugcggcccuaaaaagagcaccaaccuggugaagaacaagugcgugaacuucaacuucaauggccugaccggcaccggcgugcugaccgagagcaacaagaaguuccugcccuuccagcaguucggccgggauaucgccgacaccaccgacgcagugcgggacccccagacccuggagauccuggacaucaccccaugcagcuucggcggcgugagcgucaucacccccggcacaaacaccagcaaccagguggccgugcuguaccagggagugaacugcaccgaggugcccguggccauccacgccgaccagcugacccccaccuggcggguguacagcaccggcagcaacguguuccagacccgggccggcugccugaucggcgccgagcacgugaacaacuccuacgagugcgacauccccaucggcgcuggcaucugcgccagcuaccagacccagaccaacagcccccggcgggcccggagcguggccagccagagcaucaucgccuacaccaugagcuuaggcgccgagaacagcguggccuacagcaacaacagcaucgcgaucccuaccaacuucaccaucagcgugaccaccgagauacugcccgugagcaugaccaagaccagcguggacuguaccauguacaucugcggcgacagcaccgagugcagcaaccugcugcugcaguacggcagcuucugcacccagcugaaccgggcccugaccggcaucgccguggagcaggacaagaacacccaagagguguucgcccaggugaagcagaucuacaagacucccccaaucaaggacuucggcggcuucaacuucagccagauccugcccgaccccagcaagcccagcaagcggagcuucaucgaggaccugcuguucaacaaggugacccuggccgacgccggcuucaucaagcaguacggcgacugccugggggauaucgccgcucgggaccugaucugcgcccagaaguucaacggccugaccgugcugcccccucugcugaccgacgagaugaucgcccaguacaccagcgcccugcuugccggcaccaucaccagcggcuggaccuucggcgccggcgcagcccugcagauccccuucgccaugcagauggccuaccgguucaacggcaucggcgugacccagaacgugcuguacgagaaccagaagcugaucgccaaccaguucaacagcgccaucggcaagauccaggacagccugagcagcaccgccagcgcccugggcaagcugcaggacguggugaaccagaacgcucaggcccugaacacccuggugaagcagcugagcagcaacuucggcgccaucagcucagugcugaacgacauccugagcaggcuggaucccccagaggccgaggugcagaucgaccggcugaucaccggccggcugcagagccugcagaccuacgugacccagcagcugauccgggccgccgagauccgggccagcgccaaucuggcagccaccaagaugagcgagugcgugcugggccagagcaagcggguggacuuuugcggcaagggcuaccaccugaugagcuucccccagagcgcuccccacggcgugguguuccuccacgugacauacguccccgcccaggagaagaacuucaccaccgcccccgccauuugccacgacggcaaggcccacuucccccgggagggaguguucgugagcaacggcacccacugguucgugacccagcggaacuucuacgagccucagaucaucaccaccgacaacaccuucgugagcggcaacugcgacguggugaucggcaucgugaacaacaccguguacgacccccugcagcccgagcuggacagcuucaaggaggagcuggacaaguacuucaagaaccacaccagcccagacguggaccugggcgacaucagcggcaucaacgccagcguggugaacauccagaaggagaucgaccggcugaacgagguggccaagaaccugaacgagagccugaucgaccugcaggagcugggcaaguacgagcaguacaucaaguggcccugguacaucuggcugggcuucaucgccggccugaucgccaucgugauggugaccaucaugcugugcugcaugaccagcugcuguagcugccugaagggcugcugcagcugcggcagcugcugcaaguucgacgaggacgacagcgagcccgugcugaagggcgugaagcugcacuacaccugaggacuagucccuguucccagagcccacuuuuuuuucuuuuuuugaaauaaaauagccugucuuucagaucuaaaaaaaaaaaaaaaaaaaaaaaaaaaaaaaaaaaaaaaaaaaaaaaaaaaaaaaaaaaaaaaaaaaaaaaaaaaaaaaaaaaaaaaaaaaaaaaaaaaa

SEQ ID NO: 24897 - RNA, 4064 nt, Artificial Sequence
  SARS-CoV-2/Wuhan/WIV05/2019__EPI_ISL_402128 spike protein mRNA gc (1-1273)(K986P_V987P_H69del_V70del_D614G)
aggagagucccgcagucggcguccagcggcucugcuuguucgugugugugucguugcaggccuuauucaagcuuaccauguucguguuccuggugcugcugccccuggugagcagccagugcgugaaccugaccacccggacccagcugcccccugccuacaccaacagcuucacccggggcguguacuaccccgacaagguguuccggagcagcgugcugcacagcacccaggaccuguuccugcccuucuucagcaacgugaccugguuccacgccaucagcggcaccaacggcaccaagcgguucgacaacccagugcugcccuucaacgacggcguguacuucgccagcaccgagaagucaaacaucauccggggcuggaucuucggcaccacccuggacagcaagacacagagccugcugaucgugaacaacgccaccaacguggugaucaaggugugcgaguuucaguucugcaacgaccccuuccugggcguguacuaccacaagaacaacaagagcuggauggagagcgaguuccggguguacagcagcgcuaacaauugcaccuucgaguacgucagccagcccuuccugauggaccucgagggcaagcagggcaacuucaagaaccugcgggaguucguguucaagaacaucgauggcuacuucaagaucuacagcaagcacacccccaucaaccuggugcgggaccugccccagggauucagcgcccuggagccucugguggaccugcccaucggcaucaacaucaccagguuccagacccugcuggcccugcaccggagcuaccugacccccggcgacagcagcagcggcuggaccgccggcgccgccgcauacuacgugggcuaccugcagccacggaccuuccugcugaaguacaacgagaacggcaccaucaccgacgccguggacugcgcccuggacccccugagcgagaccaagugcacccuaaagagcuucaccguggagaagggcaucuaccagaccagcaacuuccgggugcagcccacugagagcaucgugcgguuccccaacauuaccaaccugugucccuucggcgagguguucaacgccacccgguucgccagcguguacgccuggaaccggaagcggaucagcaacugcguggccgacuacagcgugcuguacaacagcgccagcuucagcaccuucaagugcuacggcgugagcccuaccaagcugaacgaccugugcuucaccaacguguacgcugacagcuucgugauccggggcgacgaggugcggcagaucgcccccggccagaccggcaagaucgccgacuacaacuacaagcugcccgacgacuucaccggcugcgugaucgccuggaacagcaacaaccuggacagcaaggugggcggcaacuacaacuaccuguaccggcuguuccguaagagcaaccugaagccauucgagcgggacaucagcaccgagaucuaccaggccggcagcacccccugcaacgguguggagggcuuuaacugcuacuucccccugcagagcuacggcuuccagcccaccaacggcgugggcuaccagcccuaccgggugguggugcugagcuucgagcugcugcacgcccccgccaccgugugcggcccuaaaaagagcaccaaccuggugaagaacaagugcgugaacuucaauuucaacggccugaccggcaccggcgugcugaccgagagcaacaagaaguuccugcccuuccagcaguucggccgggauaucgccgacaccaccgacgcagugcgggacccccagacccuggagauccuggacaucaccccaugcagcuucggcggcgugagcgugaucacccccggcacaaacaccagcaaccaggucgccgugcuguaccagggagugaacugcaccgaggugcccguggccauccacgccgaccagcugacccccaccuggcggguguacagcaccggcagcaacguguuccagacccgggccggcugccugaucggcgccgagcacgugaacaacuccuacgagugcgacauccccaucggcgcuggcaucugcgccagcuaccagacccagaccaacagcccccggcgggcccggagcguggccagccagagcaucaucgccuacaccaugagcuuaggcgccgagaacagcguggccuacagcaacaacagcaucgcgaucccuaccaacuucaccaucagcgugaccaccgagauacugcccgugagcaugaccaagaccagcguggacuguaccauguacaucugcggcgacagcaccgagugcagcaaccugcugcugcaguacggcagcuucugcacccagcugaaccgggcccugaccggcaucgccguggagcaggacaagaacacccaagagguguucgcccaggugaagcagaucuacaagacucccccaaucaaggacuucggcggcuucaacuucagccagauccugcccgaccccagcaagcccagcaagcggagcuucaucgaggaccugcuguucaacaaggugacccuggccgacgccggcuucaucaagcaguacggcgacugccugggggauaucgccgcucgggaccugaucugcgcccagaaguucaacggccugaccgugcugcccccucugcugaccgacgagaugaucgcccaguacaccagcgcccugcuugccggcaccaucaccagcggcuggaccuucggcgccggcgcagcccugcagauccccuucgccaugcagauggccuaccgguucaacggcaucggcgugacccagaacgugcuguacgagaaccagaagcugaucgccaaccaguucaacagcgccaucggcaagauccaggacagccugagcagcaccgccagcgcccugggcaagcugcaggacguggugaaccagaacgcucaggcccugaacacccuggugaagcagcugagcagcaacuucggcgccaucagcucagugcugaaugacauccugagcaggcuggaucccccagaggccgaggugcagaucgaccggcugaucaccggccggcugcagagccugcagaccuacgugacccagcagcugauccgggccgccgagauccgggccagcgccaaccuggcagccaccaagaugagcgagugcgugcugggccagagcaagcggguggacuuuugcggcaagggcuaccaccugaugagcuucccccagagcgcuccccacggcgugguguuccuccacgugacauacgugcccgcccaggagaagaacuucaccaccgcccccgccauuugccacgacggcaaggcccacuucccccgggagggagucuucgugagcaacggcacccacugguucgugacccagcggaacuucuacgagccucagaucaucaccaccgacaacaccuucgugagcggcaacugcgacguggugaucggcaucgugaacaacaccguguacgacccccugcagcccgagcuggacagcuucaaggaggagcuggacaaguacuucaagaaccacaccagcccagacguggaccugggcgacaucagcggcaucaacgccagcguggugaacauccagaaggagaucgaccggcugaacgagguggccaagaaccugaacgagagccugaucgaccugcaggagcugggcaaguacgagcaguacaucaaguggcccugguacaucuggcugggcuucaucgccggccugaucgccaucgugauggugaccaucaugcugugcugcaugaccagcugcuguagcugccugaagggcugcugcagcugcggcagcugcugcaaguucgacgaggacgacagcgagcccgugcugaagggcgugaagcugcacuacaccugaggacuagucccuguucccagagcccacuuuuuuuucuuuuuuugaaauaaaauagccugucuuucagaucuaaaaaaaaaaaaaaaaaaaaaaaaaaaaaaaaaaaaaaaaaaaaaaaaaaaaaaaaaaaaaaaaaaaaaaaaaaaaaaaaaaaaaaaaaaaaaaaaaaaa

SEQ ID NO: 24898 - RNA, 4070 nt, Artificial Sequence
  SARS-CoV-2/Wuhan/WIV05/2019__EPI_ISL_402128 spike protein mRNA gc (1-1273)(K986P_V987P_Y453F_D614G)
aggagagucccgcagucggcguccagcggcucugcuuguucgugugugugucguugcaggccuuauucaagcuuaccauguucguguuccuggugcugcugccccuggugagcagccagugcgugaaccugaccacccggacccagcugcccccugccuacaccaacagcuucacccggggcguguacuaccccgacaagguguuccggagcagcgugcugcacagcacccaggaccuguuccugcccuucuucagcaacgugaccugguuccacgccauccacgugagcggcaccaacggcaccaagcgguucgacaacccagugcugcccuucaacgacggcguguacuucgccagcaccgagaagucaaacaucauccggggcuggaucuucggcaccacccuggacagcaagacacagagccugcugaucgugaacaacgccaccaacguggugaucaaggugugcgaguuucaguucugcaacgaccccuuccugggcguguacuaccacaagaacaacaagagcuggauggagagcgaguuccgggucuacagcagcgcuaacaauugcaccuucgaguacgugagccagcccuuccugauggaccucgagggcaagcagggcaacuucaagaaccugcgggaguucguguucaagaacaucgauggcuacuucaagaucuacagcaagcacacccccaucaaccuggugcgggaccugccccagggauucagcgcccuggagccucugguggaccugcccaucggcaucaacaucaccagguuccagacccugcuggcccugcaccggagcuaccugacccccggcgacagcagcagcggcuggaccgccggcgccgccgcauacuacgugggcuaccugcagccacggaccuuccugcugaaguacaacgagaacggcaccaucaccgacgccguggacugcgcccuggacccccugagcgagaccaagugcacccuaaagagcuucaccguggagaagggcaucuaccagaccagcaacuuccgggugcagcccacugagagcaucgugcgguuccccaacauuaccaaccugugucccuucggcgagguguucaacgccacccgguucgccagcguguacgccuggaaccggaagcggaucagcaacugcguggccgacuacagcgugcuguacaacagcgccagcuucagcaccuucaagugcuacggcgugagcccuaccaagcugaacgaccugugcuucaccaacguguacgcugacagcuucgugauccggggcgacgaggugcggcagaucgcccccggccagaccggcaagaucgccgacuacaacuacaagcugcccgacgacuucaccggcugcgugaucgccuggaacagcaacaaccuggacagcaaggugggcggcaacuacaacuaccuguuccggcuguuccguaagagcaaccugaagccauuugagcgggacaucagcaccgagaucuaccaggccggcagcacccccugcaacgguguggagggcuucaacugcuacuucccccugcagagcuacggcuuccagcccaccaacggcgugggcuaccagcccuaccgggugguggugcugagcuucgagcugcugcacgcccccgccaccgugugcggcccuaaaaagagcaccaaccuggugaagaacaagugcgugaacuucaauuucaacggccugaccggcaccggcgugcugaccgagagcaacaagaaguuccugcccuuccagcaguucggccgggauaucgccgacaccaccgacgcagugcgggacccccagacccuggagauccuggacaucaccccaugcagcuucggcggcgugagcgucaucacccccggcacaaacaccagcaaccagguggccgugcuguaccagggagugaacugcaccgaggugcccguggccauccacgccgaccagcugacccccaccuggcggguguacagcaccggcagcaacguguuccagacccgggccggcugccugaucggcgccgagcacgugaacaacuccuacgagugcgacauccccaucggcgcuggcaucugcgccagcuaccagacccagaccaacagcccccggcgggcccggagcguggccagccagagcaucaucgccuacaccaugagcuuaggcgccgagaacagcguggccuacagcaacaacagcaucgcgaucccuaccaacuucaccaucagcgugaccaccgagauacugcccgugagcaugaccaagaccagcguggacuguaccauguacaucugcggcgacagcaccgagugcagcaaccugcugcugcaguacggcagcuucugcacccagcugaaccgggcccugaccggcaucgccguggagcaggacaagaacacccaagagguguucgcccaggugaagcagaucuacaagacucccccaaucaaggacuucggcggcuucaacuucagccagauccugcccgaccccagcaagcccagcaagcggagcuucaucgaggaccugcuguucaacaaggugacccuggccgacgccggcuucaucaagcaguacggcgacugccugggggauaucgccgcucgggaccugaucugcgcccagaaguucaacggccugaccgugcugcccccucugcugaccgacgagaugaucgcccaguacaccagcgcccugcuugccggcaccaucaccagcggcuggaccuucggcgccggcgcagcccugcagauccccuucgccaugcagauggccuaccgguucaacggcaucggcgugacccagaacgugcuguacgagaaccagaagcugaucgccaaccaguucaacagcgccaucggcaagauccaggacagccugagcagcaccgccagcgcccugggcaagcugcaggacguggugaaccagaacgcucaggcccugaacacccuggugaagcagcugagcagcaacuuuggcgccaucagcucagugcugaaugacauccugagcaggcuggaucccccagaggccgaggugcagaucgaccggcugaucaccggccggcugcagagccugcagaccuacgugacccagcagcugauccgggccgccgagauccgggccagcgccaaccuggcagccaccaagaugagcgagugcgugcugggccagagcaagcggguggacuucugcggcaagggcuaccaccugaugagcuucccccagagcgcuccccacggcgugguguuccuccacgugacauacguccccgcccaggagaagaacuucaccaccgcccccgccauuugccacgacggcaaggcccacuucccccgggagggaguguucgugagcaacggcacccacugguucgugacccagcggaacuucuacgagccucagaucaucaccaccgacaacaccuucgugagcggcaacugcgacguggugaucggcaucgugaacaacaccguguacgacccccugcagcccgagcuggacagcuucaaggaggagcuggacaaguacuucaagaaccacaccagcccagacguggaccugggcgacaucagcggcaucaacgccagcguggugaacauccagaaggagaucgaccggcugaacgagguggccaagaaccugaacgagagccugaucgaccugcaggagcugggcaaguacgagcaguacaucaaguggcccugguacaucuggcugggcuucaucgccggccugaucgccaucgugauggugaccaucaugcugugcugcaugaccagcugcuguagcugccugaagggcugcugcagcugcggcagcugcugcaaguucgacgaggacgacagcgagcccgugcugaagggcgugaagcugcacuacaccugaggacuagucccuguucccagagcccacuuuuuuuucuuuuuuugaaauaaaauagccugucuuucagaucuaaaaaaaaaaaaaaaaaaaaaaaaaaaaaaaaaaaaaaaaaaaaaaaaaaaaaaaaaaaaaaaaaaaaaaaaaaaaaaaaaaaaaaaaaaaaaaaaaaaa

SEQ ID NO: 24899 - RNA, 4070 nt, Artificial Sequence
  SARS-CoV-2/Wuhan/WIV05/2019__EPI_ISL_402128 spike protein mRNA gc (1-1273)(K986P_V987P_D614G_I692V)
aggagagucccgcagucggcguccagcggcucugcuuguucgugugugugucguugcaggccuuauucaagcuuaccauguucguguuccuggugcugcugccccuggugagcagccagugcgugaaccugaccacccggacccagcugcccccugccuacaccaacagcuucacccggggcguguacuaccccgacaagguguuccggagcagcgugcugcacagcacccaggaccuguuccugcccuucuucagcaacgugaccugguuccacgccauccacgugagcggcaccaacggcaccaagcgguucgacaacccagugcugcccuucaacgacggcguguacuucgccagcaccgagaagucaaacaucauccggggcuggaucuucggcaccacccuggacagcaagacacagagccugcugaucgugaacaacgccaccaacguggugaucaaggugugcgaguuucaguucugcaacgaccccuuccugggcguguacuaccacaagaacaacaagagcuggauggagagcgaguuccgggucuacagcagcgcuaacaauugcaccuucgaguacgugagccagcccuuccugauggaccucgagggcaagcagggcaacuucaagaaccugcgggaguucguguucaagaacaucgauggcuacuucaagaucuacagcaagcacacccccaucaaccuggugcgggaccugccccagggauucagcgcccuggagccucugguggaccugcccaucggcaucaacaucaccagguuccagacccugcuggcccugcaccggagcuaccugacccccggcgacagcagcagcggcuggaccgccggcgccgccgcauacuacgugggcuaccugcagccacggaccuuccugcugaaguacaacgagaacggcaccaucaccgacgccguggacugcgcccuggacccccugagcgagaccaagugcacccuaaagagcuucaccguggagaagggcaucuaccagaccagcaacuuccgggugcagcccacugagagcaucgugcgguuccccaacauuaccaaccugugucccuucggcgagguguucaacgccacccgguucgccagcguguacgccuggaaccggaagcggaucagcaacugcguggccgacuacagcgugcuguacaacagcgccagcuucagcaccuucaagugcuacggcgugagcccuaccaagcugaacgaccugugcuucaccaacguguacgcugacagcuucgugauccggggcgacgaggugcggcagaucgcccccggccagaccggcaagaucgccgacuacaacuacaagcugcccgacgacuucaccggcugcgugaucgccuggaacagcaacaaccuggacagcaaggugggcggcaacuacaacuaccuguaccggcuguuccguaagagcaaccugaagccauucgagcgggacaucagcaccgagaucuaccaggccggcagcacccccugcaacgguguggagggcuuuaacugcuacuucccccugcagagcuacggcuuccagcccaccaacggcgugggcuaccagcccuaccgggugguggugcugagcuucgagcugcugcacgcccccgccaccgugugcggcccuaaaaagagcaccaaccuggugaagaacaagugcgugaacuucaauuucaacggccugaccggcaccggcgugcugaccgagagcaacaagaaguuccugcccuuccagcaguucggccgggauaucgccgacaccaccgacgcagugcgggacccccagacccuggagauccuggacaucaccccaugcagcuucggcggcgugagcgucaucacccccggcacaaacaccagcaaccagguggccgugcuguaccagggagugaacugcaccgaggugcccguggccauccacgccgaccagcugacccccaccuggcggguguacagcaccggcagcaacguguuccagacccgggccggcugccugaucggcgccgagcacgugaacaacuccuacgagugcgacauccccaucggcgcuggcaucugcgccagcuaccagacccagaccaacagcccccggcgggcccggagcguggccagccagagcgugaucgccuacaccaugagcuuaggcgccgagaacagcguggccuacagcaacaacagcaucgcgaucccuaccaacuucaccaucagcgugaccaccgagauccugcccgugagcaugaccaagaccagcguggacuguaccauguacauaugcggcgacagcaccgagugcagcaaccugcugcugcaguacggcagcuucugcacccagcugaaccgggcccugaccggcaucgccguggagcaggacaagaacacccaagagguguucgcccaggugaagcagaucuacaagacucccccaaucaaggacuucggcggcuucaacuucagccagauccugcccgaccccagcaagcccagcaagcggagcuucaucgaggaccugcuguucaacaaggugacccuggccgacgccggcuucaucaagcaguacggcgacugccugggggauaucgccgcucgggaccugaucugcgcccagaaguucaacggccugaccgugcugcccccucugcugaccgacgagaugaucgcccaguacaccagcgcccugcuugccggcaccaucaccagcggcuggaccuucggcgccggcgcagcccugcagauccccuucgccaugcagauggccuaccgguucaacggcaucggcgugacccagaacgugcuguacgagaaccagaagcugaucgccaaccaguucaacagcgccaucggcaagauccaggacagccugagcagcaccgccagcgcccugggcaagcugcaggacguggugaaccagaacgcucaggcccugaacacccuggugaagcagcugagcagcaacuucggcgccaucagcucagugcugaaugacauccugagcaggcuggaucccccagaggccgaggugcagaucgaccggcugaucaccggccggcugcagagccugcagaccuacgugacccagcagcugauccgggccgccgagauccgggccagcgccaaccuggcagccaccaagaugagcgagugcgugcugggccagagcaagcggguggacuuuugcggcaagggcuaccaccugaugagcuucccccagagcgcuccccacggcgugguguuccuccacgucacauacgugcccgcccaggagaagaacuucaccaccgcccccgccaucugccacgacggcaaggcccacuucccccgggagggaguguucgugagcaacggcacccacugguucgugacccagcggaacuucuacgagccucagauuaucaccaccgacaacaccuucgugagcggcaacugcgacguggugaucggcaucgugaacaacaccguguacgacccccugcagcccgagcuggacagcuucaaggaggagcuggacaaguacuucaagaaccacaccagcccagacguggaccugggcgacaucagcggcaucaacgccagcguggugaacauccagaaggagaucgaccggcugaacgagguggccaagaaccugaacgagagccugaucgaccugcaggagcugggcaaguacgagcaguacaucaaguggcccugguacaucuggcugggcuucaucgccggccugaucgccaucgugauggugaccaucaugcugugcugcaugaccagcugcuguagcugccugaagggcugcugcagcugcggcagcugcugcaaguucgacgaggacgacagcgagcccgugcugaagggcgugaagcugcacuacaccugaggacuagucccuguucccagagcccacuuuuuuuucuuuuuuugaaauaaaauagccugucuuucagaucuaaaaaaaaaaaaaaaaaaaaaaaaaaaaaaaaaaaaaaaaaaaaaaaaaaaaaaaaaaaaaaaaaaaaaaaaaaaaaaaaaaaaaaaaaaaaaaaaaaaa

SEQ ID NO: 24900 - RNA, 4070 nt, Artificial Sequence
  SARS-CoV-2/Wuhan/WIV05/2019__EPI_ISL_402128 spike protein mRNA gc (1-1273)(K986P_V987P_D614G_M1229I)
aggagagucccgcagucggcguccagcggcucugcuuguucgugugugugucguugcaggccuuauucaagcuuaccauguucguguuccuggugcugcugccccuggugagcagccagugcgugaaccugaccacccggacccagcugcccccugccuacaccaacagcuucacccggggcguguacuaccccgacaagguguuccggagcagcgugcugcacagcacccaggaccuguuccugcccuucuucagcaacgugaccugguuccacgccauccacgugagcggcaccaacggcaccaagcgguucgacaacccagugcugcccuucaacgacggcguguacuucgccagcaccgagaagucaaacaucauccggggcuggaucuucggcaccacccuggacagcaagacacagagccugcugaucgugaacaacgccaccaacguggugaucaaggugugcgaguuucaguucugcaacgaccccuuccugggcguguacuaccacaagaacaacaagagcuggauggagagcgaguuccgggucuacagcagcgcuaacaauugcaccuucgaguacgugagccagcccuuccugauggaccucgagggcaagcagggcaacuucaagaaccugcgggaguucguguucaagaacaucgauggcuacuucaagaucuacagcaagcacacccccaucaaccuggugcgggaccugccccagggauucagcgcccuggagccucugguggaccugcccaucggcaucaacaucaccagguuccagacccugcuggcccugcaccggagcuaccugacccccggcgacagcagcagcggcuggaccgccggcgccgccgcauacuacgugggcuaccugcagccacggaccuuccugcugaaguacaacgagaacggcaccaucaccgacgccguggacugcgcccuggacccccugagcgagaccaagugcacccuaaagagcuucaccguggagaagggcaucuaccagaccagcaacuuccgggugcagcccacugagagcaucgugcgguuccccaacauuaccaaccugugucccuucggcgagguguucaacgccacccgguucgccagcguguacgccuggaaccggaagcggaucagcaacugcguggccgacuacagcgugcuguacaacagcgccagcuucagcaccuucaagugcuacggcgugagcccuaccaagcugaacgaccugugcuucaccaacguguacgcugacagcuucgugauccggggcgacgaggugcggcagaucgcccccggccagaccggcaagaucgccgacuacaacuacaagcugcccgacgacuucaccggcugcgugaucgccuggaacagcaacaaccuggacagcaaggugggcggcaacuacaacuaccuguaccggcuguuccguaagagcaaccugaagccauucgagcgggacaucagcaccgagaucuaccaggccggcagcacccccugcaacgguguggagggcuuuaacugcuacuucccccugcagagcuacggcuuccagcccaccaacggcgugggcuaccagcccuaccgggugguggugcugagcuucgagcugcugcacgcccccgccaccgugugcggcccuaaaaagagcaccaaccuggugaagaacaagugcgugaacuucaauuucaacggccugaccggcaccggcgugcugaccgagagcaacaagaaguuccugcccuuccagcaguucggccgggauaucgccgacaccaccgacgcagugcgggacccccagacccuggagauccuggacaucaccccaugcagcuucggcggcgugagcgucaucacccccggcacaaacaccagcaaccagguggccgugcuguaccagggagugaacugcaccgaggugcccguggccauccacgccgaccagcugacccccaccuggcggguguacagcaccggcagcaacguguuccagacccgggccggcugccugaucggcgccgagcacgugaacaacuccuacgagugcgacauccccaucggcgcuggcaucugcgccagcuaccagacccagaccaacagcccccggcgggcccggagcguggccagccagagcaucaucgccuacaccaugagcuuaggcgccgagaacagcguggccuacagcaacaacagcaucgcgaucccuaccaacuucaccaucagcgugaccaccgagauacugcccgugagcaugaccaagaccagcguggacuguaccauguacaucugcggcgacagcaccgagugcagcaaccugcugcugcaguacggcagcuucugcacccagcugaaccgggcccugaccggcaucgccguggagcaggacaagaacacccaagagguguucgcccaggugaagcagaucuacaagacucccccaaucaaggacuucggcggcuucaacuucagccagauccugcccgaccccagcaagcccagcaagcggagcuucaucgaggaccugcuguucaacaaggugacccuggccgacgccggcuucaucaagcaguacggcgacugccugggggauaucgccgcucgggaccugaucugcgcccagaaguucaacggccugaccgugcugcccccucugcugaccgacgagaugaucgcccaguacaccagcgcccugcuugccggcaccaucaccagcggcuggaccuucggcgccggcgcagcccugcagauccccuucgccaugcagauggccuaccgguucaacggcaucggcgugacccagaacgugcuguacgagaaccagaagcugaucgccaaccaguucaacagcgccaucggcaagauccaggacagccugagcagcaccgccagcgcccugggcaagcugcaggacguggugaaccagaacgcucaggcccugaacacccuggugaagcagcugagcagcaacuucggcgccaucagcucagugcugaaugacauccugagcaggcuggaucccccagaggccgaggugcagaucgaccggcugaucaccggccggcugcagagccugcagaccuacgugacccagcagcugauccgggccgccgagauccgggccagcgccaaccuggcagccaccaagaugagcgagugcgugcugggccagagcaagcggguggacuuuugcggcaagggcuaccaccugaugagcuucccccagagcgcuccccacggcgugguguuccuccacgugacauacguccccgcccaggagaagaacuucaccaccgcccccgccauuugccacgacggcaaggcccacuucccccgggagggaguguucgugagcaacggcacccacugguucgugacccagcggaacuucuacgagccucagaucaucaccaccgacaacaccuucgugagcggcaacugcgacguggugaucggcaucgugaacaacaccguguacgacccccugcagcccgagcuggacagcuucaaggaggagcuggacaaguacuucaagaaccacaccagcccagacguggaccugggcgacaucagcggcaucaacgccagcguggugaacauccagaaggagaucgaccggcugaacgagguggccaagaaccugaacgagagccugaucgaccugcaggagcugggcaaguacgagcaguacaucaaguggcccugguacaucuggcugggcuucaucgccggccugaucgccaucgugaucgugaccaucaugcugugcugcaugaccagcugcuguagcugccugaagggcugcugcagcugcggcagcugcugcaaguucgacgaggacgacagcgagcccgugcugaagggcgugaagcugcacuacaccugaggacuagucccuguucccagagcccacuuuuuuuucuuuuuuugaaauaaaauagccugucuuucagaucuaaaaaaaaaaaaaaaaaaaaaaaaaaaaaaaaaaaaaaaaaaaaaaaaaaaaaaaaaaaaaaaaaaaaaaaaaaaaaaaaaaaaaaaaaaaaaaaaaaaa

SEQ ID NO: 24901 - RNA, 4064 nt, Artificial Sequence
  SARS-CoV-2/Wuhan/WIV05/2019__EPI_ISL_402128 spike protein mRNA gc (1-1273)(K986P_V987P_H69del_V70del_A222V_Y453F_S477N_D614G_I692V)
aggagagucccgcagucggcguccagcggcucugcuuguucgugugugugucguugcaggccuuauucaagcuuaccauguucguguuccuggugcugcugccccuggugagcagccagugcgugaaccugaccacccggacccagcugcccccugccuacaccaacagcuucacccggggcguguacuaccccgacaagguguuccggagcagcgugcugcacagcacccaggaccuguuccugcccuucuucagcaacgugaccugguuccacgccaucagcggcaccaacggcaccaagcgguucgacaacccagugcugcccuucaacgacggcguguacuucgccagcaccgagaagucaaacaucauccggggcuggaucuucggcaccacccuggacagcaagacacagagccugcugaucgugaacaacgccaccaacguggugaucaaggugugcgaguuucaguucugcaacgaccccuuccugggcguguacuaccacaagaacaacaagagcuggauggagagcgaguuccggguguacagcagcgcuaacaauugcaccuucgaguacgucagccagcccuuccugauggaccucgagggcaagcagggcaacuucaagaaccugcgggaguucguguucaagaacaucgauggcuacuucaagaucuacagcaagcacacccccaucaaccuggugcgggaccugccccagggauucagcgugcuggagccucugguggaccugcccaucggcaucaacaucaccagguuccagacccugcuggcccugcaccggagcuaccugacccccggcgacagcagcagcggcuggaccgccggcgccgccgccuacuacgugggcuaccugcagccacggaccuuccugcugaaguacaacgagaacggcaccaucaccgacgcaguggacugcgcccuggacccccugagcgagaccaagugcacccuaaagagcuucaccguggagaagggcaucuaccagaccagcaacuuccgggugcagcccacugagagcaucgugcgguuccccaacauuaccaaccugugucccuucggcgagguguucaacgccacccgguucgccagcguguacgccuggaaccggaagcggaucagcaacugcguggccgacuacagcgugcuguacaacagcgccagcuucagcaccuucaagugcuacggcgugagcccuaccaagcugaacgaccugugcuucaccaacguguacgccgacagcuucgugauccggggcgacgaggugcggcagaucgcucccggccagaccggcaagaucgccgacuacaacuacaagcugcccgacgacuucaccggcugcgugaucgccuggaacagcaacaaccuggacagcaaggugggcggcaacuacaacuaccuguuccggcuguuccguaagagcaaccugaagccauuugagcgggacaucagcaccgagaucuaccaggccggcaacacccccugcaacgguguggagggcuucaacugcuacuucccccugcagagcuacggcuuccagcccaccaacggcgugggcuaccagcccuaccgggugguggugcugagcuucgagcugcugcacgcccccgccaccgugugcggcccuaaaaagagcaccaaccuggugaagaacaagugcgugaauuucaacuucaacggccugaccggcaccggcgugcugaccgagagcaacaagaaguuccugcccuuccagcaguucggccgggauaucgccgacaccaccgacgccgugcgggacccccagacccuggagauccuggacaucaccccaugcagcuucggcggcgugagcgucaucacccccggcacaaacaccagcaaccagguggcagugcuguaccagggagugaacugcaccgaggugcccguggccauccacgccgaccagcugacccccaccuggcggguguacagcaccggcagcaacguguuccagacccgggccggcugccugaucggcgccgagcacgugaacaacagcuacgagugcgacauccccaucggcgccggcaucugcgcuuccuaccagacccagaccaacagcccccggcgggcccggagcguggccagccagagcgugaucgccuacaccaugagcuuaggcgccgagaacagcguggccuacagcaacaacagcaucgccaucccuaccaacuucaccaucagcgugaccaccgagauccugcccgugagcaugaccaagaccagcguggacuguaccauguacauaugcggcgacagcaccgagugcagcaaccugcugcugcaguacggcagcuucugcacccagcugaaccgggcgcugaccggcaucgccguggagcaggacaagaacacccaagagguguucgcccaggugaagcagaucuacaagacucccccaaucaaggacuucggcggcuucaacuucagccagauccugcccgaccccagcaagcccagcaagcggagcuucaucgaggaccugcuguucaacaaggugacccuggccgacgccggcuucaucaagcaguacggcgacugccugggggauaucgccgcccgggaccugaucugcgcucagaaguucaacggccugaccgugcugcccccucugcugaccgacgagaugaucgcccaguacaccagcgcccugcuugccggcaccaucaccagcggcuggaccuucggcgccggcgccgcacugcagauccccuucgccaugcagauggccuaccgguucaacggcaucggcgugacccagaacgugcuguacgagaaccagaagcugaucgccaaccaguucaacagcgccaucggcaagauccaggacagccugagcagcaccgccagcgcccugggcaagcugcaggacguggugaaccagaacgcccaggcucugaacacccuggugaagcagcugagcagcaauuuuggcgccaucagcagcgugcugaacgacauccugucaaggcuggaucccccagaggccgaggugcagaucgaccggcugaucaccggccggcugcagagccugcagaccuacgugacccagcagcugauccgggccgccgagauccgggccagcgccaaccuggccgcaaccaagaugagcgagugcgugcugggccagagcaagcggguggacuucugcggcaagggcuaccaccugaugagcuucccccagagcgcuccccacggcgugguguuccuccacgucacauacgugcccgcccaggagaagaacuucaccaccgcccccgccaucugccacgacggcaaggcccacuucccccgggagggaguguucgugagcaacggcacccacugguucgugacccagcggaacuucuacgagccucagauuaucaccaccgacaacaccuucgugagcggcaacugcgacguggugaucggcaucgugaacaacaccguguacgacccccugcagcccgagcuggacagcuucaaggaggagcuggacaaguacuucaagaaccacaccagcccagacguggaccugggcgacaucagcggcaucaacgccagcguggugaacauccagaaggagaucgaccggcugaacgagguggccaagaaccugaacgagagccugaucgaccugcaggagcugggcaaguacgagcaguacaucaaguggcccugguacaucuggcugggcuucaucgccggccugaucgccaucgugauggugaccaucaugcugugcugcaugaccagcugcuguagcugccugaagggcugcugcagcugcggcagcugcugcaaguucgacgaggacgacagcgagcccgugcugaagggcgugaagcugcacuacaccugaggacuagucccuguucccagagcccacuuuuuuuucuuuuuuugaaauaaaauagccugucuuucagaucuaaaaaaaaaaaaaaaaaaaaaaaaaaaaaaaaaaaaaaaaaaaaaaaaaaaaaaaaaaaaaaaaaaaaaaaaaaaaaaaaaaaaaaaaaaaaaaaaaaaa

SEQ ID NO: 24902 - RNA, 4064 nt, Artificial Sequence
  SARS-CoV-2/Wuhan/WIV05/2019__EPI_ISL_402128 spike protein mRNA gc (1-1273)(K986P_V987P_H69del_V70del_Y453F_D614G_I692V_M1229I)
aggagagucccgcagucggcguccagcggcucugcuuguucgugugugugucguugcaggccuuauucaagcuuaccauguucguguuccuggugcugcugccccuggugagcagccagugcgugaaccugaccacccggacccagcugcccccugccuacaccaacagcuucacccggggcguguacuaccccgacaagguguuccggagcagcgugcugcacagcacccaggaccuguuccugcccuucuucagcaacgugaccugguuccacgccaucagcggcaccaacggcaccaagcgguucgacaacccagugcugcccuucaacgacggcguguacuucgccagcaccgagaagucaaacaucauccggggcuggaucuucggcaccacccuggacagcaagacacagagccugcugaucgugaacaacgccaccaacguggugaucaaggugugcgaguuucaguucugcaacgaccccuuccugggcguguacuaccacaagaacaacaagagcuggauggagagcgaguuccggguguacagcagcgcuaacaauugcaccuucgaguacgucagccagcccuuccugauggaccucgagggcaagcagggcaacuucaagaaccugcgggaguucguguucaagaacaucgauggcuacuucaagaucuacagcaagcacacccccaucaaccuggugcgggaccugccccagggauucagcgcccuggagccucugguggaccugcccaucggcaucaacaucaccagguuccagacccugcuggcccugcaccggagcuaccugacccccggcgacagcagcagcggcuggaccgccggcgccgccgcauacuacgugggcuaccugcagccacggaccuuccugcugaaguacaacgagaacggcaccaucaccgacgccguggacugcgcccuggacccccugagcgagaccaagugcacccuaaagagcuucaccguggagaagggcaucuaccagaccagcaacuuccgggugcagcccacugagagcaucgugcgguuccccaacauuaccaaccugugucccuucggcgagguguucaacgccacccgguucgccagcguguacgccuggaaccggaagcggaucagcaacugcguggccgacuacagcgugcuguacaacagcgccagcuucagcaccuucaagugcuacggcgugagcccuaccaagcugaacgaccugugcuucaccaacguguacgcugacagcuucgugauccggggcgacgaggugcggcagaucgcccccggccagaccggcaagaucgccgacuacaacuacaagcugcccgacgacuucaccggcugcgugaucgccuggaacagcaacaaccuggacagcaaggugggcggcaacuacaacuaccuguuccggcuguuccguaagagcaaccugaagccauuugagcgggacaucagcaccgagaucuaccaggccggcagcacccccugcaacgguguggagggcuucaacugcuacuucccccugcagagcuacggcuuccagcccaccaacggcgugggcuaccagcccuaccgggugguggugcugagcuucgagcugcugcacgcccccgccaccgugugcggcccuaaaaagagcaccaaccuggugaagaacaagugcgugaacuucaauuucaacggccugaccggcaccggcgugcugaccgagagcaacaagaaguuccugcccuuccagcaguucggccgggauaucgccgacaccaccgacgcagugcgggacccccagacccuggagauccuggacaucaccccaugcagcuucggcggcgugagcgugaucacccccggcacaaacaccagcaaccaggucgccgugcuguaccagggagugaacugcaccgaggugcccguggccauccacgccgaccagcugacccccaccuggcggguguacagcaccggcagcaacguguuccagacccgggccggcugccugaucggcgccgagcacgugaacaacuccuacgagugcgacauccccaucggcgcuggcaucugcgccagcuaccagacccagaccaacagcccccggcgggcccggagcguggccagccagagcgugaucgccuacaccaugagcuuaggcgccgagaacagcguggccuacagcaacaacagcaucgcgaucccuaccaacuucaccaucagcgugaccaccgagauccugcccgugagcaugaccaagaccagcguggacuguaccauguacauaugcggcgacagcaccgagugcagcaaccugcugcugcaguacggcagcuucugcacccagcugaaccgggcccugaccggcaucgccguggagcaggacaagaacacccaagagguguucgcccaggugaagcagaucuacaagacucccccaaucaaggacuucggcggcuucaacuucagccagauccugcccgaccccagcaagcccagcaagcggagcuucaucgaggaccugcuguucaacaaggugacccuggccgacgccggcuucaucaagcaguacggcgacugccugggggauaucgccgcucgggaccugaucugcgcccagaaguucaacggccugaccgugcugcccccucugcugaccgacgagaugaucgcccaguacaccagcgcccugcuugccggcaccaucaccagcggcuggaccuucggcgccggcgcagcccugcagauccccuucgccaugcagauggccuaccgguucaacggcaucggcgugacccagaacgugcuguacgagaaccagaagcugaucgccaaccaguucaacagcgccaucggcaagauccaggacagccugagcagcaccgccagcgcccugggcaagcugcaggacguggugaaccagaacgcucaggcccugaacacccuggugaagcagcugagcagcaacuuuggcgccaucagcucagugcugaaugacauccugagcaggcuggaucccccagaggccgaggugcagaucgaccggcugaucaccggccggcugcagagccugcagaccuacgugacccagcagcugauccgggccgccgagauccgggccagcgccaaccuggcagccaccaagaugagcgagugcgugcugggccagagcaagcggguggacuucugcggcaagggcuaccaccugaugagcuucccccagagcgcuccccacggcgugguguuccuccacgugacauacguccccgcccaggagaagaacuucaccaccgcccccgccaucugccacgacggcaaggcccacuucccccgggagggaguguucgugagcaacggcacccacugguucgugacccagcggaacuucuacgagccucagauuaucaccaccgacaacaccuucgugagcggcaacugcgacguggugaucggcaucgugaacaacaccguguacgacccccugcagcccgagcuggacagcuucaaggaggagcuggacaaguacuucaagaaccacaccagcccagacguggaccugggcgacaucagcggcaucaacgccagcguggugaacauccagaaggagaucgaccggcugaacgagguggccaagaaccugaacgagagccugaucgaccugcaggagcugggcaaguacgagcaguacaucaaguggcccugguacaucuggcugggcuucaucgccggccugaucgccaucgugaucgugaccaucaugcugugcugcaugaccagcugcuguagcugccugaagggcugcugcagcugcggcagcugcugcaaguucgacgaggacgacagcgagcccgugcugaagggcgugaagcugcacuacaccugaggacuagucccuguucccagagcccacuuuuuuuucuuuuuuugaaauaaaauagccugucuuucagaucuaaaaaaaaaaaaaaaaaaaaaaaaaaaaaaaaaaaaaaaaaaaaaaaaaaaaaaaaaaaaaaaaaaaaaaaaaaaaaaaaaaaaaaaaaaaaaaaaaaaa

SEQ ID NO: 24903 - RNA, 4061 nt, Artificial Sequence
  SARS-CoV-2/Wuhan/WIV05/2019__EPI_ISL_402128 spike protein mRNA gc (1-1273)(K986P_V987P_K986P_V987P_H69del_V70del_Y144del_N501Y_A570 D_D614G_P681H_T716I_S982A_D1118H)
aggagagucccgcagucggcguccagcggcucugcuuguucgugugugugucguugcaggccuuauucaagcuuaccauguucguguuccuggugcugcugccccuggugagcagccagugcgugaaccugaccacccggacccagcugcccccugccuacaccaacagcuucacccggggcguguacuaccccgacaagguguuccggagcagcgugcugcacagcacccaggaccuguuccugcccuucuucagcaacgugaccugguuccacgccaucagcggcaccaacggcaccaagcgguucgacaacccagugcugcccuucaacgacggcguguacuucgccagcaccgagaagucaaacaucauccggggcuggaucuucggcaccacccuggacagcaagacacagagccugcugaucgugaacaacgccaccaacguggugaucaaggugugcgaguuucaguucugcaacgaccccuuccugggcguguaccacaagaacaacaagagcuggauggagagcgaguuccggguguacagcagcgcuaacaauugcaccuucgaguacgucagccagcccuuccugauggaccucgagggcaagcagggcaacuucaagaaccugcgggaguucguguucaagaacaucgauggcuacuucaagaucuacagcaagcacacccccaucaaccuggugcgggaccugccccagggauucagcgcccuggagccucugguggaccugcccaucggcaucaacaucaccagguuccagacccugcuggcccugcaccggagcuaccugacccccggcgacagcagcagcggcuggaccgccggcgccgccgcauacuacgugggcuaccugcagccacggaccuuccugcugaaguacaacgagaacggcaccaucaccgacgccguggacugcgcccuggacccccugagcgagaccaagugcacccuaaagagcuucaccguggagaagggcaucuaccagaccagcaacuuccgggugcagcccacugagagcaucgugcgguuccccaacauuaccaaccugugucccuucggcgagguguucaacgccacccgguucgccagcguguacgccuggaaccggaagcggaucagcaacugcguggccgacuacagcgugcuguacaacagcgccagcuucagcaccuucaagugcuacggcgugagcccuaccaagcugaacgaccugugcuucaccaacguguacgcugacagcuucgugauccggggcgacgaggugcggcagaucgcccccggccagaccggcaagaucgccgacuacaacuacaagcugcccgacgacuucaccggcugcgugaucgccuggaacagcaacaaccuggacagcaaggugggcggcaacuacaacuaccuguaccggcuguuccguaagagcaaccugaagccauucgagcgggacaucagcaccgagaucuaccaggccggcagcacccccugcaacgguguggagggcuuuaacugcuacuucccccugcagagcuacggcuuccagcccaccuacggcgugggcuaccagcccuaccgggugguggugcugagcuucgagcugcugcacgcccccgccaccgugugcggcccuaaaaagagcaccaaccuggugaagaacaagugcgugaacuucaacuucaauggccugaccggcaccggcgugcugaccgagagcaacaagaaguuccugcccuuccagcaguucggccgggauaucgacgacaccaccgacgccgugcgggacccccagacccuggagauccuggacaucaccccaugcagcuucggcggcgugagcgugaucacccccggcacaaacaccagcaaccaggucgcagugcuguaccagggagugaacugcaccgaggugcccguggccauccacgccgaccagcugacccccaccuggcggguguacagcaccggcagcaacguguuccagacccgggccggcugccugaucggcgccgagcacgugaacaacuccuacgagugcgacauccccaucggcgccggcaucugcgcuagcuaccagacccagaccaacagccaccggcgggcccggagcguggccagccagagcaucaucgccuacaccaugagcuuaggcgccgagaacagcguggccuacagcaacaacagcaucgccauccccaucaacuucaccauaagcgugaccaccgagauccugccugugagcaugaccaagaccagcguggacuguaccauguacaucugcggcgacagcaccgagugcagcaaccugcugcugcaguacggcagcuucugcacccagcugaaccgggcgcugaccggcaucgccguggagcaggacaagaacacccaagagguguucgcccaggugaagcagaucuacaagaccccacccaucaaggacuucggcggcuucaacuucagccagauccugcccgaccccagcaagcccagcaagcggagcuucaucgaggaccugcuguucaacaaggugacucuggccgacgccggcuucaucaagcaguacggcgauugccugggggacaucgccgcccgggaccugaucugcgcucagaaguucaacggccugaccgugcugccuccccugcugaccgacgagaugaucgcccaguacaccagcgcccugcuugccggcaccaucaccagcggcuggaccuucggcgccggcgccgcacugcagauccccuucgccaugcagauggccuaccgguucaacggcaucggcgugacccagaacgugcuguacgagaaccagaagcugaucgccaaccaguucaacagcgccaucggcaagauccaggacagccugagcagcaccgccagcgcccugggcaagcugcaggacguggugaaccagaacgcccaggcucugaacacccuggugaagcagcugagcagcaacuucggcgccaucagcucagugcugaacgacauccuggccaggcuggacccacccgaggccgaggugcagaucgaccggcugaucaccggccggcugcagagccugcagaccuacgugacccagcagcugauccgggccgccgagauucgggccagcgccaaucuggcagccaccaagaugagcgagugcgugcugggccagagcaagcggguggacuuuugcggcaagggcuaccaccugaugagcuucccccagagcgcuccccacggcgugguguuccuccacgugaccuacgugcccgcccaggagaagaacuucacaaccgcccccgccaucugccacgacggcaaggcccacuucccccgggagggagucuucgugagcaacggcacccacugguucgugacccagcggaacuucuacgagccccagaucaucaccacccacaacaccuucgugagcggcaacugcgacguggugaucggcaucgugaacaacaccguguacgacccucugcagcccgagcuggacagcuucaaggaggagcuggacaaguacuucaagaaccacaccagccccgacguggaucugggcgacaucagcggcaucaacgccagcguggugaacauccagaaggagaucgaccggcugaacgagguggccaagaaccugaacgagagccugaucgaccugcaggagcugggcaaguacgagcaguacaucaaguggccaugguacaucuggcugggcuucaucgccggccugaucgccaucgugauggugaccaucaugcugugcugcaugaccagcugcuguagcugccugaagggcugcugcagcugcggcagcugcugcaaguucgacgaggacgacagcgagcccgugcugaagggcgugaagcugcacuacaccugaggacuagucccuguucccagagcccacuuuuuuuucuuuuuuugaaauaaaauagccugucuuucagaucuaaaaaaaaaaaaaaaaaaaaaaaaaaaaaaaaaaaaaaaaaaaaaaaaaaaaaaaaaaaaaaaaaaaaaaaaaaaaaaaaaaaaaaaaaaaaaaaaaaaa

SEQ ID NO: 24904 - RNA, 4070 nt, Artificial Sequence
  SARS-CoV-2/Wuhan/WIV05/2019__EPI_ISL_402128 spike protein mRNA gc (1-1273)(K986P_V987P_K986P_V987P_K417N_E484K_N501Y_D614G)
aggagagucccgcagucggcguccagcggcucugcuuguucgugugugugucguugcaggccuuauucaagcuuaccauguucguguuccuggugcugcugccccuggugagcagccagugcgugaaccugaccacccggacccagcugcccccugccuacaccaacagcuucacccggggcguguacuaccccgacaagguguuccggagcagcgugcugcacagcacccaggaccuguuccugcccuucuucagcaacgugaccugguuccacgccauccacgugagcggcaccaacggcaccaagcgguucgacaacccagugcugcccuucaacgacggcguguacuucgccagcaccgagaagucaaacaucauccggggcuggaucuucggcaccacccuggacagcaagacacagagccugcugaucgugaacaacgccaccaacguggugaucaaggugugcgaguuucaguucugcaacgaccccuuccugggcguguacuaccacaagaacaacaagagcuggauggagagcgaguuccgggucuacagcagcgcuaacaauugcaccuucgaguacgugagccagcccuuccugauggaccucgagggcaagcagggcaacuucaagaaccugcgggaguucguguucaagaacaucgauggcuacuucaagaucuacagcaagcacacccccaucaaccuggugcgggaccugccccagggauucagcgcccuggagccucugguggaccugcccaucggcaucaacaucaccagguuccagacccugcuggcccugcaccggagcuaccugacccccggcgacagcagcagcggcuggaccgccggcgccgccgcauacuacgugggcuaccugcagccacggaccuuccugcugaaguacaacgagaacggcaccaucaccgacgccguggacugcgcccuggacccccugagcgagaccaagugcacccuaaagagcuucaccguggagaagggcaucuaccagaccagcaacuuccgggugcagcccacugagagcaucgugcgguuccccaacauuaccaaccugugucccuucggcgagguguucaacgccacccgguucgccagcguguacgccuggaaccggaagcggaucagcaacugcguggccgacuacagcgugcuguacaacagcgccagcuucagcaccuucaagugcuacggcgugagcccuaccaagcugaacgaccugugcuucaccaacguguacgcugacagcuucgugauccggggcgacgaggugcggcagaucgcccccggccagaccggcaacaucgccgacuacaacuacaagcugcccgacgacuucaccggcugcgugaucgccuggaacagcaacaaccuggacagcaaggugggcggcaacuacaacuaccuguaccggcuguuccguaagagcaaccugaagccauucgagcgggacaucagcaccgagaucuaccaggccggcagcacccccugcaacggugugaagggcuuuaacugcuacuucccccugcagagcuacggcuuccagcccaccuacggcgugggcuaccagcccuaccgggugguggugcugagcuucgagcugcugcacgcccccgccaccgugugcggcccuaaaaagagcaccaaccuggugaagaacaagugcgugaacuucaauuucaacggccugaccggcaccggcgugcugaccgagagcaacaagaaguuccugcccuuccagcaguucggccgggauaucgccgacaccaccgacgcagugcgggacccccagacccuggagauccuggacaucaccccaugcagcuucggcggcgugagcgucaucacccccggcacaaacaccagcaaccagguggccgugcuguaccagggagugaacugcaccgaggugcccguggccauccacgccgaccagcugacccccaccuggcggguguacagcaccggcagcaacguguuccagacccgggccggcugccugaucggcgccgagcacgugaacaacuccuacgagugcgacauccccaucggcgcuggcaucugcgccagcuaccagacccagaccaacagcccccggcgggcccggagcguggccagccagagcaucaucgccuacaccaugagcuuaggcgccgagaacagcguggccuacagcaacaacagcaucgcgaucccuaccaacuucaccaucagcgugaccaccgagauacugcccgugagcaugaccaagaccagcguggacuguaccauguacaucugcggcgacagcaccgagugcagcaaccugcugcugcaguacggcagcuucugcacccagcugaaccgggcccugaccggcaucgccguggagcaggacaagaacacccaagagguguucgcccaggugaagcagaucuacaagacucccccaaucaaggacuucggcggcuucaacuucagccagauccugcccgaccccagcaagcccagcaagcggagcuucaucgaggaccugcuguucaacaaggugacccuggccgacgccggcuucaucaagcaguacggcgacugccugggggauaucgccgcucgggaccugaucugcgcccagaaguucaacggccugaccgugcugcccccucugcugaccgacgagaugaucgcccaguacaccagcgcccugcuugccggcaccaucaccagcggcuggaccuucggcgccggcgcagcccugcagauccccuucgccaugcagauggccuaccgguucaacggcaucggcgugacccagaacgugcuguacgagaaccagaagcugaucgccaaccaguucaacagcgccaucggcaagauccaggacagccugagcagcaccgccagcgcccugggcaagcugcaggacguggugaaccagaacgcucaggcccugaacacccuggugaagcagcugagcagcaacuucggcgccaucagcucagugcugaaugacauccugagcaggcuggaucccccagaggccgaggugcagaucgaccggcugaucaccggccggcugcagagccugcagaccuacgugacccagcagcugauccgggccgccgagauccgggccagcgccaaccuggcagccaccaagaugagcgagugcgugcugggccagagcaagcggguggacuuuugcggcaagggcuaccaccugaugagcuucccccagagcgcuccccacggcgugguguuccuccacgugacauacguccccgcccaggagaagaacuucaccaccgcccccgccauuugccacgacggcaaggcccacuucccccgggagggaguguucgugagcaacggcacccacugguucgugacccagcggaacuucuacgagccucagaucaucaccaccgacaacaccuucgugagcggcaacugcgacguggugaucggcaucgugaacaacaccguguacgacccccugcagcccgagcuggacagcuucaaggaggagcuggacaaguacuucaagaaccacaccagcccagacguggaccugggcgacaucagcggcaucaacgccagcguggugaacauccagaaggagaucgaccggcugaacgagguggccaagaaccugaacgagagccugaucgaccugcaggagcugggcaaguacgagcaguacaucaaguggcccugguacaucuggcugggcuucaucgccggccugaucgccaucgugauggugaccaucaugcugugcugcaugaccagcugcuguagcugccugaagggcugcugcagcugcggcagcugcugcaaguucgacgaggacgacagcgagcccgugcugaagggcgugaagcugcacuacaccugaggacuagucccuguucccagagcccacuuuuuuuucuuuuuuugaaauaaaauagccugucuuucagaucuaaaaaaaaaaaaaaaaaaaaaaaaaaaaaaaaaaaaaaaaaaaaaaaaaaaaaaaaaaaaaaaaaaaaaaaaaaaaaaaaaaaaaaaaaaaaaaaaaaaa

SEQ ID NO: 24905 - RNA, 4061 nt, Artificial Sequence
  SARS-CoV-2/Wuhan/WIV05/2019__EPI_ISL_402128 spike protein mRNA gc (1-1273)(K986P_V987P_K986P_V987P_L18F_D80A_D215G_L242del_A243del_ L244del_R246I_K417N_E484K_N501Y_D614G_A701V)
aggagagucccgcagucggcguccagcggcucugcuuguucgugugugugucguugcaggccuuauucaagcuuaccauguucguguuccuggugcugcugccccuggugagcagccagugcgugaacuucaccacccggacccagcugcccccugccuacaccaacagcuucacccggggcguguacuaccccgacaagguguuccggagcagcgugcugcacagcacccaggaccuguuccugcccuucuucagcaacgugaccugguuccacgccauccacgugagcggcaccaacggcaccaagcgguucgccaacccagugcugcccuucaacgacggcguguacuucgccagcaccgagaagucaaacaucauccggggcuggaucuuuggcaccacccuggacagcaagacacagagccugcugaucgugaacaacgcuaccaacguggugaucaaggugugcgaguuccaguucugcaacgaccccuuccugggcguguacuaccacaagaacaacaagagcuggauggagagcgaguuccgggucuacagcagcgccaacaauugcaccuucgaguacgugagccagcccuuccugauggaccuggagggcaagcagggcaacuucaagaaccuccgggaguucguguucaagaacaucgacggcuacuucaagaucuacagcaagcacacccccaucaaccuggugcggggacugccccagggcuucagcgcccuggagccucugguggaucugcccaucggcaucaacaucaccagguuccagacccugcacaucagcuaccugacccccggcgacagcagcagcggcuggaccgccggcgccgccgcauacuacgugggcuaccugcagccacggaccuuccugcugaaguacaacgagaacggcaccaucaccgacgccguggacugcgcccuggacccccugagcgagaccaagugcacccuuaagagcuucaccguggagaagggcaucuaccagaccagcaacuuccgggugcagcccacugagagcauugugcgguuccccaacaucaccaaccugugucccuucggcgagguguucaacgccacccgguucgccagcguguacgccuggaaccggaagcggaucagcaacugcguggccgacuacagcgugcuguacaacagcgccagcuucagcaccuucaagugcuacggcgugagcccuaccaagcugaacgaccugugcuucaccaacguguacgcugacagcuucgugauccggggcgacgaggugcggcagaucgcccccggccagaccggcaacaucgccgacuacaacuacaagcugcccgacgacuucaccggcugcgugaucgccuggaacagcaacaaccuggacagcaaggugggcggcaacuacaacuaccuguaccggcuauuccguaagagcaaccugaagccauuugagcgggacaucagcaccgagaucuaccaggccgguagcacccccugcaacggcgugaagggcuucaacugcuacuucccccugcagagcuacggcuuccagcccaccuacggcgugggcuaccagcccuaccgggugguggugcugagcuucgagcugcugcacgcccccgccaccgugugcggcccuaaaaagagcaccaaccuggugaagaacaagugcgugaacuucaauuucaacggccugaccggcaccggcgugcugaccgagagcaacaagaaguuccugcccuuccagcaguucggccgggacaucgccgacaccaccgaugcagugcgggacccccagacccuggagauccuggacaucaccccaugcagcuucggcggcgugagcgucaucacccccggaacaaacaccagcaaccagguggccgugcuguaccagggcgugaacugcaccgaggugcccguggccauccacgccgaccagcugacccccaccuggcggguguacagcaccggcagcaacguguuccagacccgggccggcugccugaucggcgccgagcacgugaacaacuccuacgagugcgacauccccaucggcgcuggcaucugcgccagcuaccagacccagaccaacagcccccggcgggcccggagcguggccagccagagcaucaucgccuacaccaugagccugggcguggagaacagcguggccuacagcaacaacagcaucgccaucccuaccaacuucaccauaagcgugaccaccgagauccugcccgugagcaugaccaagaccagcguggacuguaccauguacaucugcggcgacagcaccgagugcagcaaccuguuacugcaguacggcagcuucugcacccagcugaaccgggcgcugaccggcaucgccguggagcaggacaagaacacccaagagguguucgcccaggugaagcagaucuacaagacucccccaaucaaggacuucggcggcuucaacuucagccagauccugcccgaccccagcaagcccagcaagcggagcuucaucgaggaccugcuguucaacaaggugacccuggccgacgccggcuucaucaagcaguacggggacugccugggcgacaucgccgcccgggaccugaucugcgcucagaaguucaacggccugaccgugcugcccccucugcugaccgaugagaugaucgcccaguacaccagcgcccugcuggccggcaccaucaccagcggcuggaccuucggcgccggcgccgcacugcagauccccuucgccaugcagauggccuaccgguucaacggcaucggcgugacccagaacgugcuguacgagaaccagaagcugaucgccaaccaguucaacagcgccaucggcaagauccaggacagccugagcagcaccgccagcgcccugggcaagcugcaggacguggugaaccagaacgcccaggcucugaacacccuggugaagcagcugagcagcaacuuuggcgccaucagcucagugcugaaugacauccugagccggcuggaucccccagaggccgaggugcagaucgacaggcugaucaccggccggcugcagagccugcagaccuacgugacccagcagcugauccgggccgccgagauucgggccagcgccaaccuggccgcaaccaagaugagcgagugcgugcugggccagagcaagcggguggacuucugcggcaagggcuaccaccugaugagcuucccccagagcgcuccccacggcgugguguuccugcacgucacauacgugcccgcccaggagaagaacuucaccaccgcccccgccaucugccacgacggaaaggcccacuucccccgggagggcguguucgugagcaacggcacccacugguucgugacccagcggaacuucuacgagccucagaucaucaccaccgacaacaccuucgugagcggcaacugcgacguggugaucggcaucgugaacaacaccguguacgacccccugcagcccgagcuggacagcuucaaggaggagcucgacaaguacuucaagaaccacaccagcccagacguggaccugggcgacaucagcggcaucaacgccagcguggugaacauccagaaggagaucgaccggcugaacgagguggccaagaaccugaacgagagccugaucgaccugcaggagcugggcaaguacgagcaguacaucaaguggcccugguacaucuggcugggcuucaucgccggccugaucgccaucgugauggugaccaucaugcugugcugcaugaccagcugcuguagcugccugaagggcugcugcagcugcggcagcugcugcaaguucgacgaggacgacagcgagcccgugcugaagggcgugaagcugcacuacaccugaggacuagucccuguucccagagcccacuuuuuuuucuuuuuuugaaauaaaauagccugucuuucagaucuaaaaaaaaaaaaaaaaaaaaaaaaaaaaaaaaaaaaaaaaaaaaaaaaaaaaaaaaaaaaaaaaaaaaaaaaaaaaaaaaaaaaaaaaaaaaaaaaaaaa

SEQ ID NO: 24906 - RNA, 4070 nt, Artificial Sequence
  SARS-CoV-2/Wuhan/WIV05/2019__EPI_ISL_402128 spike protein mRNA gc (1-1273)(K986P_V987P_K986P_V987P_E484K_D614G)
aggagagucccgcagucggcguccagcggcucugcuuguucgugugugugucguugcaggccuuauucaagcuuaccauguucguguuccuggugcugcugccccuggugagcagccagugcgugaaccugaccacccggacccagcugcccccugccuacaccaacagcuucacccggggcguguacuaccccgacaagguguuccggagcagcgugcugcacagcacccaggaccuguuccugcccuucuucagcaacgugaccugguuccacgccauccacgugagcggcaccaacggcaccaagcgguucgacaacccagugcugcccuucaacgacggcguguacuucgccagcaccgagaagucaaacaucauccggggcuggaucuucggcaccacccuggacagcaagacacagagccugcugaucgugaacaacgccaccaacguggugaucaaggugugcgaguuucaguucugcaacgaccccuuccugggcguguacuaccacaagaacaacaagagcuggauggagagcgaguuccgggucuacagcagcgcuaacaauugcaccuucgaguacgugagccagcccuuccugauggaccucgagggcaagcagggcaacuucaagaaccugcgggaguucguguucaagaacaucgauggcuacuucaagaucuacagcaagcacacccccaucaaccuggugcgggaccugccccagggauucagcgcccuggagccucugguggaccugcccaucggcaucaacaucaccagguuccagacccugcuggcccugcaccggagcuaccugacccccggcgacagcagcagcggcuggaccgccggcgccgccgcauacuacgugggcuaccugcagccacggaccuuccugcugaaguacaacgagaacggcaccaucaccgacgccguggacugcgcccuggacccccugagcgagaccaagugcacccuaaagagcuucaccguggagaagggcaucuaccagaccagcaacuuccgggugcagcccacugagagcaucgugcgguuccccaacauuaccaaccugugucccuucggcgagguguucaacgccacccgguucgccagcguguacgccuggaaccggaagcggaucagcaacugcguggccgacuacagcgugcuguacaacagcgccagcuucagcaccuucaagugcuacggcgugagcccuaccaagcugaacgaccugugcuucaccaacguguacgcugacagcuucgugauccggggcgacgaggugcggcagaucgcccccggccagaccggcaagaucgccgacuacaacuacaagcugcccgacgacuucaccggcugcgugaucgccuggaacagcaacaaccuggacagcaaggugggcggcaacuacaacuaccuguaccggcuguuccguaagagcaaccugaagccauucgagcgggacaucagcaccgagaucuaccaggccggcagcacccccugcaacggugugaagggcuuuaacugcuacuucccccugcagagcuacggcuuccagcccaccaacggcgugggcuaccagcccuaccgggugguggugcugagcuucgagcugcugcacgcccccgccaccgugugcggcccuaaaaagagcaccaaccuggugaagaacaagugcgugaacuucaauuucaacggccugaccggcaccggcgugcugaccgagagcaacaagaaguuccugcccuuccagcaguucggccgggauaucgccgacaccaccgacgcagugcgggacccccagacccuggagauccuggacaucaccccaugcagcuucggcggcgugagcgucaucacccccggcacaaacaccagcaaccagguggccgugcuguaccagggagugaacugcaccgaggugcccguggccauccacgccgaccagcugacccccaccuggcggguguacagcaccggcagcaacguguuccagacccgggccggcugccugaucggcgccgagcacgugaacaacuccuacgagugcgacauccccaucggcgcuggcaucugcgccagcuaccagacccagaccaacagcccccggcgggcccggagcguggccagccagagcaucaucgccuacaccaugagcuuaggcgccgagaacagcguggccuacagcaacaacagcaucgcgaucccuaccaacuucaccaucagcgugaccaccgagauacugcccgugagcaugaccaagaccagcguggacuguaccauguacaucugcggcgacagcaccgagugcagcaaccugcugcugcaguacggcagcuucugcacccagcugaaccgggcccugaccggcaucgccguggagcaggacaagaacacccaagagguguucgcccaggugaagcagaucuacaagacucccccaaucaaggacuucggcggcuucaacuucagccagauccugcccgaccccagcaagcccagcaagcggagcuucaucgaggaccugcuguucaacaaggugacccuggccgacgccggcuucaucaagcaguacggcgacugccugggggauaucgccgcucgggaccugaucugcgcccagaaguucaacggccugaccgugcugcccccucugcugaccgacgagaugaucgcccaguacaccagcgcccugcuugccggcaccaucaccagcggcuggaccuucggcgccggcgcagcccugcagauccccuucgccaugcagauggccuaccgguucaacggcaucggcgugacccagaacgugcuguacgagaaccagaagcugaucgccaaccaguucaacagcgccaucggcaagauccaggacagccugagcagcaccgccagcgcccugggcaagcugcaggacguggugaaccagaacgcucaggcccugaacacccuggugaagcagcugagcagcaacuucggcgccaucagcucagugcugaaugacauccugagcaggcuggaucccccagaggccgaggugcagaucgaccggcugaucaccggccggcugcagagccugcagaccuacgugacccagcagcugauccgggccgccgagauccgggccagcgccaaccuggcagccaccaagaugagcgagugcgugcugggccagagcaagcggguggacuuuugcggcaagggcuaccaccugaugagcuucccccagagcgcuccccacggcgugguguuccuccacgugacauacguccccgcccaggagaagaacuucaccaccgcccccgccauuugccacgacggcaaggcccacuucccccgggagggaguguucgugagcaacggcacccacugguucgugacccagcggaacuucuacgagccucagaucaucaccaccgacaacaccuucgugagcggcaacugcgacguggugaucggcaucgugaacaacaccguguacgacccccugcagcccgagcuggacagcuucaaggaggagcuggacaaguacuucaagaaccacaccagcccagacguggaccugggcgacaucagcggcaucaacgccagcguggugaacauccagaaggagaucgaccggcugaacgagguggccaagaaccugaacgagagccugaucgaccugcaggagcugggcaaguacgagcaguacaucaaguggcccugguacaucuggcugggcuucaucgccggccugaucgccaucgugauggugaccaucaugcugugcugcaugaccagcugcuguagcugccugaagggcugcugcagcugcggcagcugcugcaaguucgacgaggacgacagcgagcccgugcugaagggcgugaagcugcacuacaccugaggacuagucccuguucccagagcccacuuuuuuuucuuuuuuugaaauaaaauagccugucuuucagaucuaaaaaaaaaaaaaaaaaaaaaaaaaaaaaaaaaaaaaaaaaaaaaaaaaaaaaaaaaaaaaaaaaaaaaaaaaaaaaaaaaaaaaaaaaaaaaaaaaaaa

SEQ ID NO: 24907 - RNA, 4070 nt, Artificial Sequence
  SARS-CoV-2/Wuhan/WIV05/2019__EPI_ISL_402128 spike protein mRNA gc (1-1273)(K986P_V987P_K986P_V987P_L18F_T20N_P26S_D138Y_R190S_K417T _E484K_N501Y_D614G_H655Y_T1027I)
aggagagucccgcagucggcguccagcggcucugcuuguucgugugugugucguugcaggccuuauucaagcuuaccauguucguguuccuggugcugcugccccuggugagcagccagugcgugaacuucaccaaccggacccagcugcccagcgccuacaccaacagcuucacccggggcguguacuacccugacaagguguuccggagcagcgugcugcacagcacccaggaccuguuccugcccuucuucagcaacgugaccugguuccacgccauccacgugagcggcaccaacggcaccaagcgguucgacaaccccgugcugccauucaacgacggcguguacuucgccagcaccgagaagucaaacaucauccggggcuggaucuuuggcaccacccuggacagcaagacccagagccugcugaucgugaacaacgccacaaacguggugaucaaggugugcgaguuccaguucugcaacuaccccuuccugggcguguacuaccacaagaacaacaagagcuggauggagagcgaguuccgggucuacagcagcgcuaauaacugcaccuucgaguacgugagccagcccuuccugauggaccuggagggcaagcagggcaacuucaagaaccucagcgaguucguguucaagaacaucgacggcuacuucaagaucuacagcaagcacacccccaucaaccuggugcgggaucugccccagggauucagcgcccuggagccccugguggaccugccuaucggcaucaacaucacccgguuccagacccugcuggcccugcacaggagcuaccugacccccggcgacagcagcagcggcuggaccgccggcgccgccgcauacuacgugggcuaccugcagccccggaccuuccugcugaaguacaacgagaacggcaccaucaccgacgccguggacugcgcccuggacccacugagcgagaccaagugcacccuaaagagcuucaccguggagaagggcaucuaccagaccagcaacuuccgggugcagcccaccgagagcaucgugcgguuccccaacauuacuaaccugugucccuucggcgagguguucaacgccacccgguucgccagcguguacgccuggaaccggaagcggaucagcaacugcguggccgacuacagcgugcuguacaacagcgccagcuucagcaccuucaagugcuacggcgugagccccaccaagcugaacgaccugugcuucaccaacguguacgcugacagcuucgugauccggggcgacgaggugcggcagaucgccccuggccagaccggcaccaucgccgacuacaacuacaagcugcccgacgacuucaccggcugcgugaucgccuggaacagcaacaaccuggacagcaaggugggcggcaacuacaacuaccuguaccggcuguuccguaagagcaaccugaagcccuuugagcgggacaucagcaccgagaucuaccaggccggcagcaccccaugcaacggugugaagggcuucaacugcuacuucccccugcagagcuacggcuuccagcccaccuacggcgugggcuaccagcccuaccgggugguggugcugagcuucgagcugcugcacgcccccgccaccgugugcggccccaaaaagagcaccaaccuggugaagaacaagugcgugaacuucaauuucaacggccugaccggcaccggcgugcugaccgagagcaacaagaaguuccugccuuuccagcaguucggccgggacaucgccgauaccaccgacgcagugcgggacccccagacccuggagauccuggacaucacccccugcagcuucggcggcgugagcgucaucaccccaggcacaaacaccagcaaccagguggccgugcuguaccagggagugaacugcaccgaggugcccguggccauccacgccgaccagcugacccccaccuggcggguguacuccaccggcagcaacguguuccagacccgggccggcugccugaucggcgccgaguacgugaacaacagcuacgagugcgacauccccaucggcgcuggcaucugcgccagcuaccagacccagaccaacagcccccggcgggcccggagcguggccagccagagcaucaucgccuacaccaugagccugggcgccgagaacagcguggccuacagcaacaacagcaucgcgauccccaccaacuucaccaucagcgugaccaccgagauauuaccugugagcaugaccaagaccagcguggacuguaccauguacaucugcggcgacagcaccgagugcagcaaccugcugcugcaguacggcagcuucugcacccagcugaaccgggcccugaccggcaucgccguggagcaggacaagaacacccaagagguguucgcccaggugaagcagaucuacaagacuccacccaucaaggacuucggcggcuucaacuucagccagauccugcccgaccccagcaagcccagcaagcggagcuucaucgaggaccugcuguucaacaaggugacccuggccgacgccggcuucaucaagcaguacggcgacugccugggggacaucgccgcucgggaucugaucugcgcccagaaguucaacggccugaccgugcugccuccccugcugaccgacgagaugaucgcccaguacaccagcgcccugcuggccggcaccaucaccagcggcuggaccuucggcgccggcgcagcccuucagauccccuucgccaugcagauggccuaccgguucaacggcaucggcgugacccagaacgugcuguacgagaaccagaagcugaucgccaaccaguucaacagcgccaucggcaagauccaggacagccugagcagcaccgccagcgcccugggcaagcugcaggacguggugaaccagaacgcucaggcccugaacacccuggugaagcagcugagcucaaacuuuggcgccaucagcagcgugcugaaugacauccugagccggcuggacccacccgaggccgaggugcagaucgacaggcugaucaccggccggcugcagagccugcagaccuacgugacccagcagcugauccgggccgccgagauccgggccagcgccaaccuggcagccauuaagaugagcgagugcgugcugggccagagcaagcggguggacuucugcggcaagggcuaccaccugaugagcuucccccagagcgcuccccacggcgugguguuccugcacgugaccuacguccccgcccaggagaagaacuucacaaccgcccccgccaucugccacgacggcaaggcccacuucccccgggagggaguguucgugagcaacggcacccacugguucgugacccagcggaacuucuacgagccccagaucaucaccaccgacaacaccuucgugagcggcaacugcgacguggugaucggcaucgugaacaacaccguguacgacccucuccagcccgagcuggacagcuucaaggaggagcuggacaaguacuucaagaaccacaccagccccgacguggaccugggcgauaucagcggcaucaacgccagcguggugaacauccagaaggagaucgaccggcugaacgagguggccaagaaccugaacgagagccugaucgaccugcaggagcugggcaaguacgagcaguacaucaaguggccaugguacaucuggcugggcuucaucgccggccugaucgccaucgugauggugaccaucaugcugugcugcaugaccagcugcuguagcugccugaagggcugcugcagcugcggcagcugcugcaaguucgacgaggacgacagcgagcccgugcugaagggcgugaagcugcacuacaccugaggacuagucccuguucccagagcccacuuuuuuuucuuuuuuugaaauaaaauagccugucuuucagaucuaaaaaaaaaaaaaaaaaaaaaaaaaaaaaaaaaaaaaaaaaaaaaaaaaaaaaaaaaaaaaaaaaaaaaaaaaaaaaaaaaaaaaaaaaaaaaaaaaaaa

SEQ ID NO: 24908 - RNA, 4070 nt, Artificial Sequence
  SARS-CoV-2/Wuhan/WIV05/2019__EPI_ISL_402128 spike protein mRNA gc (1-1273)(K986P_V987P_K986P_V987P_S13I_W152C_L452R_D614G)
aggagagucccgcagucggcguccagcggcucugcuuguucgugugugugucguugcaggccuuauucaagcuuaccauguucguguuccuggugcugcugccccuggugagcauccagugcgugaaccugaccacccggacccagcugcccccugccuacaccaacagcuucacccggggcguguacuaccccgacaagguguuccggagcagcgugcugcacagcacccaggaccuguuccugcccuucuucagcaacgugaccugguuccacgccauccacgugagcggcaccaacggcaccaagcgguucgacaacccagugcugcccuucaacgacggcguguacuucgccagcaccgagaagucaaacaucauccggggcuggaucuucggcaccacccuggacagcaagacacagagccugcugaucgugaacaacgccaccaacguggugaucaaggugugcgaguuucaguucugcaacgaccccuuccugggcguguacuaccacaagaacaacaagagcugcauggagagcgaguuccgggucuacagcagcgcuaacaauugcaccuucgaguacgugagccagcccuuccugauggaccucgagggcaagcagggcaacuucaagaaccugcgggaguucguguucaagaacaucgauggcuacuucaagaucuacagcaagcacacccccaucaaccuggugcgggaccugccccagggauucagcgcccuggagccucugguggaccugcccaucggcaucaacaucaccagguuccagacccugcuggcccugcaccggagcuaccugacccccggcgacagcagcagcggcuggaccgccggcgccgccgcauacuacgugggcuaccugcagccacggaccuuccugcugaaguacaacgagaacggcaccaucaccgacgccguggacugcgcccuggacccccugagcgagaccaaguguacccuaaagagcuucaccguggagaagggcaucuaccagaccagcaacuuccgggugcagcccacugagagcauugugcgguuccccaacaucaccaaccugugccccuucggcgagguguucaacgccacccgguucgccagcguguacgccuggaaccggaagcggaucagcaacugcguggccgacuacagcgugcuguacaacagcgccagcuucagcaccuucaagugcuacggcgugagcccuaccaagcugaacgaccugugcuucaccaacguguacgcugacagcuucgugauccggggcgacgaggugcggcagaucgcccccggccagaccggcaagaucgccgacuacaacuacaagcugcccgacgacuucaccggcugcgugaucgccuggaacagcaacaaccuggacagcaaggugggcggcaacuacaacuaccgguaccggcuguuccguaagagcaaccugaagccauucgagcgggacaucagcaccgagaucuaccaggccggcagcacccccugcaacgguguggagggcuuuaacugcuacuucccccugcagagcuacggcuuccagcccaccaacggcgugggcuaccagcccuaccgggugguggugcugagcuucgagcugcugcacgcccccgccaccgugugcggcccuaaaaagagcaccaaccuggugaagaacaagugcgugaacuucaauuucaacggccugaccggcaccggcgugcugaccgagagcaacaagaaguuccugcccuuccagcaguucggccgggauaucgccgacaccaccgacgcagugcgggacccccagacccuggagauccuggacaucaccccaugcagcuucggcggcgugagcgucaucacccccggcacaaacaccagcaaccagguggccgugcuguaccagggagugaacugcaccgaggugcccguggccauccacgccgaccagcugacccccaccuggcggguguacagcaccggcagcaacguguuccagacccgggccggcugccugaucggcgccgagcacgugaacaacagcuacgagugcgacauccccaucggcgcuggcaucugugccuccuaccagacccagaccaacagcccccggcgggcccggagcguggccagccagagcaucaucgccuacaccaugagccugggcgccgagaacagcguggccuacagcaacaacagcaucgcgaucccuaccaacuucaccauaagcgugaccaccgagaucuuacccgugagcaugaccaagaccagcguggacugcaccauguacaucugcggcgacagcaccgagugcagcaaccugcugcugcaguacggcagcuucugcacccagcugaaccgggcccugaccggcaucgccguggagcaggacaagaacacccaagagguguucgcccaggugaagcagaucuacaagacucccccaaucaaggacuucggcggcuucaacuucagccagauccugcccgaccccagcaagcccagcaagcggagcuucaucgaggaccugcuguucaacaaggugacccuggccgacgccggcuucaucaagcaguacggcgacugccugggggauaucgccgcucgggaccugaucugcgcccagaaguucaacggccugaccgugcugcccccucugcugaccgacgagaugaucgcccaguacaccagcgcccugcuggccggcaccaucaccagcggcuggaccuucggcgccggcgcagcccuucagauccccuucgccaugcagauggccuacagguucaacggcaucggcgugacccagaacgugcuguacgagaaccagaagcugaucgccaaccaguucaacagcgccaucggcaagauccaggacagccugagcagcaccgccagcgcccugggcaagcugcaggacguggugaaccagaacgcucaggcccugaacacccuggugaagcagcugagcagcaacuucggcgccaucagcagcgugcugaaugacauccugucacggcuggaucccccagaggccgaggugcagaucgaccggcugaucaccggccggcugcagagccugcagaccuacgugacccagcagcugauccgggccgccgagauucgggccagcgccaaccuggcagccaccaagaugagcgagugcgugcugggccagagcaagcggguggacuuuugcggcaagggcuaccaccugaugagcuucccccagagcgcuccccacggcgugguguuccugcacgugacauacguccccgcccaggagaagaacuucaccaccgcccccgccaucugccacgacggcaaggcccacuucccccgggagggaguguucgugagcaacggcacccacugguucgugacccagcggaacuucuacgagccucagaucaucaccaccgacaacaccuucgugagcggcaacugcgacguggugaucggcaucgugaacaacaccguguacgacccccuccagcccgagcuggacagcuucaaggaggagcuggacaaguacuucaagaaccacaccagcccagacguggaccugggcgacaucagcggcaucaacgccagcguggugaacauccagaaggagaucgaccggcugaacgagguggccaagaaccugaacgagagccugaucgaccugcaggagcugggcaaguacgagcaguacaucaaguggcccugguacaucuggcugggcuucaucgccggccugaucgccaucgugauggugaccaucaugcugugcugcaugaccagcuguugcagcugccugaagggcugcugcagcugcggcagcugcugcaaguucgacgaggacgacagcgagcccgugcugaagggcgugaagcugcacuacaccugaggacuagucccuguucccagagcccacuuuuuuuucuuuuuuugaaauaaaauagccugucuuucagaucuaaaaaaaaaaaaaaaaaaaaaaaaaaaaaaaaaaaaaaaaaaaaaaaaaaaaaaaaaaaaaaaaaaaaaaaaaaaaaaaaaaaaaaaaaaaaaaaaaaaa

SEQ ID NO: 24909 - RNA, 4070 nt, Artificial Sequence
  SARS-CoV-2/Wuhan/WIV05/2019__EPI_ISL_402128 spike protein mRNA gc mod (1-1273)(K986P_V987P)
aggagagucccgcagucggcguccagcggcucugcuuguucgugugugugucguugcaggccuuauucaagcuuaccauguucguguuucuggugcugcugccccugguguccagccagugugugaaccugaccaccagaacacagcugccuccagccuacaccaacagcuucaccagaggcguguacuaccccgacaagguguucagauccagcgugcugcacucuacccaggaccuguuccugccuuucuucagcaacgugaccugguuccacgccauccacguguccggcaccaauggcaccaagagauucgacaaccccgugcugcccuucaacgacgggguguacuuugccagcaccgagaaguccaacaucaucagaggcuggaucuucggcaccacacuggacagcaagacccagagccugcugaucgugaacaacgccaccaacguggucaucaaagugugcgaguuccaguucugcaacgaccccuuccugggcgucuacuaccacaagaacaacaagagcuggauggaaagcgaguuccggguguacagcagcgccaacaacugcaccuucgaguacgugucccagccuuuccugauggaccuggaaggcaagcagggcaacuucaagaaccugcgcgaguucguguucaagaacaucgacggcuacuucaaaaucuacagcaagcacaccccuaucaaccucgugcgggaucugccucagggcuucucugcucuggaaccccugguggaucugcccaucggcaucaacaucacccgguuucagacacugcuggcccugcacagaagcuaccugacaccuggcgauagcagcagcggauggacagcuggugccgccgcuuacuaugugggcuaccugcagccuagaaccuuccugcugaaguacaacgagaacggcaccaucaccgacgccguggauugugcucuggauccucugagcgagacaaagugcacccugaaguccuucaccguggaaaagggcaucuaccagaccagcaacuuccgggugcagcccaccgaauccaucgugcgguuccccaauaucaccaaucugugccccuucggcgagguguucaaugccaccagauucgccucuguguacgccuggaaccggaagcggaucagcaauugcguggccgacuacuccgugcuguacaacuccgccagcuucagcaccuucaagugcuacggcguguccccuaccaagcugaacgaccugugcuucacaaacguguacgccgacagcuucgugauccggggagaugaagugcggcagauugccccuggacagacaggcaagaucgccgacuacaacuacaagcugcccgacgacuucaccggcugugugauugccuggaacagcaacaaccuggacuccaaagucggcggcaacuacaauuaccuguaccggcuguuccggaaguccaaucugaagcccuucgagcgggacaucagcaccgaaaucuaucaggccggcagcaccccuugcaacggcguggaaggcuucaacugcuacuucccacugcaguccuacggcuuucagcccacaaauggcgugggcuaucagcccuacagagugguggugcugagcuucgaacugcugcaugcuccugccacagugugcggcccuaagaaaagcaccaaucucgugaagaacaaaugcgugaacuucaacuucaacggccugaccggcaccggcgugcugacagagagcaacaagaaguuccugccauuccagcaguuuggccgggauaucgccgauaccacagacgccguuagagauccccagacacuggaaauccuggacaucaccccaugcagcuucggcggagugucugugaucaccccuggcaccaacaccagcaaucagguggcagugcuguaccaggacgugaacuguaccgaagugcccguggccauucacgccgaucagcugacaccuacauggcggguguacuccaccggcagcaauguguuucagaccagagccggcugucugaucggagccgagcacgugaacaauagcuacgagugcgacauccccaucggcgcuggcaucugugccagcuaccagacacagacaaacagccccagacgggcuagaagcguggccagccagagcaucauugccuacacaaugucucugggcgccgagaacagcguggccuacuccaacaacucuaucgcuauccccaccaacuucaccaucagcgugaccaccgagauccugccuguguccaugaccaagaccagcguggacugcaccauguacaucugcggcgauuccaccgagugcuccaaccugcugcugcaguacggcagcuucugcacccagcugaauagagcccugacagggaucgccguggaacaggacaagaacacccaagagguguucgcccaagugaagcaaaucuacaagaccccuccuaucaaggacuucggcggcuucaauuucagccagauucugcccgauccuagcaagcccagcaagcggagcuucaucgaggaccugcuguucaacaaagugacacuggccgacgccggcuucaucaagcaguauggcgauugucugggcgacauugccgccagggaucugauuugcgcccagaaguuuaacggacugacagugcugccuccucugcugaccgaugagaugaucgcccaguacacaucugcccugcuggccggcacaaucacaagcggcuggacauuuggagcuggcgccgcucugcagauccccuuugcuaugcagauggccuaccgguucaacggcaucggagugacccagaaugugcuguacgagaaccagaagcugaucgccaaccaguucaacagcgccaucggcaagauccaggacagccugagcagcacagcaagcgcccugggaaagcugcaggacguggucaaccagaaugcccaggcacugaacacccuggucaagcagcuguccuccaacuucggcgccaucagcucugugcugaacgauauccugagcagacuggacccuccugaggccgaggugcagaucgacagacugaucacaggcagacugcagagccuccagacauacgugacccagcagcugaucagagccgccgagauuagagccucugccaaucuggccgccaccaagaugucugagugugugcugggccagagcaagagaguggacuuuugcggcaagggcuaccaccugaugagcuucccucagucugccccucacggcgugguguuucugcacgugacauaugugcccgcucaagagaagaauuucaccaccgcuccagccaucugccacgacggcaaagcccacuuuccuagagaaggcguguucguguccaacggcacccauugguucgugacacagcggaacuucuacgagccccagaucaucaccaccgacaacaccuucgugucuggcaacugcgacguugugaucggcauugugaacaauaccguguacgacccucugcagcccgagcuggacagcuucaaagaggaacuggacaaguacuuuaagaaccacacaagccccgacguggaccugggcgauaucagcggaaucaaugccagcgucgugaacauccagaaagagaucgaccggcugaacgagguggccaagaaucugaacgagagccugaucgaccugcaagaacuggggaaguacgagcaguacaucaaguggcccugguacaucuggcugggcuuuaucgccggacugauugccaucgugauggucacaaucaugcuguguugcaugaccagcugcuguagcugccugaagggcuguuguagcuguggcagcugcugcaaguucgacgaggacgauucugagcccgugcugaagggcgugaaacugcacuacaccugaggacuagucccuguucccagagcccacuuuuuuuucuuuuuuugaaauaaaauagccugucuuucagaucuaaaaaaaaaaaaaaaaaaaaaaaaaaaaaaaaaaaaaaaaaaaaaaaaaaaaaaaaaaaaaaaaaaaaaaaaaaaaaaaaaaaaaaaaaaaaaaaaaaaa

SEQ ID NO: 24910 - RNA, 4070 nt, Artificial Sequence
  SARS-CoV-2/Wuhan/WIV05/2019__EPI_ISL_402128 spike protein mRNA gc mod (1-1273)(K986P_V987P_ D614G)
aggagagucccgcagucggcguccagcggcucugcuuguucgugugugugucguugcaggccuuauucaagcuuaccauguucguguuucuggugcugcugccccugguguccagccagugugugaaccugaccaccagaacacagcugccuccagccuacaccaacagcuucaccagaggcguguacuaccccgacaagguguucagauccagcgugcugcacucuacccaggaccuguuccugccuuucuucagcaacgugaccugguuccacgccauccacguguccggcaccaauggcaccaagagauucgacaaccccgugcugcccuucaacgacgggguguacuuugccagcaccgagaaguccaacaucaucagaggcuggaucuucggcaccacacuggacagcaagacccagagccugcugaucgugaacaacgccaccaacguggucaucaaagugugcgaguuccaguucugcaacgaccccuuccugggcgucuacuaccacaagaacaacaagagcuggauggaaagcgaguuccggguguacagcagcgccaacaacugcaccuucgaguacgugucccagccuuuccugauggaccuggaaggcaagcagggcaacuucaagaaccugcgcgaguucguguucaagaacaucgacggcuacuucaaaaucuacagcaagcacaccccuaucaaccucgugcgggaucugccucagggcuucucugcucuggaaccccugguggaucugcccaucggcaucaacaucacccgguuucagacacugcuggcccugcacagaagcuaccugacaccuggcgauagcagcagcggauggacagcuggugccgccgcuuacuaugugggcuaccugcagccuagaaccuuccugcugaaguacaacgagaacggcaccaucaccgacgccguggauugugcucuggauccucugagcgagacaaagugcacccugaaguccuucaccguggaaaagggcaucuaccagaccagcaacuuccgggugcagcccaccgaauccaucgugcgguuccccaauaucaccaaucugugccccuucggcgagguguucaaugccaccagauucgccucuguguacgccuggaaccggaagcggaucagcaauugcguggccgacuacuccgugcuguacaacuccgccagcuucagcaccuucaagugcuacggcguguccccuaccaagcugaacgaccugugcuucacaaacguguacgccgacagcuucgugauccggggagaugaagugcggcagauugccccuggacagacaggcaagaucgccgacuacaacuacaagcugcccgacgacuucaccggcugugugauugccuggaacagcaacaaccuggacuccaaagucggcggcaacuacaauuaccuguaccggcuguuccggaaguccaaucugaagcccuucgagcgggacaucagcaccgaaaucuaucaggccggcagcaccccuugcaacggcguggaaggcuucaacugcuacuucccacugcaguccuacggcuuucagcccacaaauggcgugggcuaucagcccuacagagugguggugcugagcuucgaacugcugcaugcuccugccacagugugcggcccuaagaaaagcaccaaucucgugaagaacaaaugcgugaacuucaacuucaacggccugaccggcaccggcgugcugacagagagcaacaagaaguuccugccauuccagcaguuuggccgggauaucgccgauaccacagacgccguuagagauccccagacacuggaaauccuggacaucaccccaugcagcuucggcggagugucugugaucaccccuggcaccaacaccagcaaucagguggcagugcuguaccagggcgugaacuguaccgaagugcccguggccauucacgccgaucagcugacaccuacauggcggguguacuccaccggcagcaauguguuucagaccagagccggcugucugaucggagccgagcacgugaacaauagcuacgagugcgacauccccaucggcgcuggcaucugugccagcuaccagacacagacaaacagccccagacgggcuagaagcguggccagccagagcaucauugccuacacaaugucucugggcgccgagaacagcguggccuacuccaacaacucuaucgcuauccccaccaacuucaccaucagcgugaccaccgagauccugccuguguccaugaccaagaccagcguggacugcaccauguacaucugcggcgauuccaccgagugcuccaaccugcugcugcaguacggcagcuucugcacccagcugaauagagcccugacagggaucgccguggaacaggacaagaacacccaagagguguucgcccaagugaagcaaaucuacaagaccccuccuaucaaggacuucggcggcuucaauuucagccagauucugcccgauccuagcaagcccagcaagcggagcuucaucgaggaccugcuguucaacaaagugacacuggccgacgccggcuucaucaagcaguauggcgauugucugggcgacauugccgccagggaucugauuugcgcccagaaguuuaacggacugacagugcugccuccucugcugaccgaugagaugaucgcccaguacacaucugcccugcuggccggcacaaucacaagcggcuggacauuuggagcuggcgccgcucugcagauccccuuugcuaugcagauggccuaccgguucaacggcaucggagugacccagaaugugcuguacgagaaccagaagcugaucgccaaccaguucaacagcgccaucggcaagauccaggacagccugagcagcacagcaagcgcccugggaaagcugcaggacguggucaaccagaaugcccaggcacugaacacccuggucaagcagcuguccuccaacuucggcgccaucagcucugugcugaacgauauccugagcagacuggacccuccugaggccgaggugcagaucgacagacugaucacaggcagacugcagagccuccagacauacgugacccagcagcugaucagagccgccgagauuagagccucugccaaucuggccgccaccaagaugucugagugugugcugggccagagcaagagaguggacuuuugcggcaagggcuaccaccugaugagcuucccucagucugccccucacggcgugguguuucugcacgugacauaugugcccgcucaagagaagaauuucaccaccgcuccagccaucugccacgacggcaaagcccacuuuccuagagaaggcguguucguguccaacggcacccauugguucgugacacagcggaacuucuacgagccccagaucaucaccaccgacaacaccuucgugucuggcaacugcgacguugugaucggcauugugaacaauaccguguacgacccucugcagcccgagcuggacagcuucaaagaggaacuggacaaguacuuuaagaaccacacaagccccgacguggaccugggcgauaucagcggaaucaaugccagcgucgugaacauccagaaagagaucgaccggcugaacgagguggccaagaaucugaacgagagccugaucgaccugcaagaacuggggaaguacgagcaguacaucaaguggcccugguacaucuggcugggcuuuaucgccggacugauugccaucgugauggucacaaucaugcuguguugcaugaccagcugcuguagcugccugaagggcuguuguagcuguggcagcugcugcaaguucgacgaggacgauucugagcccgugcugaagggcgugaaacugcacuacaccugaggacuagucccuguucccagagcccacuuuuuuuucuuuuuuugaaauaaaauagccugucuuucagaucuaaaaaaaaaaaaaaaaaaaaaaaaaaaaaaaaaaaaaaaaaaaaaaaaaaaaaaaaaaaaaaaaaaaaaaaaaaaaaaaaaaaaaaaaaaaaaaaaaaaa

SEQ ID NO: 24911 - RNA, 4070 nt, Artificial Sequence
  SARS-CoV-2/Wuhan/WIV05/2019__EPI_ISL_402128 spike protein mRNA gc mod (1-1273)(K986P_V987P_A222V_D614G)
aggagagucccgcagucggcguccagcggcucugcuuguucgugugugugucguugcaggccuuauucaagcuuaccauguucguguuucuggugcugcugccccugguguccagccagugugugaaccugaccaccagaacacagcugccuccagccuacaccaacagcuucaccagaggcguguacuaccccgacaagguguucagauccagcgugcugcacucuacccaggaccuguuccugccuuucuucagcaacgugaccugguuccacgccauccacguguccggcaccaauggcaccaagagauucgacaaccccgugcugcccuucaacgacgggguguacuuugccagcaccgagaaguccaacaucaucagaggcuggaucuucggcaccacacuggacagcaagacccagagccugcugaucgugaacaacgccaccaacguggucaucaaagugugcgaguuccaguucugcaacgaccccuuccugggcgucuacuaccacaagaacaacaagagcuggauggaaagcgaguuccggguguacagcagcgccaacaacugcaccuucgaguacgugucccagccuuuccugauggaccuggaaggcaagcagggcaacuucaagaaccugcgcgaguucguguucaagaacaucgacggcuacuucaaaaucuacagcaagcacaccccuaucaaccucgugcgggaucugccucagggcuucucugugcuggaaccccugguggaucugcccaucggcaucaacaucacccgguuucagacacugcuggcccugcacagaagcuaccugacaccuggcgauagcagcagcggauggacagcuggugccgccgcuuacuaugugggcuaccugcagccuagaaccuuccugcugaaguacaacgagaacggcaccaucaccgacgccguggauugugcucuggauccucugagcgagacaaagugcacccugaaguccuucaccguggaaaagggcaucuaccagaccagcaacuuccgggugcagcccaccgaauccaucgugcgguuccccaauaucaccaaucugugccccuucggcgagguguucaaugccaccagauucgccucuguguacgccuggaaccggaagcggaucagcaauugcguggccgacuacuccgugcuguacaacuccgccagcuucagcaccuucaagugcuacggcguguccccuaccaagcugaacgaccugugcuucacaaacguguacgccgacagcuucgugauccggggagaugaagugcggcagauugccccuggacagacaggcaagaucgccgacuacaacuacaagcugcccgacgacuucaccggcugugugauugccuggaacagcaacaaccuggacuccaaagucggcggcaacuacaauuaccuguaccggcuguuccggaaguccaaucugaagcccuucgagcgggacaucagcaccgaaaucuaucaggccggcagcaccccuugcaacggcguggaaggcuucaacugcuacuucccacugcaguccuacggcuuucagcccacaaauggcgugggcuaucagcccuacagagugguggugcugagcuucgaacugcugcaugcuccugccacagugugcggcccuaagaaaagcaccaaucucgugaagaacaaaugcgugaacuucaacuucaacggccugaccggcaccggcgugcugacagagagcaacaagaaguuccugccauuccagcaguuuggccgggauaucgccgauaccacagacgccguuagagauccccagacacuggaaauccuggacaucaccccaugcagcuucggcggagugucugugaucaccccuggcaccaacaccagcaaucagguggcagugcuguaccagggcgugaacuguaccgaagugcccguggccauucacgccgaucagcugacaccuacauggcggguguacuccaccggcagcaauguguuucagaccagagccggcugucugaucggagccgagcacgugaacaauagcuacgagugcgacauccccaucggcgcuggcaucugugccagcuaccagacacagacaaacagccccagacgggcuagaagcguggccagccagagcaucauugccuacacaaugucucugggcgccgagaacagcguggccuacuccaacaacucuaucgcuauccccaccaacuucaccaucagcgugaccaccgagauccugccuguguccaugaccaagaccagcguggacugcaccauguacaucugcggcgauuccaccgagugcuccaaccugcugcugcaguacggcagcuucugcacccagcugaauagagcccugacagggaucgccguggaacaggacaagaacacccaagagguguucgcccaagugaagcaaaucuacaagaccccuccuaucaaggacuucggcggcuucaauuucagccagauucugcccgauccuagcaagcccagcaagcggagcuucaucgaggaccugcuguucaacaaagugacacuggccgacgccggcuucaucaagcaguauggcgauugucugggcgacauugccgccagggaucugauuugcgcccagaaguuuaacggacugacagugcugccuccucugcugaccgaugagaugaucgcccaguacacaucugcccugcuggccggcacaaucacaagcggcuggacauuuggagcuggcgccgcucugcagauccccuuugcuaugcagauggccuaccgguucaacggcaucggagugacccagaaugugcuguacgagaaccagaagcugaucgccaaccaguucaacagcgccaucggcaagauccaggacagccugagcagcacagcaagcgcccugggaaagcugcaggacguggucaaccagaaugcccaggcacugaacacccuggucaagcagcuguccuccaacuucggcgccaucagcucugugcugaacgauauccugagcagacuggacccuccugaggccgaggugcagaucgacagacugaucacaggcagacugcagagccuccagacauacgugacccagcagcugaucagagccgccgagauuagagccucugccaaucuggccgccaccaagaugucugagugugugcugggccagagcaagagaguggacuuuugcggcaagggcuaccaccugaugagcuucccucagucugccccucacggcgugguguuucugcacgugacauaugugcccgcucaagagaagaauuucaccaccgcuccagccaucugccacgacggcaaagcccacuuuccuagagaaggcguguucguguccaacggcacccauugguucgugacacagcggaacuucuacgagccccagaucaucaccaccgacaacaccuucgugucuggcaacugcgacguugugaucggcauugugaacaauaccguguacgacccucugcagcccgagcuggacagcuucaaagaggaacuggacaaguacuuuaagaaccacacaagccccgacguggaccugggcgauaucagcggaaucaaugccagcgucgugaacauccagaaagagaucgaccggcugaacgagguggccaagaaucugaacgagagccugaucgaccugcaagaacuggggaaguacgagcaguacaucaaguggcccugguacaucuggcugggcuuuaucgccggacugauugccaucgugauggucacaaucaugcuguguugcaugaccagcugcuguagcugccugaagggcuguuguagcuguggcagcugcugcaaguucgacgaggacgauucugagcccgugcugaagggcgugaaacugcacuacaccugaggacuagucccuguucccagagcccacuuuuuuuucuuuuuuugaaauaaaauagccugucuuucagaucuaaaaaaaaaaaaaaaaaaaaaaaaaaaaaaaaaaaaaaaaaaaaaaaaaaaaaaaaaaaaaaaaaaaaaaaaaaaaaaaaaaaaaaaaaaaaaaaaaaaa

SEQ ID NO: 24912 - RNA, 4070 nt, Artificial Sequence
  SARS-CoV-2/Wuhan/WIV05/2019__EPI_ISL_402128 spike protein mRNA gc mod (1-1273)(K986P_V987P_N439K_D614G)
aggagagucccgcagucggcguccagcggcucugcuuguucgugugugugucguugcaggccuuauucaagcuuaccauguucguguuucuggugcugcugccccugguguccagccagugugugaaccugaccaccagaacacagcugccuccagccuacaccaacagcuucaccagaggcguguacuaccccgacaagguguucagauccagcgugcugcacucuacccaggaccuguuccugccuuucuucagcaacgugaccugguuccacgccauccacguguccggcaccaauggcaccaagagauucgacaaccccgugcugcccuucaacgacgggguguacuuugccagcaccgagaaguccaacaucaucagaggcuggaucuucggcaccacacuggacagcaagacccagagccugcugaucgugaacaacgccaccaacguggucaucaaagugugcgaguuccaguucugcaacgaccccuuccugggcgucuacuaccacaagaacaacaagagcuggauggaaagcgaguuccggguguacagcagcgccaacaacugcaccuucgaguacgugucccagccuuuccugauggaccuggaaggcaagcagggcaacuucaagaaccugcgcgaguucguguucaagaacaucgacggcuacuucaaaaucuacagcaagcacaccccuaucaaccucgugcgggaucugccucagggcuucucugcucuggaaccccugguggaucugcccaucggcaucaacaucacccgguuucagacacugcuggcccugcacagaagcuaccugacaccuggcgauagcagcagcggauggacagcuggugccgccgcuuacuaugugggcuaccugcagccuagaaccuuccugcugaaguacaacgagaacggcaccaucaccgacgccguggauugugcucuggauccucugagcgagacaaagugcacccugaaguccuucaccguggaaaagggcaucuaccagaccagcaacuuccgggugcagcccaccgaauccaucgugcgguuccccaauaucaccaaucugugccccuucggcgagguguucaaugccaccagauucgccucuguguacgccuggaaccggaagcggaucagcaauugcguggccgacuacuccgugcuguacaacuccgccagcuucagcaccuucaagugcuacggcguguccccuaccaagcugaacgaccugugcuucacaaacguguacgccgacagcuucgugauccggggagaugaagugcggcagauugccccuggacagacaggcaagaucgccgacuacaacuacaagcugcccgacgacuucaccggcugugugauugccuggaacagcaagaaccuggacuccaaagucggcggcaacuacaauuaccuguaccggcuguuccggaaguccaaucugaagcccuucgagcgggacaucagcaccgaaaucuaucaggccggcagcaccccuugcaacggcguggaaggcuucaacugcuacuucccacugcaguccuacggcuuucagcccacaaauggcgugggcuaucagcccuacagagugguggugcugagcuucgaacugcugcaugcuccugccacagugugcggcccuaagaaaagcaccaaucucgugaagaacaaaugcgugaacuucaacuucaacggccugaccggcaccggcgugcugacagagagcaacaagaaguuccugccauuccagcaguuuggccgggauaucgccgauaccacagacgccguuagagauccccagacacuggaaauccuggacaucaccccaugcagcuucggcggagugucugugaucaccccuggcaccaacaccagcaaucagguggcagugcuguaccagggcgugaacuguaccgaagugcccguggccauucacgccgaucagcugacaccuacauggcggguguacuccaccggcagcaauguguuucagaccagagccggcugucugaucggagccgagcacgugaacaauagcuacgagugcgacauccccaucggcgcuggcaucugugccagcuaccagacacagacaaacagccccagacgggcuagaagcguggccagccagagcaucauugccuacacaaugucucugggcgccgagaacagcguggccuacuccaacaacucuaucgcuauccccaccaacuucaccaucagcgugaccaccgagauccugccuguguccaugaccaagaccagcguggacugcaccauguacaucugcggcgauuccaccgagugcuccaaccugcugcugcaguacggcagcuucugcacccagcugaauagagcccugacagggaucgccguggaacaggacaagaacacccaagagguguucgcccaagugaagcaaaucuacaagaccccuccuaucaaggacuucggcggcuucaauuucagccagauucugcccgauccuagcaagcccagcaagcggagcuucaucgaggaccugcuguucaacaaagugacacuggccgacgccggcuucaucaagcaguauggcgauugucugggcgacauugccgccagggaucugauuugcgcccagaaguuuaacggacugacagugcugccuccucugcugaccgaugagaugaucgcccaguacacaucugcccugcuggccggcacaaucacaagcggcuggacauuuggagcuggcgccgcucugcagauccccuuugcuaugcagauggccuaccgguucaacggcaucggagugacccagaaugugcuguacgagaaccagaagcugaucgccaaccaguucaacagcgccaucggcaagauccaggacagccugagcagcacagcaagcgcccugggaaagcugcaggacguggucaaccagaaugcccaggcacugaacacccuggucaagcagcuguccuccaacuucggcgccaucagcucugugcugaacgauauccugagcagacuggacccuccugaggccgaggugcagaucgacagacugaucacaggcagacugcagagccuccagacauacgugacccagcagcugaucagagccgccgagauuagagccucugccaaucuggccgccaccaagaugucugagugugugcugggccagagcaagagaguggacuuuugcggcaagggcuaccaccugaugagcuucccucagucugccccucacggcgugguguuucugcacgugacauaugugcccgcucaagagaagaauuucaccaccgcuccagccaucugccacgacggcaaagcccacuuuccuagagaaggcguguucguguccaacggcacccauugguucgugacacagcggaacuucuacgagccccagaucaucaccaccgacaacaccuucgugucuggcaacugcgacguugugaucggcauugugaacaauaccguguacgacccucugcagcccgagcuggacagcuucaaagaggaacuggacaaguacuuuaagaaccacacaagccccgacguggaccugggcgauaucagcggaaucaaugccagcgucgugaacauccagaaagagaucgaccggcugaacgagguggccaagaaucugaacgagagccugaucgaccugcaagaacuggggaaguacgagcaguacaucaaguggcccugguacaucuggcugggcuuuaucgccggacugauugccaucgugauggucacaaucaugcuguguugcaugaccagcugcuguagcugccugaagggcuguuguagcuguggcagcugcugcaaguucgacgaggacgauucugagcccgugcugaagggcgugaaacugcacuacaccugaggacuagucccuguucccagagcccacuuuuuuuucuuuuuuugaaauaaaauagccugucuuucagaucuaaaaaaaaaaaaaaaaaaaaaaaaaaaaaaaaaaaaaaaaaaaaaaaaaaaaaaaaaaaaaaaaaaaaaaaaaaaaaaaaaaaaaaaaaaaaaaaaaaaa

SEQ ID NO: 24913 - RNA, 4070 nt, Artificial Sequence
  SARS-CoV-2/Wuhan/WIV05/2019__EPI_ISL_402128 spike protein mRNA gc mod (1-1273)(K986P_V987P_S477N_D614G)
aggagagucccgcagucggcguccagcggcucugcuuguucgugugugugucguugcaggccuuauucaagcuuaccauguucguguuucuggugcugcugccccugguguccagccagugugugaaccugaccaccagaacacagcugccuccagccuacaccaacagcuucaccagaggcguguacuaccccgacaagguguucagauccagcgugcugcacucuacccaggaccuguuccugccuuucuucagcaacgugaccugguuccacgccauccacguguccggcaccaauggcaccaagagauucgacaaccccgugcugcccuucaacgacgggguguacuuugccagcaccgagaaguccaacaucaucagaggcuggaucuucggcaccacacuggacagcaagacccagagccugcugaucgugaacaacgccaccaacguggucaucaaagugugcgaguuccaguucugcaacgaccccuuccugggcgucuacuaccacaagaacaacaagagcuggauggaaagcgaguuccggguguacagcagcgccaacaacugcaccuucgaguacgugucccagccuuuccugauggaccuggaaggcaagcagggcaacuucaagaaccugcgcgaguucguguucaagaacaucgacggcuacuucaaaaucuacagcaagcacaccccuaucaaccucgugcgggaucugccucagggcuucucugcucuggaaccccugguggaucugcccaucggcaucaacaucacccgguuucagacacugcuggcccugcacagaagcuaccugacaccuggcgauagcagcagcggauggacagcuggugccgccgcuuacuaugugggcuaccugcagccuagaaccuuccugcugaaguacaacgagaacggcaccaucaccgacgccguggauugugcucuggauccucugagcgagacaaagugcacccugaaguccuucaccguggaaaagggcaucuaccagaccagcaacuuccgggugcagcccaccgaauccaucgugcgguuccccaauaucaccaaucugugccccuucggcgagguguucaaugccaccagauucgccucuguguacgccuggaaccggaagcggaucagcaauugcguggccgacuacuccgugcuguacaacuccgccagcuucagcaccuucaagugcuacggcguguccccuaccaagcugaacgaccugugcuucacaaacguguacgccgacagcuucgugauccggggagaugaagugcggcagauugccccuggacagacaggcaagaucgccgacuacaacuacaagcugcccgacgacuucaccggcugugugauugccuggaacagcaacaaccuggacuccaaagucggcggcaacuacaauuaccuguaccggcuguuccggaaguccaaucugaagcccuucgagcgggacaucagcaccgaaaucuaucaggccggcaacaccccuugcaacggcguggaaggcuucaacugcuacuucccacugcaguccuacggcuuucagcccacaaauggcgugggcuaucagcccuacagagugguggugcugagcuucgaacugcugcaugcuccugccacagugugcggcccuaagaaaagcaccaaucucgugaagaacaaaugcgugaacuucaacuucaacggccugaccggcaccggcgugcugacagagagcaacaagaaguuccugccauuccagcaguuuggccgggauaucgccgauaccacagacgccguuagagauccccagacacuggaaauccuggacaucaccccaugcagcuucggcggagugucugugaucaccccuggcaccaacaccagcaaucagguggcagugcuguaccagggcgugaacuguaccgaagugcccguggccauucacgccgaucagcugacaccuacauggcggguguacuccaccggcagcaauguguuucagaccagagccggcugucugaucggagccgagcacgugaacaauagcuacgagugcgacauccccaucggcgcuggcaucugugccagcuaccagacacagacaaacagccccagacgggcuagaagcguggccagccagagcaucauugccuacacaaugucucugggcgccgagaacagcguggccuacuccaacaacucuaucgcuauccccaccaacuucaccaucagcgugaccaccgagauccugccuguguccaugaccaagaccagcguggacugcaccauguacaucugcggcgauuccaccgagugcuccaaccugcugcugcaguacggcagcuucugcacccagcugaauagagcccugacagggaucgccguggaacaggacaagaacacccaagagguguucgcccaagugaagcaaaucuacaagaccccuccuaucaaggacuucggcggcuucaauuucagccagauucugcccgauccuagcaagcccagcaagcggagcuucaucgaggaccugcuguucaacaaagugacacuggccgacgccggcuucaucaagcaguauggcgauugucugggcgacauugccgccagggaucugauuugcgcccagaaguuuaacggacugacagugcugccuccucugcugaccgaugagaugaucgcccaguacacaucugcccugcuggccggcacaaucacaagcggcuggacauuuggagcuggcgccgcucugcagauccccuuugcuaugcagauggccuaccgguucaacggcaucggagugacccagaaugugcuguacgagaaccagaagcugaucgccaaccaguucaacagcgccaucggcaagauccaggacagccugagcagcacagcaagcgcccugggaaagcugcaggacguggucaaccagaaugcccaggcacugaacacccuggucaagcagcuguccuccaacuucggcgccaucagcucugugcugaacgauauccugagcagacuggacccuccugaggccgaggugcagaucgacagacugaucacaggcagacugcagagccuccagacauacgugacccagcagcugaucagagccgccgagauuagagccucugccaaucuggccgccaccaagaugucugagugugugcugggccagagcaagagaguggacuuuugcggcaagggcuaccaccugaugagcuucccucagucugccccucacggcgugguguuucugcacgugacauaugugcccgcucaagagaagaauuucaccaccgcuccagccaucugccacgacggcaaagcccacuuuccuagagaaggcguguucguguccaacggcacccauugguucgugacacagcggaacuucuacgagccccagaucaucaccaccgacaacaccuucgugucuggcaacugcgacguugugaucggcauugugaacaauaccguguacgacccucugcagcccgagcuggacagcuucaaagaggaacuggacaaguacuuuaagaaccacacaagccccgacguggaccugggcgauaucagcggaaucaaugccagcgucgugaacauccagaaagagaucgaccggcugaacgagguggccaagaaucugaacgagagccugaucgaccugcaagaacuggggaaguacgagcaguacaucaaguggcccugguacaucuggcugggcuuuaucgccggacugauugccaucgugauggucacaaucaugcuguguugcaugaccagcugcuguagcugccugaagggcuguuguagcuguggcagcugcugcaaguucgacgaggacgauucugagcccgugcugaagggcgugaaacugcacuacaccugaggacuagucccuguucccagagcccacuuuuuuuucuuuuuuugaaauaaaauagccugucuuucagaucuaaaaaaaaaaaaaaaaaaaaaaaaaaaaaaaaaaaaaaaaaaaaaaaaaaaaaaaaaaaaaaaaaaaaaaaaaaaaaaaaaaaaaaaaaaaaaaaaaaaa

SEQ ID NO: 24914 - RNA, 4070 nt, Artificial Sequence
  SARS-CoV-2/Wuhan/WIV05/2019__EPI_ISL_402128 spike protein mRNA gc mod (1-1273)(K986P_V987P_N501Y_D614G)
aggagagucccgcagucggcguccagcggcucugcuuguucgugugugugucguugcaggccuuauucaagcuuaccauguucguguuucuggugcugcugccccugguguccagccagugugugaaccugaccaccagaacacagcugccuccagccuacaccaacagcuucaccagaggcguguacuaccccgacaagguguucagauccagcgugcugcacucuacccaggaccuguuccugccuuucuucagcaacgugaccugguuccacgccauccacguguccggcaccaauggcaccaagagauucgacaaccccgugcugcccuucaacgacgggguguacuuugccagcaccgagaaguccaacaucaucagaggcuggaucuucggcaccacacuggacagcaagacccagagccugcugaucgugaacaacgccaccaacguggucaucaaagugugcgaguuccaguucugcaacgaccccuuccugggcgucuacuaccacaagaacaacaagagcuggauggaaagcgaguuccggguguacagcagcgccaacaacugcaccuucgaguacgugucccagccuuuccugauggaccuggaaggcaagcagggcaacuucaagaaccugcgcgaguucguguucaagaacaucgacggcuacuucaaaaucuacagcaagcacaccccuaucaaccucgugcgggaucugccucagggcuucucugcucuggaaccccugguggaucugcccaucggcaucaacaucacccgguuucagacacugcuggcccugcacagaagcuaccugacaccuggcgauagcagcagcggauggacagcuggugccgccgcuuacuaugugggcuaccugcagccuagaaccuuccugcugaaguacaacgagaacggcaccaucaccgacgccguggauugugcucuggauccucugagcgagacaaagugcacccugaaguccuucaccguggaaaagggcaucuaccagaccagcaacuuccgggugcagcccaccgaauccaucgugcgguuccccaauaucaccaaucugugccccuucggcgagguguucaaugccaccagauucgccucuguguacgccuggaaccggaagcggaucagcaauugcguggccgacuacuccgugcuguacaacuccgccagcuucagcaccuucaagugcuacggcguguccccuaccaagcugaacgaccugugcuucacaaacguguacgccgacagcuucgugauccggggagaugaagugcggcagauugccccuggacagacaggcaagaucgccgacuacaacuacaagcugcccgacgacuucaccggcugugugauugccuggaacagcaacaaccuggacuccaaagucggcggcaacuacaauuaccuguaccggcuguuccggaaguccaaucugaagcccuucgagcgggacaucagcaccgaaaucuaucaggccggcagcaccccuugcaacggcguggaaggcuucaacugcuacuucccacugcaguccuacggcuuucagcccacauacggcgugggcuaucagcccuacagagugguggugcugagcuucgaacugcugcaugcuccugccacagugugcggcccuaagaaaagcaccaaucucgugaagaacaaaugcgugaacuucaacuucaacggccugaccggcaccggcgugcugacagagagcaacaagaaguuccugccauuccagcaguuuggccgggauaucgccgauaccacagacgccguuagagauccccagacacuggaaauccuggacaucaccccaugcagcuucggcggagugucugugaucaccccuggcaccaacaccagcaaucagguggcagugcuguaccagggcgugaacuguaccgaagugcccguggccauucacgccgaucagcugacaccuacauggcggguguacuccaccggcagcaauguguuucagaccagagccggcugucugaucggagccgagcacgugaacaauagcuacgagugcgacauccccaucggcgcuggcaucugugccagcuaccagacacagacaaacagccccagacgggcuagaagcguggccagccagagcaucauugccuacacaaugucucugggcgccgagaacagcguggccuacuccaacaacucuaucgcuauccccaccaacuucaccaucagcgugaccaccgagauccugccuguguccaugaccaagaccagcguggacugcaccauguacaucugcggcgauuccaccgagugcuccaaccugcugcugcaguacggcagcuucugcacccagcugaauagagcccugacagggaucgccguggaacaggacaagaacacccaagagguguucgcccaagugaagcaaaucuacaagaccccuccuaucaaggacuucggcggcuucaauuucagccagauucugcccgauccuagcaagcccagcaagcggagcuucaucgaggaccugcuguucaacaaagugacacuggccgacgccggcuucaucaagcaguauggcgauugucugggcgacauugccgccagggaucugauuugcgcccagaaguuuaacggacugacagugcugccuccucugcugaccgaugagaugaucgcccaguacacaucugcccugcuggccggcacaaucacaagcggcuggacauuuggagcuggcgccgcucugcagauccccuuugcuaugcagauggccuaccgguucaacggcaucggagugacccagaaugugcuguacgagaaccagaagcugaucgccaaccaguucaacagcgccaucggcaagauccaggacagccugagcagcacagcaagcgcccugggaaagcugcaggacguggucaaccagaaugcccaggcacugaacacccuggucaagcagcuguccuccaacuucggcgccaucagcucugugcugaacgauauccugagcagacuggacccuccugaggccgaggugcagaucgacagacugaucacaggcagacugcagagccuccagacauacgugacccagcagcugaucagagccgccgagauuagagccucugccaaucuggccgccaccaagaugucugagugugugcugggccagagcaagagaguggacuuuugcggcaagggcuaccaccugaugagcuucccucagucugccccucacggcgugguguuucugcacgugacauaugugcccgcucaagagaagaauuucaccaccgcuccagccaucugccacgacggcaaagcccacuuuccuagagaaggcguguucguguccaacggcacccauugguucgugacacagcggaacuucuacgagccccagaucaucaccaccgacaacaccuucgugucuggcaacugcgacguugugaucggcauugugaacaauaccguguacgacccucugcagcccgagcuggacagcuucaaagaggaacuggacaaguacuuuaagaaccacacaagccccgacguggaccugggcgauaucagcggaaucaaugccagcgucgugaacauccagaaagagaucgaccggcugaacgagguggccaagaaucugaacgagagccugaucgaccugcaagaacuggggaaguacgagcaguacaucaaguggcccugguacaucuggcugggcuuuaucgccggacugauugccaucgugauggucacaaucaugcuguguugcaugaccagcugcuguagcugccugaagggcuguuguagcuguggcagcugcugcaaguucgacgaggacgauucugagcccgugcugaagggcgugaaacugcacuacaccugaggacuagucccuguucccagagcccacuuuuuuuucuuuuuuugaaauaaaauagccugucuuucagaucuaaaaaaaaaaaaaaaaaaaaaaaaaaaaaaaaaaaaaaaaaaaaaaaaaaaaaaaaaaaaaaaaaaaaaaaaaaaaaaaaaaaaaaaaaaaaaaaaaaaa

SEQ ID NO: 24915 - RNA, 4064 nt, Artificial Sequence
  SARS-CoV-2/Wuhan/WIV05/2019__EPI_ISL_402128 spike protein mRNA gc mod (1-1273)(K986P_V987P_H69del_V70del_D614G)
aggagagucccgcagucggcguccagcggcucugcuuguucgugugugugucguugcaggccuuauucaagcuuaccauguucguguuucuggugcugcugccccugguguccagccagugugugaaccugaccaccagaacacagcugccuccagccuacaccaacagcuucaccagaggcguguacuaccccgacaagguguucagauccagcgugcugcacucuacccaggaccuguuccugccuuucuucagcaacgugaccugguuccacgccaucuccggcaccaauggcaccaagagauucgacaaccccgugcugcccuucaacgacgggguguacuuugccagcaccgagaaguccaacaucaucagaggcuggaucuucggcaccacacuggacagcaagacccagagccugcugaucgugaacaacgccaccaacguggucaucaaagugugcgaguuccaguucugcaacgaccccuuccugggcgucuacuaccacaagaacaacaagagcuggauggaaagcgaguuccggguguacagcagcgccaacaacugcaccuucgaguacgugucccagccuuuccugauggaccuggaaggcaagcagggcaacuucaagaaccugcgcgaguucguguucaagaacaucgacggcuacuucaaaaucuacagcaagcacaccccuaucaaccucgugcgggaucugccucagggcuucucugcucuggaaccccugguggaucugcccaucggcaucaacaucacccgguuucagacacugcuggcccugcacagaagcuaccugacaccuggcgauagcagcagcggauggacagcuggugccgccgcuuacuaugugggcuaccugcagccuagaaccuuccugcugaaguacaacgagaacggcaccaucaccgacgccguggauugugcucuggauccucugagcgagacaaagugcacccugaaguccuucaccguggaaaagggcaucuaccagaccagcaacuuccgggugcagcccaccgaauccaucgugcgguuccccaauaucaccaaucugugccccuucggcgagguguucaaugccaccagauucgccucuguguacgccuggaaccggaagcggaucagcaauugcguggccgacuacuccgugcuguacaacuccgccagcuucagcaccuucaagugcuacggcguguccccuaccaagcugaacgaccugugcuucacaaacguguacgccgacagcuucgugauccggggagaugaagugcggcagauugccccuggacagacaggcaagaucgccgacuacaacuacaagcugcccgacgacuucaccggcugugugauugccuggaacagcaacaaccuggacuccaaagucggcggcaacuacaauuaccuguaccggcuguuccggaaguccaaucugaagcccuucgagcgggacaucagcaccgaaaucuaucaggccggcagcaccccuugcaacggcguggaaggcuucaacugcuacuucccacugcaguccuacggcuuucagcccacaaauggcgugggcuaucagcccuacagagugguggugcugagcuucgaacugcugcaugcuccugccacagugugcggcccuaagaaaagcaccaaucucgugaagaacaaaugcgugaacuucaacuucaacggccugaccggcaccggcgugcugacagagagcaacaagaaguuccugccauuccagcaguuuggccgggauaucgccgauaccacagacgccguuagagauccccagacacuggaaauccuggacaucaccccaugcagcuucggcggagugucugugaucaccccuggcaccaacaccagcaaucagguggcagugcuguaccagggcgugaacuguaccgaagugcccguggccauucacgccgaucagcugacaccuacauggcggguguacuccaccggcagcaauguguuucagaccagagccggcugucugaucggagccgagcacgugaacaauagcuacgagugcgacauccccaucggcgcuggcaucugugccagcuaccagacacagacaaacagccccagacgggcuagaagcguggccagccagagcaucauugccuacacaaugucucugggcgccgagaacagcguggccuacuccaacaacucuaucgcuauccccaccaacuucaccaucagcgugaccaccgagauccugccuguguccaugaccaagaccagcguggacugcaccauguacaucugcggcgauuccaccgagugcuccaaccugcugcugcaguacggcagcuucugcacccagcugaauagagcccugacagggaucgccguggaacaggacaagaacacccaagagguguucgcccaagugaagcaaaucuacaagaccccuccuaucaaggacuucggcggcuucaauuucagccagauucugcccgauccuagcaagcccagcaagcggagcuucaucgaggaccugcuguucaacaaagugacacuggccgacgccggcuucaucaagcaguauggcgauugucugggcgacauugccgccagggaucugauuugcgcccagaaguuuaacggacugacagugcugccuccucugcugaccgaugagaugaucgcccaguacacaucugcccugcuggccggcacaaucacaagcggcuggacauuuggagcuggcgccgcucugcagauccccuuugcuaugcagauggccuaccgguucaacggcaucggagugacccagaaugugcuguacgagaaccagaagcugaucgccaaccaguucaacagcgccaucggcaagauccaggacagccugagcagcacagcaagcgcccugggaaagcugcaggacguggucaaccagaaugcccaggcacugaacacccuggucaagcagcuguccuccaacuucggcgccaucagcucugugcugaacgauauccugagcagacuggacccuccugaggccgaggugcagaucgacagacugaucacaggcagacugcagagccuccagacauacgugacccagcagcugaucagagccgccgagauuagagccucugccaaucuggccgccaccaagaugucugagugugugcugggccagagcaagagaguggacuuuugcggcaagggcuaccaccugaugagcuucccucagucugccccucacggcgugguguuucugcacgugacauaugugcccgcucaagagaagaauuucaccaccgcuccagccaucugccacgacggcaaagcccacuuuccuagagaaggcguguucguguccaacggcacccauugguucgugacacagcggaacuucuacgagccccagaucaucaccaccgacaacaccuucgugucuggcaacugcgacguugugaucggcauugugaacaauaccguguacgacccucugcagcccgagcuggacagcuucaaagaggaacuggacaaguacuuuaagaaccacacaagccccgacguggaccugggcgauaucagcggaaucaaugccagcgucgugaacauccagaaagagaucgaccggcugaacgagguggccaagaaucugaacgagagccugaucgaccugcaagaacuggggaaguacgagcaguacaucaaguggcccugguacaucuggcugggcuuuaucgccggacugauugccaucgugauggucacaaucaugcuguguugcaugaccagcugcuguagcugccugaagggcuguuguagcuguggcagcugcugcaaguucgacgaggacgauucugagcccgugcugaagggcgugaaacugcacuacaccugaggacuagucccuguucccagagcccacuuuuuuuucuuuuuuugaaauaaaauagccugucuuucagaucuaaaaaaaaaaaaaaaaaaaaaaaaaaaaaaaaaaaaaaaaaaaaaaaaaaaaaaaaaaaaaaaaaaaaaaaaaaaaaaaaaaaaaaaaaaaaaaaaaaaa

SEQ ID NO: 24916 - RNA, 4070 nt, Artificial Sequence
  SARS-CoV-2/Wuhan/WIV05/2019__EPI_ISL_402128 spike protein mRNA gc mod (1-1273)(K986P_V987P_Y453F_D614G)
aggagagucccgcagucggcguccagcggcucugcuuguucgugugugugucguugcaggccuuauucaagcuuaccauguucguguuucuggugcugcugccccugguguccagccagugugugaaccugaccaccagaacacagcugccuccagccuacaccaacagcuucaccagaggcguguacuaccccgacaagguguucagauccagcgugcugcacucuacccaggaccuguuccugccuuucuucagcaacgugaccugguuccacgccauccacguguccggcaccaauggcaccaagagauucgacaaccccgugcugcccuucaacgacgggguguacuuugccagcaccgagaaguccaacaucaucagaggcuggaucuucggcaccacacuggacagcaagacccagagccugcugaucgugaacaacgccaccaacguggucaucaaagugugcgaguuccaguucugcaacgaccccuuccugggcgucuacuaccacaagaacaacaagagcuggauggaaagcgaguuccggguguacagcagcgccaacaacugcaccuucgaguacgugucccagccuuuccugauggaccuggaaggcaagcagggcaacuucaagaaccugcgcgaguucguguucaagaacaucgacggcuacuucaaaaucuacagcaagcacaccccuaucaaccucgugcgggaucugccucagggcuucucugcucuggaaccccugguggaucugcccaucggcaucaacaucacccgguuucagacacugcuggcccugcacagaagcuaccugacaccuggcgauagcagcagcggauggacagcuggugccgccgcuuacuaugugggcuaccugcagccuagaaccuuccugcugaaguacaacgagaacggcaccaucaccgacgccguggauugugcucuggauccucugagcgagacaaagugcacccugaaguccuucaccguggaaaagggcaucuaccagaccagcaacuuccgggugcagcccaccgaauccaucgugcgguuccccaauaucaccaaucugugccccuucggcgagguguucaaugccaccagauucgccucuguguacgccuggaaccggaagcggaucagcaauugcguggccgacuacuccgugcuguacaacuccgccagcuucagcaccuucaagugcuacggcguguccccuaccaagcugaacgaccugugcuucacaaacguguacgccgacagcuucgugauccggggagaugaagugcggcagauugccccuggacagacaggcaagaucgccgacuacaacuacaagcugcccgacgacuucaccggcugugugauugccuggaacagcaacaaccuggacuccaaagucggcggcaacuacaauuaccuguuccggcuguuccggaaguccaaucugaagcccuucgagcgggacaucagcaccgaaaucuaucaggccggcagcaccccuugcaacggcguggaaggcuucaacugcuacuucccacugcaguccuacggcuuucagcccacaaauggcgugggcuaucagcccuacagagugguggugcugagcuucgaacugcugcaugcuccugccacagugugcggcccuaagaaaagcaccaaucucgugaagaacaaaugcgugaacuucaacuucaacggccugaccggcaccggcgugcugacagagagcaacaagaaguuccugccauuccagcaguuuggccgggauaucgccgauaccacagacgccguuagagauccccagacacuggaaauccuggacaucaccccaugcagcuucggcggagugucugugaucaccccuggcaccaacaccagcaaucagguggcagugcuguaccagggcgugaacuguaccgaagugcccguggccauucacgccgaucagcugacaccuacauggcggguguacuccaccggcagcaauguguuucagaccagagccggcugucugaucggagccgagcacgugaacaauagcuacgagugcgacauccccaucggcgcuggcaucugugccagcuaccagacacagacaaacagccccagacgggcuagaagcguggccagccagagcaucauugccuacacaaugucucugggcgccgagaacagcguggccuacuccaacaacucuaucgcuauccccaccaacuucaccaucagcgugaccaccgagauccugccuguguccaugaccaagaccagcguggacugcaccauguacaucugcggcgauuccaccgagugcuccaaccugcugcugcaguacggcagcuucugcacccagcugaauagagcccugacagggaucgccguggaacaggacaagaacacccaagagguguucgcccaagugaagcaaaucuacaagaccccuccuaucaaggacuucggcggcuucaauuucagccagauucugcccgauccuagcaagcccagcaagcggagcuucaucgaggaccugcuguucaacaaagugacacuggccgacgccggcuucaucaagcaguauggcgauugucugggcgacauugccgccagggaucugauuugcgcccagaaguuuaacggacugacagugcugccuccucugcugaccgaugagaugaucgcccaguacacaucugcccugcuggccggcacaaucacaagcggcuggacauuuggagcuggcgccgcucugcagauccccuuugcuaugcagauggccuaccgguucaacggcaucggagugacccagaaugugcuguacgagaaccagaagcugaucgccaaccaguucaacagcgccaucggcaagauccaggacagccugagcagcacagcaagcgcccugggaaagcugcaggacguggucaaccagaaugcccaggcacugaacacccuggucaagcagcuguccuccaacuucggcgccaucagcucugugcugaacgauauccugagcagacuggacccuccugaggccgaggugcagaucgacagacugaucacaggcagacugcagagccuccagacauacgugacccagcagcugaucagagccgccgagauuagagccucugccaaucuggccgccaccaagaugucugagugugugcugggccagagcaagagaguggacuuuugcggcaagggcuaccaccugaugagcuucccucagucugccccucacggcgugguguuucugcacgugacauaugugcccgcucaagagaagaauuucaccaccgcuccagccaucugccacgacggcaaagcccacuuuccuagagaaggcguguucguguccaacggcacccauugguucgugacacagcggaacuucuacgagccccagaucaucaccaccgacaacaccuucgugucuggcaacugcgacguugugaucggcauugugaacaauaccguguacgacccucugcagcccgagcuggacagcuucaaagaggaacuggacaaguacuuuaagaaccacacaagccccgacguggaccugggcgauaucagcggaaucaaugccagcgucgugaacauccagaaagagaucgaccggcugaacgagguggccaagaaucugaacgagagccugaucgaccugcaagaacuggggaaguacgagcaguacaucaaguggcccugguacaucuggcugggcuuuaucgccggacugauugccaucgugauggucacaaucaugcuguguugcaugaccagcugcuguagcugccugaagggcuguuguagcuguggcagcugcugcaaguucgacgaggacgauucugagcccgugcugaagggcgugaaacugcacuacaccugaggacuagucccuguucccagagcccacuuuuuuuucuuuuuuugaaauaaaauagccugucuuucagaucuaaaaaaaaaaaaaaaaaaaaaaaaaaaaaaaaaaaaaaaaaaaaaaaaaaaaaaaaaaaaaaaaaaaaaaaaaaaaaaaaaaaaaaaaaaaaaaaaaaaa

SEQ ID NO: 24917 - RNA, 4070 nt, Artificial Sequence
  SARS-CoV-2/Wuhan/WIV05/2019__EPI_ISL_402128 spike protein mRNA gc mod (1-1273)(K986P_V987P_D614G_I692V)
aggagagucccgcagucggcguccagcggcucugcuuguucgugugugugucguugcaggccuuauucaagcuuaccauguucguguuucuggugcugcugccccugguguccagccagugugugaaccugaccaccagaacacagcugccuccagccuacaccaacagcuucaccagaggcguguacuaccccgacaagguguucagauccagcgugcugcacucuacccaggaccuguuccugccuuucuucagcaacgugaccugguuccacgccauccacguguccggcaccaauggcaccaagagauucgacaaccccgugcugcccuucaacgacgggguguacuuugccagcaccgagaaguccaacaucaucagaggcuggaucuucggcaccacacuggacagcaagacccagagccugcugaucgugaacaacgccaccaacguggucaucaaagugugcgaguuccaguucugcaacgaccccuuccugggcgucuacuaccacaagaacaacaagagcuggauggaaagcgaguuccggguguacagcagcgccaacaacugcaccuucgaguacgugucccagccuuuccugauggaccuggaaggcaagcagggcaacuucaagaaccugcgcgaguucguguucaagaacaucgacggcuacuucaaaaucuacagcaagcacaccccuaucaaccucgugcgggaucugccucagggcuucucugcucuggaaccccugguggaucugcccaucggcaucaacaucacccgguuucagacacugcuggcccugcacagaagcuaccugacaccuggcgauagcagcagcggauggacagcuggugccgccgcuuacuaugugggcuaccugcagccuagaaccuuccugcugaaguacaacgagaacggcaccaucaccgacgccguggauugugcucuggauccucugagcgagacaaagugcacccugaaguccuucaccguggaaaagggcaucuaccagaccagcaacuuccgggugcagcccaccgaauccaucgugcgguuccccaauaucaccaaucugugccccuucggcgagguguucaaugccaccagauucgccucuguguacgccuggaaccggaagcggaucagcaauugcguggccgacuacuccgugcuguacaacuccgccagcuucagcaccuucaagugcuacggcguguccccuaccaagcugaacgaccugugcuucacaaacguguacgccgacagcuucgugauccggggagaugaagugcggcagauugccccuggacagacaggcaagaucgccgacuacaacuacaagcugcccgacgacuucaccggcugugugauugccuggaacagcaacaaccuggacuccaaagucggcggcaacuacaauuaccuguaccggcuguuccggaaguccaaucugaagcccuucgagcgggacaucagcaccgaaaucuaucaggccggcagcaccccuugcaacggcguggaaggcuucaacugcuacuucccacugcaguccuacggcuuucagcccacaaauggcgugggcuaucagcccuacagagugguggugcugagcuucgaacugcugcaugcuccugccacagugugcggcccuaagaaaagcaccaaucucgugaagaacaaaugcgugaacuucaacuucaacggccugaccggcaccggcgugcugacagagagcaacaagaaguuccugccauuccagcaguuuggccgggauaucgccgauaccacagacgccguuagagauccccagacacuggaaauccuggacaucaccccaugcagcuucggcggagugucugugaucaccccuggcaccaacaccagcaaucagguggcagugcuguaccagggcgugaacuguaccgaagugcccguggccauucacgccgaucagcugacaccuacauggcggguguacuccaccggcagcaauguguuucagaccagagccggcugucugaucggagccgagcacgugaacaauagcuacgagugcgacauccccaucggcgcuggcaucugugccagcuaccagacacagacaaacagccccagacgggcuagaagcguggccagccagagcgugauugccuacacaaugucucugggcgccgagaacagcguggccuacuccaacaacucuaucgcuauccccaccaacuucaccaucagcgugaccaccgagauccugccuguguccaugaccaagaccagcguggacugcaccauguacaucugcggcgauuccaccgagugcuccaaccugcugcugcaguacggcagcuucugcacccagcugaauagagcccugacagggaucgccguggaacaggacaagaacacccaagagguguucgcccaagugaagcaaaucuacaagaccccuccuaucaaggacuucggcggcuucaauuucagccagauucugcccgauccuagcaagcccagcaagcggagcuucaucgaggaccugcuguucaacaaagugacacuggccgacgccggcuucaucaagcaguauggcgauugucugggcgacauugccgccagggaucugauuugcgcccagaaguuuaacggacugacagugcugccuccucugcugaccgaugagaugaucgcccaguacacaucugcccugcuggccggcacaaucacaagcggcuggacauuuggagcuggcgccgcucugcagauccccuuugcuaugcagauggccuaccgguucaacggcaucggagugacccagaaugugcuguacgagaaccagaagcugaucgccaaccaguucaacagcgccaucggcaagauccaggacagccugagcagcacagcaagcgcccugggaaagcugcaggacguggucaaccagaaugcccaggcacugaacacccuggucaagcagcuguccuccaacuucggcgccaucagcucugugcugaacgauauccugagcagacuggacccuccugaggccgaggugcagaucgacagacugaucacaggcagacugcagagccuccagacauacgugacccagcagcugaucagagccgccgagauuagagccucugccaaucuggccgccaccaagaugucugagugugugcugggccagagcaagagaguggacuuuugcggcaagggcuaccaccugaugagcuucccucagucugccccucacggcgugguguuucugcacgugacauaugugcccgcucaagagaagaauuucaccaccgcuccagccaucugccacgacggcaaagcccacuuuccuagagaaggcguguucguguccaacggcacccauugguucgugacacagcggaacuucuacgagccccagaucaucaccaccgacaacaccuucgugucuggcaacugcgacguugugaucggcauugugaacaauaccguguacgacccucugcagcccgagcuggacagcuucaaagaggaacuggacaaguacuuuaagaaccacacaagccccgacguggaccugggcgauaucagcggaaucaaugccagcgucgugaacauccagaaagagaucgaccggcugaacgagguggccaagaaucugaacgagagccugaucgaccugcaagaacuggggaaguacgagcaguacaucaaguggcccugguacaucuggcugggcuuuaucgccggacugauugccaucgugauggucacaaucaugcuguguugcaugaccagcugcuguagcugccugaagggcuguuguagcuguggcagcugcugcaaguucgacgaggacgauucugagcccgugcugaagggcgugaaacugcacuacaccugaggacuagucccuguucccagagcccacuuuuuuuucuuuuuuugaaauaaaauagccugucuuucagaucuaaaaaaaaaaaaaaaaaaaaaaaaaaaaaaaaaaaaaaaaaaaaaaaaaaaaaaaaaaaaaaaaaaaaaaaaaaaaaaaaaaaaaaaaaaaaaaaaaaaa

SEQ ID NO: 24918 - RNA, 4070 nt, Artificial Sequence
  SARS-CoV-2/Wuhan/WIV05/2019__EPI_ISL_402128 spike protein mRNA gc mod (1-1273)(K986P_V987P_D614G_M1229I)
aggagagucccgcagucggcguccagcggcucugcuuguucgugugugugucguugcaggccuuauucaagcuuaccauguucguguuucuggugcugcugccccugguguccagccagugugugaaccugaccaccagaacacagcugccuccagccuacaccaacagcuucaccagaggcguguacuaccccgacaagguguucagauccagcgugcugcacucuacccaggaccuguuccugccuuucuucagcaacgugaccugguuccacgccauccacguguccggcaccaauggcaccaagagauucgacaaccccgugcugcccuucaacgacgggguguacuuugccagcaccgagaaguccaacaucaucagaggcuggaucuucggcaccacacuggacagcaagacccagagccugcugaucgugaacaacgccaccaacguggucaucaaagugugcgaguuccaguucugcaacgaccccuuccugggcgucuacuaccacaagaacaacaagagcuggauggaaagcgaguuccggguguacagcagcgccaacaacugcaccuucgaguacgugucccagccuuuccugauggaccuggaaggcaagcagggcaacuucaagaaccugcgcgaguucguguucaagaacaucgacggcuacuucaaaaucuacagcaagcacaccccuaucaaccucgugcgggaucugccucagggcuucucugcucuggaaccccugguggaucugcccaucggcaucaacaucacccgguuucagacacugcuggcccugcacagaagcuaccugacaccuggcgauagcagcagcggauggacagcuggugccgccgcuuacuaugugggcuaccugcagccuagaaccuuccugcugaaguacaacgagaacggcaccaucaccgacgccguggauugugcucuggauccucugagcgagacaaagugcacccugaaguccuucaccguggaaaagggcaucuaccagaccagcaacuuccgggugcagcccaccgaauccaucgugcgguuccccaauaucaccaaucugugccccuucggcgagguguucaaugccaccagauucgccucuguguacgccuggaaccggaagcggaucagcaauugcguggccgacuacuccgugcuguacaacuccgccagcuucagcaccuucaagugcuacggcguguccccuaccaagcugaacgaccugugcuucacaaacguguacgccgacagcuucgugauccggggagaugaagugcggcagauugccccuggacagacaggcaagaucgccgacuacaacuacaagcugcccgacgacuucaccggcugugugauugccuggaacagcaacaaccuggacuccaaagucggcggcaacuacaauuaccuguaccggcuguuccggaaguccaaucugaagcccuucgagcgggacaucagcaccgaaaucuaucaggccggcagcaccccuugcaacggcguggaaggcuucaacugcuacuucccacugcaguccuacggcuuucagcccacaaauggcgugggcuaucagcccuacagagugguggugcugagcuucgaacugcugcaugcuccugccacagugugcggcccuaagaaaagcaccaaucucgugaagaacaaaugcgugaacuucaacuucaacggccugaccggcaccggcgugcugacagagagcaacaagaaguuccugccauuccagcaguuuggccgggauaucgccgauaccacagacgccguuagagauccccagacacuggaaauccuggacaucaccccaugcagcuucggcggagugucugugaucaccccuggcaccaacaccagcaaucagguggcagugcuguaccagggcgugaacuguaccgaagugcccguggccauucacgccgaucagcugacaccuacauggcggguguacuccaccggcagcaauguguuucagaccagagccggcugucugaucggagccgagcacgugaacaauagcuacgagugcgacauccccaucggcgcuggcaucugugccagcuaccagacacagacaaacagccccagacgggcuagaagcguggccagccagagcaucauugccuacacaaugucucugggcgccgagaacagcguggccuacuccaacaacucuaucgcuauccccaccaacuucaccaucagcgugaccaccgagauccugccuguguccaugaccaagaccagcguggacugcaccauguacaucugcggcgauuccaccgagugcuccaaccugcugcugcaguacggcagcuucugcacccagcugaauagagcccugacagggaucgccguggaacaggacaagaacacccaagagguguucgcccaagugaagcaaaucuacaagaccccuccuaucaaggacuucggcggcuucaauuucagccagauucugcccgauccuagcaagcccagcaagcggagcuucaucgaggaccugcuguucaacaaagugacacuggccgacgccggcuucaucaagcaguauggcgauugucugggcgacauugccgccagggaucugauuugcgcccagaaguuuaacggacugacagugcugccuccucugcugaccgaugagaugaucgcccaguacacaucugcccugcuggccggcacaaucacaagcggcuggacauuuggagcuggcgccgcucugcagauccccuuugcuaugcagauggccuaccgguucaacggcaucggagugacccagaaugugcuguacgagaaccagaagcugaucgccaaccaguucaacagcgccaucggcaagauccaggacagccugagcagcacagcaagcgcccugggaaagcugcaggacguggucaaccagaaugcccaggcacugaacacccuggucaagcagcuguccuccaacuucggcgccaucagcucugugcugaacgauauccugagcagacuggacccuccugaggccgaggugcagaucgacagacugaucacaggcagacugcagagccuccagacauacgugacccagcagcugaucagagccgccgagauuagagccucugccaaucuggccgccaccaagaugucugagugugugcugggccagagcaagagaguggacuuuugcggcaagggcuaccaccugaugagcuucccucagucugccccucacggcgugguguuucugcacgugacauaugugcccgcucaagagaagaauuucaccaccgcuccagccaucugccacgacggcaaagcccacuuuccuagagaaggcguguucguguccaacggcacccauugguucgugacacagcggaacuucuacgagccccagaucaucaccaccgacaacaccuucgugucuggcaacugcgacguugugaucggcauugugaacaauaccguguacgacccucugcagcccgagcuggacagcuucaaagaggaacuggacaaguacuuuaagaaccacacaagccccgacguggaccugggcgauaucagcggaaucaaugccagcgucgugaacauccagaaagagaucgaccggcugaacgagguggccaagaaucugaacgagagccugaucgaccugcaagaacuggggaaguacgagcaguacaucaaguggcccugguacaucuggcugggcuuuaucgccggacugauugccaucgugaucgucacaaucaugcuguguugcaugaccagcugcuguagcugccugaagggcuguuguagcuguggcagcugcugcaaguucgacgaggacgauucugagcccgugcugaagggcgugaaacugcacuacaccugaggacuagucccuguucccagagcccacuuuuuuuucuuuuuuugaaauaaaauagccugucuuucagaucuaaaaaaaaaaaaaaaaaaaaaaaaaaaaaaaaaaaaaaaaaaaaaaaaaaaaaaaaaaaaaaaaaaaaaaaaaaaaaaaaaaaaaaaaaaaaaaaaaaaa

SEQ ID NO: 24919 - RNA, 4064 nt, Artificial Sequence
  SARS-CoV-2/Wuhan/WIV05/2019__EPI_ISL_402128 spike protein mRNA gc mod (1-1273)(K986P_V987P_H69del_V70del_A222V_Y453F_S477N_D614G_I692V)
aggagagucccgcagucggcguccagcggcucugcuuguucgugugugugucguugcaggccuuauucaagcuuaccauguucguguuucuggugcugcugccccugguguccagccagugugugaaccugaccaccagaacacagcugccuccagccuacaccaacagcuucaccagaggcguguacuaccccgacaagguguucagauccagcgugcugcacucuacccaggaccuguuccugccuuucuucagcaacgugaccugguuccacgccaucuccggcaccaauggcaccaagagauucgacaaccccgugcugcccuucaacgacgggguguacuuugccagcaccgagaaguccaacaucaucagaggcuggaucuucggcaccacacuggacagcaagacccagagccugcugaucgugaacaacgccaccaacguggucaucaaagugugcgaguuccaguucugcaacgaccccuuccugggcgucuacuaccacaagaacaacaagagcuggauggaaagcgaguuccggguguacagcagcgccaacaacugcaccuucgaguacgugucccagccuuuccugauggaccuggaaggcaagcagggcaacuucaagaaccugcgcgaguucguguucaagaacaucgacggcuacuucaaaaucuacagcaagcacaccccuaucaaccucgugcgggaucugccucagggcuucucugugcuggaaccccugguggaucugcccaucggcaucaacaucacccgguuucagacacugcuggcccugcacagaagcuaccugacaccuggcgauagcagcagcggauggacagcuggugccgccgcuuacuaugugggcuaccugcagccuagaaccuuccugcugaaguacaacgagaacggcaccaucaccgacgccguggauugugcucuggauccucugagcgagacaaagugcacccugaaguccuucaccguggaaaagggcaucuaccagaccagcaacuuccgggugcagcccaccgaauccaucgugcgguuccccaauaucaccaaucugugccccuucggcgagguguucaaugccaccagauucgccucuguguacgccuggaaccggaagcggaucagcaauugcguggccgacuacuccgugcuguacaacuccgccagcuucagcaccuucaagugcuacggcguguccccuaccaagcugaacgaccugugcuucacaaacguguacgccgacagcuucgugauccggggagaugaagugcggcagauugccccuggacagacaggcaagaucgccgacuacaacuacaagcugcccgacgacuucaccggcugugugauugccuggaacagcaacaaccuggacuccaaagucggcggcaacuacaauuaccuguuccggcuguuccggaaguccaaucugaagcccuucgagcgggacaucagcaccgaaaucuaucaggccggcaacaccccuugcaacggcguggaaggcuucaacugcuacuucccacugcaguccuacggcuuucagcccacaaauggcgugggcuaucagcccuacagagugguggugcugagcuucgaacugcugcaugcuccugccacagugugcggcccuaagaaaagcaccaaucucgugaagaacaaaugcgugaacuucaacuucaacggccugaccggcaccggcgugcugacagagagcaacaagaaguuccugccauuccagcaguuuggccgggauaucgccgauaccacagacgccguuagagauccccagacacuggaaauccuggacaucaccccaugcagcuucggcggagugucugugaucaccccuggcaccaacaccagcaaucagguggcagugcuguaccagggcgugaacuguaccgaagugcccguggccauucacgccgaucagcugacaccuacauggcggguguacuccaccggcagcaauguguuucagaccagagccggcugucugaucggagccgagcacgugaacaauagcuacgagugcgacauccccaucggcgcuggcaucugugccagcuaccagacacagacaaacagccccagacgggcuagaagcguggccagccagagcgugauugccuacacaaugucucugggcgccgagaacagcguggccuacuccaacaacucuaucgcuauccccaccaacuucaccaucagcgugaccaccgagauccugccuguguccaugaccaagaccagcguggacugcaccauguacaucugcggcgauuccaccgagugcuccaaccugcugcugcaguacggcagcuucugcacccagcugaauagagcccugacagggaucgccguggaacaggacaagaacacccaagagguguucgcccaagugaagcaaaucuacaagaccccuccuaucaaggacuucggcggcuucaauuucagccagauucugcccgauccuagcaagcccagcaagcggagcuucaucgaggaccugcuguucaacaaagugacacuggccgacgccggcuucaucaagcaguauggcgauugucugggcgacauugccgccagggaucugauuugcgcccagaaguuuaacggacugacagugcugccuccucugcugaccgaugagaugaucgcccaguacacaucugcccugcuggccggcacaaucacaagcggcuggacauuuggagcuggcgccgcucugcagauccccuuugcuaugcagauggccuaccgguucaacggcaucggagugacccagaaugugcuguacgagaaccagaagcugaucgccaaccaguucaacagcgccaucggcaagauccaggacagccugagcagcacagcaagcgcccugggaaagcugcaggacguggucaaccagaaugcccaggcacugaacacccuggucaagcagcuguccuccaacuucggcgccaucagcucugugcugaacgauauccugagcagacuggacccuccugaggccgaggugcagaucgacagacugaucacaggcagacugcagagccuccagacauacgugacccagcagcugaucagagccgccgagauuagagccucugccaaucuggccgccaccaagaugucugagugugugcugggccagagcaagagaguggacuuuugcggcaagggcuaccaccugaugagcuucccucagucugccccucacggcgugguguuucugcacgugacauaugugcccgcucaagagaagaauuucaccaccgcuccagccaucugccacgacggcaaagcccacuuuccuagagaaggcguguucguguccaacggcacccauugguucgugacacagcggaacuucuacgagccccagaucaucaccaccgacaacaccuucgugucuggcaacugcgacguugugaucggcauugugaacaauaccguguacgacccucugcagcccgagcuggacagcuucaaagaggaacuggacaaguacuuuaagaaccacacaagccccgacguggaccugggcgauaucagcggaaucaaugccagcgucgugaacauccagaaagagaucgaccggcugaacgagguggccaagaaucugaacgagagccugaucgaccugcaagaacuggggaaguacgagcaguacaucaaguggcccugguacaucuggcugggcuuuaucgccggacugauugccaucgugauggucacaaucaugcuguguugcaugaccagcugcuguagcugccugaagggcuguuguagcuguggcagcugcugcaaguucgacgaggacgauucugagcccgugcugaagggcgugaaacugcacuacaccugaggacuagucccuguucccagagcccacuuuuuuuucuuuuuuugaaauaaaauagccugucuuucagaucuaaaaaaaaaaaaaaaaaaaaaaaaaaaaaaaaaaaaaaaaaaaaaaaaaaaaaaaaaaaaaaaaaaaaaaaaaaaaaaaaaaaaaaaaaaaaaaaaaaaa

SEQ ID NO: 24920 - RNA, 4064 nt, Artificial Sequence
  SARS-CoV-2/Wuhan/WIV05/2019__EPI_ISL_402128 spike protein mRNA gc mod (1-1273)(K986P_V987P_H69del_V70del_Y453F_D614G_I692V_M1229I)
aggagagucccgcagucggcguccagcggcucugcuuguucgugugugugucguugcaggccuuauucaagcuuaccauguucguguuucuggugcugcugccccugguguccagccagugugugaaccugaccaccagaacacagcugccuccagccuacaccaacagcuucaccagaggcguguacuaccccgacaagguguucagauccagcgugcugcacucuacccaggaccuguuccugccuuucuucagcaacgugaccugguuccacgccaucuccggcaccaauggcaccaagagauucgacaaccccgugcugcccuucaacgacgggguguacuuugccagcaccgagaaguccaacaucaucagaggcuggaucuucggcaccacacuggacagcaagacccagagccugcugaucgugaacaacgccaccaacguggucaucaaagugugcgaguuccaguucugcaacgaccccuuccugggcgucuacuaccacaagaacaacaagagcuggauggaaagcgaguuccggguguacagcagcgccaacaacugcaccuucgaguacgugucccagccuuuccugauggaccuggaaggcaagcagggcaacuucaagaaccugcgcgaguucguguucaagaacaucgacggcuacuucaaaaucuacagcaagcacaccccuaucaaccucgugcgggaucugccucagggcuucucugcucuggaaccccugguggaucugcccaucggcaucaacaucacccgguuucagacacugcuggcccugcacagaagcuaccugacaccuggcgauagcagcagcggauggacagcuggugccgccgcuuacuaugugggcuaccugcagccuagaaccuuccugcugaaguacaacgagaacggcaccaucaccgacgccguggauugugcucuggauccucugagcgagacaaagugcacccugaaguccuucaccguggaaaagggcaucuaccagaccagcaacuuccgggugcagcccaccgaauccaucgugcgguuccccaauaucaccaaucugugccccuucggcgagguguucaaugccaccagauucgccucuguguacgccuggaaccggaagcggaucagcaauugcguggccgacuacuccgugcuguacaacuccgccagcuucagcaccuucaagugcuacggcguguccccuaccaagcugaacgaccugugcuucacaaacguguacgccgacagcuucgugauccggggagaugaagugcggcagauugccccuggacagacaggcaagaucgccgacuacaacuacaagcugcccgacgacuucaccggcugugugauugccuggaacagcaacaaccuggacuccaaagucggcggcaacuacaauuaccuguuccggcuguuccggaaguccaaucugaagcccuucgagcgggacaucagcaccgaaaucuaucaggccggcagcaccccuugcaacggcguggaaggcuucaacugcuacuucccacugcaguccuacggcuuucagcccacaaauggcgugggcuaucagcccuacagagugguggugcugagcuucgaacugcugcaugcuccugccacagugugcggcccuaagaaaagcaccaaucucgugaagaacaaaugcgugaacuucaacuucaacggccugaccggcaccggcgugcugacagagagcaacaagaaguuccugccauuccagcaguuuggccgggauaucgccgauaccacagacgccguuagagauccccagacacuggaaauccuggacaucaccccaugcagcuucggcggagugucugugaucaccccuggcaccaacaccagcaaucagguggcagugcuguaccagggcgugaacuguaccgaagugcccguggccauucacgccgaucagcugacaccuacauggcggguguacuccaccggcagcaauguguuucagaccagagccggcugucugaucggagccgagcacgugaacaauagcuacgagugcgacauccccaucggcgcuggcaucugugccagcuaccagacacagacaaacagccccagacgggcuagaagcguggccagccagagcgugauugccuacacaaugucucugggcgccgagaacagcguggccuacuccaacaacucuaucgcuauccccaccaacuucaccaucagcgugaccaccgagauccugccuguguccaugaccaagaccagcguggacugcaccauguacaucugcggcgauuccaccgagugcuccaaccugcugcugcaguacggcagcuucugcacccagcugaauagagcccugacagggaucgccguggaacaggacaagaacacccaagagguguucgcccaagugaagcaaaucuacaagaccccuccuaucaaggacuucggcggcuucaauuucagccagauucugcccgauccuagcaagcccagcaagcggagcuucaucgaggaccugcuguucaacaaagugacacuggccgacgccggcuucaucaagcaguauggcgauugucugggcgacauugccgccagggaucugauuugcgcccagaaguuuaacggacugacagugcugccuccucugcugaccgaugagaugaucgcccaguacacaucugcccugcuggccggcacaaucacaagcggcuggacauuuggagcuggcgccgcucugcagauccccuuugcuaugcagauggccuaccgguucaacggcaucggagugacccagaaugugcuguacgagaaccagaagcugaucgccaaccaguucaacagcgccaucggcaagauccaggacagccugagcagcacagcaagcgcccugggaaagcugcaggacguggucaaccagaaugcccaggcacugaacacccuggucaagcagcuguccuccaacuucggcgccaucagcucugugcugaacgauauccugagcagacuggacccuccugaggccgaggugcagaucgacagacugaucacaggcagacugcagagccuccagacauacgugacccagcagcugaucagagccgccgagauuagagccucugccaaucuggccgccaccaagaugucugagugugugcugggccagagcaagagaguggacuuuugcggcaagggcuaccaccugaugagcuucccucagucugccccucacggcgugguguuucugcacgugacauaugugcccgcucaagagaagaauuucaccaccgcuccagccaucugccacgacggcaaagcccacuuuccuagagaaggcguguucguguccaacggcacccauugguucgugacacagcggaacuucuacgagccccagaucaucaccaccgacaacaccuucgugucuggcaacugcgacguugugaucggcauugugaacaauaccguguacgacccucugcagcccgagcuggacagcuucaaagaggaacuggacaaguacuuuaagaaccacacaagccccgacguggaccugggcgauaucagcggaaucaaugccagcgucgugaacauccagaaagagaucgaccggcugaacgagguggccaagaaucugaacgagagccugaucgaccugcaagaacuggggaaguacgagcaguacaucaaguggcccugguacaucuggcugggcuuuaucgccggacugauugccaucgugaucgucacaaucaugcuguguugcaugaccagcugcuguagcugccugaagggcuguuguagcuguggcagcugcugcaaguucgacgaggacgauucugagcccgugcugaagggcgugaaacugcacuacaccugaggacuagucccuguucccagagcccacuuuuuuuucuuuuuuugaaauaaaauagccugucuuucagaucuaaaaaaaaaaaaaaaaaaaaaaaaaaaaaaaaaaaaaaaaaaaaaaaaaaaaaaaaaaaaaaaaaaaaaaaaaaaaaaaaaaaaaaaaaaaaaaaaaaaa

SEQ ID NO: 24921 - RNA, 4061 nt, Artificial Sequence
  SARS-CoV-2/Wuhan/WIV05/2019__EPI_ISL_402128 spike protein mRNA gc mod (1-1273)(K986P_V987P_K986P_V987P_H69del_V70del_Y144del_N501Y_A570 D_D614G_P681H_T716I_S982A_D1118H)
aggagagucccgcagucggcguccagcggcucugcuuguucgugugugugucguugcaggccuuauucaagcuuaccauguucguguuucuggugcugcugccccugguguccagccagugugugaaccugaccaccagaacacagcugccuccagccuacaccaacagcuucaccagaggcguguacuaccccgacaagguguucagauccagcgugcugcacucuacccaggaccuguuccugccuuucuucagcaacgugaccugguuccacgccaucuccggcaccaauggcaccaagagauucgacaaccccgugcugcccuucaacgacgggguguacuuugccagcaccgagaaguccaacaucaucagaggcuggaucuucggcaccacacuggacagcaagacccagagccugcugaucgugaacaacgccaccaacguggucaucaaagugugcgaguuccaguucugcaacgaccccuuccugggcgucuaccacaagaacaacaagagcuggauggaaagcgaguuccggguguacagcagcgccaacaacugcaccuucgaguacgugucccagccuuuccugauggaccuggaaggcaagcagggcaacuucaagaaccugcgcgaguucguguucaagaacaucgacggcuacuucaaaaucuacagcaagcacaccccuaucaaccucgugcgggaucugccucagggcuucucugcucuggaaccccugguggaucugcccaucggcaucaacaucacccgguuucagacacugcuggcccugcacagaagcuaccugacaccuggcgauagcagcagcggauggacagcuggugccgccgcuuacuaugugggcuaccugcagccuagaaccuuccugcugaaguacaacgagaacggcaccaucaccgacgccguggauugugcucuggauccucugagcgagacaaagugcacccugaaguccuucaccguggaaaagggcaucuaccagaccagcaacuuccgggugcagcccaccgaauccaucgugcgguuccccaauaucaccaaucugugccccuucggcgagguguucaaugccaccagauucgccucuguguacgccuggaaccggaagcggaucagcaauugcguggccgacuacuccgugcuguacaacuccgccagcuucagcaccuucaagugcuacggcguguccccuaccaagcugaacgaccugugcuucacaaacguguacgccgacagcuucgugauccggggagaugaagugcggcagauugccccuggacagacaggcaagaucgccgacuacaacuacaagcugcccgacgacuucaccggcugugugauugccuggaacagcaacaaccuggacuccaaagucggcggcaacuacaauuaccuguaccggcuguuccggaaguccaaucugaagcccuucgagcgggacaucagcaccgaaaucuaucaggccggcagcaccccuugcaacggcguggaaggcuucaacugcuacuucccacugcaguccuacggcuuucagcccacauacggcgugggcuaucagcccuacagagugguggugcugagcuucgaacugcugcaugcuccugccacagugugcggcccuaagaaaagcaccaaucucgugaagaacaaaugcgugaacuucaacuucaacggccugaccggcaccggcgugcugacagagagcaacaagaaguuccugccauuccagcaguuuggccgggauaucgacgauaccacagacgccguuagagauccccagacacuggaaauccuggacaucaccccaugcagcuucggcggagugucugugaucaccccuggcaccaacaccagcaaucagguggcagugcuguaccagggcgugaacuguaccgaagugcccguggccauucacgccgaucagcugacaccuacauggcggguguacuccaccggcagcaauguguuucagaccagagccggcugucugaucggagccgagcacgugaacaauagcuacgagugcgacauccccaucggcgcuggcaucugugccagcuaccagacacagacaaacagccacagacgggcuagaagcguggccagccagagcaucauugccuacacaaugucucugggcgccgagaacagcguggccuacuccaacaacucuaucgcuauccccaucaacuucaccaucagcgugaccaccgagauccugccuguguccaugaccaagaccagcguggacugcaccauguacaucugcggcgauuccaccgagugcuccaaccugcugcugcaguacggcagcuucugcacccagcugaauagagcccugacagggaucgccguggaacaggacaagaacacccaagagguguucgcccaagugaagcaaaucuacaagaccccuccuaucaaggacuucggcggcuucaauuucagccagauucugcccgauccuagcaagcccagcaagcggagcuucaucgaggaccugcuguucaacaaagugacacuggccgacgccggcuucaucaagcaguauggcgauugucugggcgacauugccgccagggaucugauuugcgcccagaaguuuaacggacugacagugcugccuccucugcugaccgaugagaugaucgcccaguacacaucugcccugcuggccggcacaaucacaagcggcuggacauuuggagcuggcgccgcucugcagauccccuuugcuaugcagauggccuaccgguucaacggcaucggagugacccagaaugugcuguacgagaaccagaagcugaucgccaaccaguucaacagcgccaucggcaagauccaggacagccugagcagcacagcaagcgcccugggaaagcugcaggacguggucaaccagaaugcccaggcacugaacacccuggucaagcagcuguccuccaacuucggcgccaucagcucugugcugaacgauauccuggccagacuggacccuccugaggccgaggugcagaucgacagacugaucacaggcagacugcagagccuccagacauacgugacccagcagcugaucagagccgccgagauuagagccucugccaaucuggccgccaccaagaugucugagugugugcugggccagagcaagagaguggacuuuugcggcaagggcuaccaccugaugagcuucccucagucugccccucacggcgugguguuucugcacgugacauaugugcccgcucaagagaagaauuucaccaccgcuccagccaucugccacgacggcaaagcccacuuuccuagagaaggcguguucguguccaacggcacccauugguucgugacacagcggaacuucuacgagccccagaucaucaccacccacaacaccuucgugucuggcaacugcgacguugugaucggcauugugaacaauaccguguacgacccucugcagcccgagcuggacagcuucaaagaggaacuggacaaguacuuuaagaaccacacaagccccgacguggaccugggcgauaucagcggaaucaaugccagcgucgugaacauccagaaagagaucgaccggcugaacgagguggccaagaaucugaacgagagccugaucgaccugcaagaacuggggaaguacgagcaguacaucaaguggcccugguacaucuggcugggcuuuaucgccggacugauugccaucgugauggucacaaucaugcuguguugcaugaccagcugcuguagcugccugaagggcuguuguagcuguggcagcugcugcaaguucgacgaggacgauucugagcccgugcugaagggcgugaaacugcacuacaccugaggacuagucccuguucccagagcccacuuuuuuuucuuuuuuugaaauaaaauagccugucuuucagaucuaaaaaaaaaaaaaaaaaaaaaaaaaaaaaaaaaaaaaaaaaaaaaaaaaaaaaaaaaaaaaaaaaaaaaaaaaaaaaaaaaaaaaaaaaaaaaaaaaaaa

SEQ ID NO: 24922 - RNA, 4070 nt, Artificial Sequence
  SARS-CoV-2/Wuhan/WIV05/2019__EPI_ISL_402128 spike protein mRNA gc mod (1-1273)(K986P_V987P_K986P_V987P_K417N_E484K_N501Y_D614G)
aggagagucccgcagucggcguccagcggcucugcuuguucgugugugugucguugcaggccuuauucaagcuuaccauguucguguuucuggugcugcugccccugguguccagccagugugugaaccugaccaccagaacacagcugccuccagccuacaccaacagcuucaccagaggcguguacuaccccgacaagguguucagauccagcgugcugcacucuacccaggaccuguuccugccuuucuucagcaacgugaccugguuccacgccauccacguguccggcaccaauggcaccaagagauucgacaaccccgugcugcccuucaacgacgggguguacuuugccagcaccgagaaguccaacaucaucagaggcuggaucuucggcaccacacuggacagcaagacccagagccugcugaucgugaacaacgccaccaacguggucaucaaagugugcgaguuccaguucugcaacgaccccuuccugggcgucuacuaccacaagaacaacaagagcuggauggaaagcgaguuccggguguacagcagcgccaacaacugcaccuucgaguacgugucccagccuuuccugauggaccuggaaggcaagcagggcaacuucaagaaccugcgcgaguucguguucaagaacaucgacggcuacuucaaaaucuacagcaagcacaccccuaucaaccucgugcgggaucugccucagggcuucucugcucuggaaccccugguggaucugcccaucggcaucaacaucacccgguuucagacacugcuggcccugcacagaagcuaccugacaccuggcgauagcagcagcggauggacagcuggugccgccgcuuacuaugugggcuaccugcagccuagaaccuuccugcugaaguacaacgagaacggcaccaucaccgacgccguggauugugcucuggauccucugagcgagacaaagugcacccugaaguccuucaccguggaaaagggcaucuaccagaccagcaacuuccgggugcagcccaccgaauccaucgugcgguuccccaauaucaccaaucugugccccuucggcgagguguucaaugccaccagauucgccucuguguacgccuggaaccggaagcggaucagcaauugcguggccgacuacuccgugcuguacaacuccgccagcuucagcaccuucaagugcuacggcguguccccuaccaagcugaacgaccugugcuucacaaacguguacgccgacagcuucgugauccggggagaugaagugcggcagauugccccuggacagacaggcaacaucgccgacuacaacuacaagcugcccgacgacuucaccggcugugugauugccuggaacagcaacaaccuggacuccaaagucggcggcaacuacaauuaccuguaccggcuguuccggaaguccaaucugaagcccuucgagcgggacaucagcaccgaaaucuaucaggccggcagcaccccuugcaacggcgugaagggcuucaacugcuacuucccacugcaguccuacggcuuucagcccacauacggcgugggcuaucagcccuacagagugguggugcugagcuucgaacugcugcaugcuccugccacagugugcggcccuaagaaaagcaccaaucucgugaagaacaaaugcgugaacuucaacuucaacggccugaccggcaccggcgugcugacagagagcaacaagaaguuccugccauuccagcaguuuggccgggauaucgccgauaccacagacgccguuagagauccccagacacuggaaauccuggacaucaccccaugcagcuucggcggagugucugugaucaccccuggcaccaacaccagcaaucagguggcagugcuguaccagggcgugaacuguaccgaagugcccguggccauucacgccgaucagcugacaccuacauggcggguguacuccaccggcagcaauguguuucagaccagagccggcugucugaucggagccgagcacgugaacaauagcuacgagugcgacauccccaucggcgcuggcaucugugccagcuaccagacacagacaaacagccccagacgggcuagaagcguggccagccagagcaucauugccuacacaaugucucugggcgccgagaacagcguggccuacuccaacaacucuaucgcuauccccaccaacuucaccaucagcgugaccaccgagauccugccuguguccaugaccaagaccagcguggacugcaccauguacaucugcggcgauuccaccgagugcuccaaccugcugcugcaguacggcagcuucugcacccagcugaauagagcccugacagggaucgccguggaacaggacaagaacacccaagagguguucgcccaagugaagcaaaucuacaagaccccuccuaucaaggacuucggcggcuucaauuucagccagauucugcccgauccuagcaagcccagcaagcggagcuucaucgaggaccugcuguucaacaaagugacacuggccgacgccggcuucaucaagcaguauggcgauugucugggcgacauugccgccagggaucugauuugcgcccagaaguuuaacggacugacagugcugccuccucugcugaccgaugagaugaucgcccaguacacaucugcccugcuggccggcacaaucacaagcggcuggacauuuggagcuggcgccgcucugcagauccccuuugcuaugcagauggccuaccgguucaacggcaucggagugacccagaaugugcuguacgagaaccagaagcugaucgccaaccaguucaacagcgccaucggcaagauccaggacagccugagcagcacagcaagcgcccugggaaagcugcaggacguggucaaccagaaugcccaggcacugaacacccuggucaagcagcuguccuccaacuucggcgccaucagcucugugcugaacgauauccugagcagacuggacccuccugaggccgaggugcagaucgacagacugaucacaggcagacugcagagccuccagacauacgugacccagcagcugaucagagccgccgagauuagagccucugccaaucuggccgccaccaagaugucugagugugugcugggccagagcaagagaguggacuuuugcggcaagggcuaccaccugaugagcuucccucagucugccccucacggcgugguguuucugcacgugacauaugugcccgcucaagagaagaauuucaccaccgcuccagccaucugccacgacggcaaagcccacuuuccuagagaaggcguguucguguccaacggcacccauugguucgugacacagcggaacuucuacgagccccagaucaucaccaccgacaacaccuucgugucuggcaacugcgacguugugaucggcauugugaacaauaccguguacgacccucugcagcccgagcuggacagcuucaaagaggaacuggacaaguacuuuaagaaccacacaagccccgacguggaccugggcgauaucagcggaaucaaugccagcgucgugaacauccagaaagagaucgaccggcugaacgagguggccaagaaucugaacgagagccugaucgaccugcaagaacuggggaaguacgagcaguacaucaaguggcccugguacaucuggcugggcuuuaucgccggacugauugccaucgugauggucacaaucaugcuguguugcaugaccagcugcuguagcugccugaagggcuguuguagcuguggcagcugcugcaaguucgacgaggacgauucugagcccgugcugaagggcgugaaacugcacuacaccugaggacuagucccuguucccagagcccacuuuuuuuucuuuuuuugaaauaaaauagccugucuuucagaucuaaaaaaaaaaaaaaaaaaaaaaaaaaaaaaaaaaaaaaaaaaaaaaaaaaaaaaaaaaaaaaaaaaaaaaaaaaaaaaaaaaaaaaaaaaaaaaaaaaaa

SEQ ID NO: 24923 - RNA, 4061 nt, Artificial Sequence
  SARS-CoV-2/Wuhan/WIV05/2019__EPI_ISL_402128 spike protein mRNA gc mod (1-1273)(K986P_V987P_K986P_V987P_L18F_D80A_D215G_L242del_A243del_ L244del_R246I_K417N_E484K_N501Y_D614G_A701V)
aggagagucccgcagucggcguccagcggcucugcuuguucgugugugugucguugcaggccuuauucaagcuuaccauguucguguuucuggugcugcugccccugguguccagccagugugugaacuucaccaccagaacacagcugccuccagccuacaccaacagcuucaccagaggcguguacuaccccgacaagguguucagauccagcgugcugcacucuacccaggaccuguuccugccuuucuucagcaacgugaccugguuccacgccauccacguguccggcaccaauggcaccaagagauucgccaaccccgugcugcccuucaacgacgggguguacuuugccagcaccgagaaguccaacaucaucagaggcuggaucuucggcaccacacuggacagcaagacccagagccugcugaucgugaacaacgccaccaacguggucaucaaagugugcgaguuccaguucugcaacgaccccuuccugggcgucuacuaccacaagaacaacaagagcuggauggaaagcgaguuccggguguacagcagcgccaacaacugcaccuucgaguacgugucccagccuuuccugauggaccuggaaggcaagcagggcaacuucaagaaccugcgcgaguucguguucaagaacaucgacggcuacuucaaaaucuacagcaagcacaccccuaucaaccucgugcggggccugccucagggcuucucugcucuggaaccccugguggaucugcccaucggcaucaacaucacccgguuucagacacugcacaucagcuaccugacaccuggcgauagcagcagcggauggacagcuggugccgccgcuuacuaugugggcuaccugcagccuagaaccuuccugcugaaguacaacgagaacggcaccaucaccgacgccguggauugugcucuggauccucugagcgagacaaagugcacccugaaguccuucaccguggaaaagggcaucuaccagaccagcaacuuccgggugcagcccaccgaauccaucgugcgguuccccaauaucaccaaucugugccccuucggcgagguguucaaugccaccagauucgccucuguguacgccuggaaccggaagcggaucagcaauugcguggccgacuacuccgugcuguacaacuccgccagcuucagcaccuucaagugcuacggcguguccccuaccaagcugaacgaccugugcuucacaaacguguacgccgacagcuucgugauccggggagaugaagugcggcagauugccccuggacagacaggcaacaucgccgacuacaacuacaagcugcccgacgacuucaccggcugugugauugccuggaacagcaacaaccuggacuccaaagucggcggcaacuacaauuaccuguaccggcuguuccggaaguccaaucugaagcccuucgagcgggacaucagcaccgaaaucuaucaggccggcagcaccccuugcaacggcgugaagggcuucaacugcuacuucccacugcaguccuacggcuuucagcccacauacggcgugggcuaucagcccuacagagugguggugcugagcuucgaacugcugcaugcuccugccacagugugcggcccuaagaaaagcaccaaucucgugaagaacaaaugcgugaacuucaacuucaacggccugaccggcaccggcgugcugacagagagcaacaagaaguuccugccauuccagcaguuuggccgggauaucgccgauaccacagacgccguuagagauccccagacacuggaaauccuggacaucaccccaugcagcuucggcggagugucugugaucaccccuggcaccaacaccagcaaucagguggcagugcuguaccagggcgugaacuguaccgaagugcccguggccauucacgccgaucagcugacaccuacauggcggguguacuccaccggcagcaauguguuucagaccagagccggcugucugaucggagccgagcacgugaacaauagcuacgagugcgacauccccaucggcgcuggcaucugugccagcuaccagacacagacaaacagccccagacgggcuagaagcguggccagccagagcaucauugccuacacaaugucucugggcguggagaacagcguggccuacuccaacaacucuaucgcuauccccaccaacuucaccaucagcgugaccaccgagauccugccuguguccaugaccaagaccagcguggacugcaccauguacaucugcggcgauuccaccgagugcuccaaccugcugcugcaguacggcagcuucugcacccagcugaauagagcccugacagggaucgccguggaacaggacaagaacacccaagagguguucgcccaagugaagcaaaucuacaagaccccuccuaucaaggacuucggcggcuucaauuucagccagauucugcccgauccuagcaagcccagcaagcggagcuucaucgaggaccugcuguucaacaaagugacacuggccgacgccggcuucaucaagcaguauggcgauugucugggcgacauugccgccagggaucugauuugcgcccagaaguuuaacggacugacagugcugccuccucugcugaccgaugagaugaucgcccaguacacaucugcccugcuggccggcacaaucacaagcggcuggacauuuggagcuggcgccgcucugcagauccccuuugcuaugcagauggccuaccgguucaacggcaucggagugacccagaaugugcuguacgagaaccagaagcugaucgccaaccaguucaacagcgccaucggcaagauccaggacagccugagcagcacagcaagcgcccugggaaagcugcaggacguggucaaccagaaugcccaggcacugaacacccuggucaagcagcuguccuccaacuucggcgccaucagcucugugcugaacgauauccugagcagacuggacccuccugaggccgaggugcagaucgacagacugaucacaggcagacugcagagccuccagacauacgugacccagcagcugaucagagccgccgagauuagagccucugccaaucuggccgccaccaagaugucugagugugugcugggccagagcaagagaguggacuuuugcggcaagggcuaccaccugaugagcuucccucagucugccccucacggcgugguguuucugcacgugacauaugugcccgcucaagagaagaauuucaccaccgcuccagccaucugccacgacggcaaagcccacuuuccuagagaaggcguguucguguccaacggcacccauugguucgugacacagcggaacuucuacgagccccagaucaucaccaccgacaacaccuucgugucuggcaacugcgacguugugaucggcauugugaacaauaccguguacgacccucugcagcccgagcuggacagcuucaaagaggaacuggacaaguacuuuaagaaccacacaagccccgacguggaccugggcgauaucagcggaaucaaugccagcgucgugaacauccagaaagagaucgaccggcugaacgagguggccaagaaucugaacgagagccugaucgaccugcaagaacuggggaaguacgagcaguacaucaaguggcccugguacaucuggcugggcuuuaucgccggacugauugccaucgugauggucacaaucaugcuguguugcaugaccagcugcuguagcugccugaagggcuguuguagcuguggcagcugcugcaaguucgacgaggacgauucugagcccgugcugaagggcgugaaacugcacuacaccugaggacuagucccuguucccagagcccacuuuuuuuucuuuuuuugaaauaaaauagccugucuuucagaucuaaaaaaaaaaaaaaaaaaaaaaaaaaaaaaaaaaaaaaaaaaaaaaaaaaaaaaaaaaaaaaaaaaaaaaaaaaaaaaaaaaaaaaaaaaaaaaaaaaaa

SEQ ID NO: 24924 - RNA, 4070 nt, Artificial Sequence
  SARS-CoV-2/Wuhan/WIV05/2019__EPI_ISL_402128 spike protein mRNA gc mod (1-1273)(K986P_V987P_K986P_V987P_E484K_D614G)
aggagagucccgcagucggcguccagcggcucugcuuguucgugugugugucguugcaggccuuauucaagcuuaccauguucguguuucuggugcugcugccccugguguccagccagugugugaaccugaccaccagaacacagcugccuccagccuacaccaacagcuucaccagaggcguguacuaccccgacaagguguucagauccagcgugcugcacucuacccaggaccuguuccugccuuucuucagcaacgugaccugguuccacgccauccacguguccggcaccaauggcaccaagagauucgacaaccccgugcugcccuucaacgacgggguguacuuugccagcaccgagaaguccaacaucaucagaggcuggaucuucggcaccacacuggacagcaagacccagagccugcugaucgugaacaacgccaccaacguggucaucaaagugugcgaguuccaguucugcaacgaccccuuccugggcgucuacuaccacaagaacaacaagagcuggauggaaagcgaguuccggguguacagcagcgccaacaacugcaccuucgaguacgugucccagccuuuccugauggaccuggaaggcaagcagggcaacuucaagaaccugcgcgaguucguguucaagaacaucgacggcuacuucaaaaucuacagcaagcacaccccuaucaaccucgugcgggaucugccucagggcuucucugcucuggaaccccugguggaucugcccaucggcaucaacaucacccgguuucagacacugcuggcccugcacagaagcuaccugacaccuggcgauagcagcagcggauggacagcuggugccgccgcuuacuaugugggcuaccugcagccuagaaccuuccugcugaaguacaacgagaacggcaccaucaccgacgccguggauugugcucuggauccucugagcgagacaaagugcacccugaaguccuucaccguggaaaagggcaucuaccagaccagcaacuuccgggugcagcccaccgaauccaucgugcgguuccccaauaucaccaaucugugccccuucggcgagguguucaaugccaccagauucgccucuguguacgccuggaaccggaagcggaucagcaauugcguggccgacuacuccgugcuguacaacuccgccagcuucagcaccuucaagugcuacggcguguccccuaccaagcugaacgaccugugcuucacaaacguguacgccgacagcuucgugauccggggagaugaagugcggcagauugccccuggacagacaggcaagaucgccgacuacaacuacaagcugcccgacgacuucaccggcugugugauugccuggaacagcaacaaccuggacuccaaagucggcggcaacuacaauuaccuguaccggcuguuccggaaguccaaucugaagcccuucgagcgggacaucagcaccgaaaucuaucaggccggcagcaccccuugcaacggcgugaagggcuucaacugcuacuucccacugcaguccuacggcuuucagcccacaaauggcgugggcuaucagcccuacagagugguggugcugagcuucgaacugcugcaugcuccugccacagugugcggcccuaagaaaagcaccaaucucgugaagaacaaaugcgugaacuucaacuucaacggccugaccggcaccggcgugcugacagagagcaacaagaaguuccugccauuccagcaguuuggccgggauaucgccgauaccacagacgccguuagagauccccagacacuggaaauccuggacaucaccccaugcagcuucggcggagugucugugaucaccccuggcaccaacaccagcaaucagguggcagugcuguaccagggcgugaacuguaccgaagugcccguggccauucacgccgaucagcugacaccuacauggcggguguacuccaccggcagcaauguguuucagaccagagccggcugucugaucggagccgagcacgugaacaauagcuacgagugcgacauccccaucggcgcuggcaucugugccagcuaccagacacagacaaacagccccagacgggcuagaagcguggccagccagagcaucauugccuacacaaugucucugggcgccgagaacagcguggccuacuccaacaacucuaucgcuauccccaccaacuucaccaucagcgugaccaccgagauccugccuguguccaugaccaagaccagcguggacugcaccauguacaucugcggcgauuccaccgagugcuccaaccugcugcugcaguacggcagcuucugcacccagcugaauagagcccugacagggaucgccguggaacaggacaagaacacccaagagguguucgcccaagugaagcaaaucuacaagaccccuccuaucaaggacuucggcggcuucaauuucagccagauucugcccgauccuagcaagcccagcaagcggagcuucaucgaggaccugcuguucaacaaagugacacuggccgacgccggcuucaucaagcaguauggcgauugucugggcgacauugccgccagggaucugauuugcgcccagaaguuuaacggacugacagugcugccuccucugcugaccgaugagaugaucgcccaguacacaucugcccugcuggccggcacaaucacaagcggcuggacauuuggagcuggcgccgcucugcagauccccuuugcuaugcagauggccuaccgguucaacggcaucggagugacccagaaugugcuguacgagaaccagaagcugaucgccaaccaguucaacagcgccaucggcaagauccaggacagccugagcagcacagcaagcgcccugggaaagcugcaggacguggucaaccagaaugcccaggcacugaacacccuggucaagcagcuguccuccaacuucggcgccaucagcucugugcugaacgauauccugagcagacuggacccuccugaggccgaggugcagaucgacagacugaucacaggcagacugcagagccuccagacauacgugacccagcagcugaucagagccgccgagauuagagccucugccaaucuggccgccaccaagaugucugagugugugcugggccagagcaagagaguggacuuuugcggcaagggcuaccaccugaugagcuucccucagucugccccucacggcgugguguuucugcacgugacauaugugcccgcucaagagaagaauuucaccaccgcuccagccaucugccacgacggcaaagcccacuuuccuagagaaggcguguucguguccaacggcacccauugguucgugacacagcggaacuucuacgagccccagaucaucaccaccgacaacaccuucgugucuggcaacugcgacguugugaucggcauugugaacaauaccguguacgacccucugcagcccgagcuggacagcuucaaagaggaacuggacaaguacuuuaagaaccacacaagccccgacguggaccugggcgauaucagcggaaucaaugccagcgucgugaacauccagaaagagaucgaccggcugaacgagguggccaagaaucugaacgagagccugaucgaccugcaagaacuggggaaguacgagcaguacaucaaguggcccugguacaucuggcugggcuuuaucgccggacugauugccaucgugauggucacaaucaugcuguguugcaugaccagcugcuguagcugccugaagggcuguuguagcuguggcagcugcugcaaguucgacgaggacgauucugagcccgugcugaagggcgugaaacugcacuacaccugaggacuagucccuguucccagagcccacuuuuuuuucuuuuuuugaaauaaaauagccugucuuucagaucuaaaaaaaaaaaaaaaaaaaaaaaaaaaaaaaaaaaaaaaaaaaaaaaaaaaaaaaaaaaaaaaaaaaaaaaaaaaaaaaaaaaaaaaaaaaaaaaaaaaa

SEQ ID NO: 24925 - RNA, 4070 nt, Artificial Sequence
  SARS-CoV-2/Wuhan/WIV05/2019__EPI_ISL_402128 spike protein mRNA gc mod (1-1273)(K986P_V987P_K986P_V987P_L18F_T20N_P26S_D138Y_R190S_K417T _E484K_N501Y_D614G_H655Y_T1027I)
aggagagucccgcagucggcguccagcggcucugcuuguucgugugugugucguugcaggccuuauucaagcuuaccauguucguguuucuggugcugcugccccugguguccagccagugugugaacuucaccaacagaacacagcugccuagcgccuacaccaacagcuucaccagaggcguguacuaccccgacaagguguucagauccagcgugcugcacucuacccaggaccuguuccugccuuucuucagcaacgugaccugguuccacgccauccacguguccggcaccaauggcaccaagagauucgacaaccccgugcugcccuucaacgacgggguguacuuugccagcaccgagaaguccaacaucaucagaggcuggaucuucggcaccacacuggacagcaagacccagagccugcugaucgugaacaacgccaccaacguggucaucaaagugugcgaguuccaguucugcaacuaccccuuccugggcgucuacuaccacaagaacaacaagagcuggauggaaagcgaguuccggguguacagcagcgccaacaacugcaccuucgaguacgugucccagccuuuccugauggaccuggaaggcaagcagggcaacuucaagaaccugagcgaguucguguucaagaacaucgacggcuacuucaaaaucuacagcaagcacaccccuaucaaccucgugcgggaucugccucagggcuucucugcucuggaaccccugguggaucugcccaucggcaucaacaucacccgguuucagacacugcuggcccugcacagaagcuaccugacaccuggcgauagcagcagcggauggacagcuggugccgccgcuuacuaugugggcuaccugcagccuagaaccuuccugcugaaguacaacgagaacggcaccaucaccgacgccguggauugugcucuggauccucugagcgagacaaagugcacccugaaguccuucaccguggaaaagggcaucuaccagaccagcaacuuccgggugcagcccaccgaauccaucgugcgguuccccaauaucaccaaucugugccccuucggcgagguguucaaugccaccagauucgccucuguguacgccuggaaccggaagcggaucagcaauugcguggccgacuacuccgugcuguacaacuccgccagcuucagcaccuucaagugcuacggcguguccccuaccaagcugaacgaccugugcuucacaaacguguacgccgacagcuucgugauccggggagaugaagugcggcagauugccccuggacagacaggcaccaucgccgacuacaacuacaagcugcccgacgacuucaccggcugugugauugccuggaacagcaacaaccuggacuccaaagucggcggcaacuacaauuaccuguaccggcuguuccggaaguccaaucugaagcccuucgagcgggacaucagcaccgaaaucuaucaggccggcagcaccccuugcaacggcgugaagggcuucaacugcuacuucccacugcaguccuacggcuuucagcccacauacggcgugggcuaucagcccuacagagugguggugcugagcuucgaacugcugcaugcuccugccacagugugcggcccuaagaaaagcaccaaucucgugaagaacaaaugcgugaacuucaacuucaacggccugaccggcaccggcgugcugacagagagcaacaagaaguuccugccauuccagcaguuuggccgggauaucgccgauaccacagacgccguuagagauccccagacacuggaaauccuggacaucaccccaugcagcuucggcggagugucugugaucaccccuggcaccaacaccagcaaucagguggcagugcuguaccagggcgugaacuguaccgaagugcccguggccauucacgccgaucagcugacaccuacauggcggguguacuccaccggcagcaauguguuucagaccagagccggcugucugaucggagccgaguacgugaacaauagcuacgagugcgacauccccaucggcgcuggcaucugugccagcuaccagacacagacaaacagccccagacgggcuagaagcguggccagccagagcaucauugccuacacaaugucucugggcgccgagaacagcguggccuacuccaacaacucuaucgcuauccccaccaacuucaccaucagcgugaccaccgagauccugccuguguccaugaccaagaccagcguggacugcaccauguacaucugcggcgauuccaccgagugcuccaaccugcugcugcaguacggcagcuucugcacccagcugaauagagcccugacagggaucgccguggaacaggacaagaacacccaagagguguucgcccaagugaagcaaaucuacaagaccccuccuaucaaggacuucggcggcuucaauuucagccagauucugcccgauccuagcaagcccagcaagcggagcuucaucgaggaccugcuguucaacaaagugacacuggccgacgccggcuucaucaagcaguauggcgauugucugggcgacauugccgccagggaucugauuugcgcccagaaguuuaacggacugacagugcugccuccucugcugaccgaugagaugaucgcccaguacacaucugcccugcuggccggcacaaucacaagcggcuggacauuuggagcuggcgccgcucugcagauccccuuugcuaugcagauggccuaccgguucaacggcaucggagugacccagaaugugcuguacgagaaccagaagcugaucgccaaccaguucaacagcgccaucggcaagauccaggacagccugagcagcacagcaagcgcccugggaaagcugcaggacguggucaaccagaaugcccaggcacugaacacccuggucaagcagcuguccuccaacuucggcgccaucagcucugugcugaacgauauccugagcagacuggacccuccugaggccgaggugcagaucgacagacugaucacaggcagacugcagagccuccagacauacgugacccagcagcugaucagagccgccgagauuagagccucugccaaucuggccgccaucaagaugucugagugugugcugggccagagcaagagaguggacuuuugcggcaagggcuaccaccugaugagcuucccucagucugccccucacggcgugguguuucugcacgugacauaugugcccgcucaagagaagaauuucaccaccgcuccagccaucugccacgacggcaaagcccacuuuccuagagaaggcguguucguguccaacggcacccauugguucgugacacagcggaacuucuacgagccccagaucaucaccaccgacaacaccuucgugucuggcaacugcgacguugugaucggcauugugaacaauaccguguacgacccucugcagcccgagcuggacagcuucaaagaggaacuggacaaguacuuuaagaaccacacaagccccgacguggaccugggcgauaucagcggaaucaaugccagcgucgugaacauccagaaagagaucgaccggcugaacgagguggccaagaaucugaacgagagccugaucgaccugcaagaacuggggaaguacgagcaguacaucaaguggcccugguacaucuggcugggcuuuaucgccggacugauugccaucgugauggucacaaucaugcuguguugcaugaccagcugcuguagcugccugaagggcuguuguagcuguggcagcugcugcaaguucgacgaggacgauucugagcccgugcugaagggcgugaaacugcacuacaccugaggacuagucccuguucccagagcccacuuuuuuuucuuuuuuugaaauaaaauagccugucuuucagaucuaaaaaaaaaaaaaaaaaaaaaaaaaaaaaaaaaaaaaaaaaaaaaaaaaaaaaaaaaaaaaaaaaaaaaaaaaaaaaaaaaaaaaaaaaaaaaaaaaaaa

SEQ ID NO: 24926 - RNA, 4070 nt, Artificial Sequence
  SARS-CoV-2/Wuhan/WIV05/2019__EPI_ISL_402128 spike protein mRNA gc mod (1-1273)(K986P_V987P_K986P_V987P_S13I_W152C_L452R_D614G)
aggagagucccgcagucggcguccagcggcucugcuuguucgugugugugucguugcaggccuuauucaagcuuaccauguucguguuucuggugcugcugccccugguguccauccagugugugaaccugaccaccagaacacagcugccuccagccuacaccaacagcuucaccagaggcguguacuaccccgacaagguguucagauccagcgugcugcacucuacccaggaccuguuccugccuuucuucagcaacgugaccugguuccacgccauccacguguccggcaccaauggcaccaagagauucgacaaccccgugcugcccuucaacgacgggguguacuuugccagcaccgagaaguccaacaucaucagaggcuggaucuucggcaccacacuggacagcaagacccagagccugcugaucgugaacaacgccaccaacguggucaucaaagugugcgaguuccaguucugcaacgaccccuuccugggcgucuacuaccacaagaacaacaagagcugcauggaaagcgaguuccggguguacagcagcgccaacaacugcaccuucgaguacgugucccagccuuuccugauggaccuggaaggcaagcagggcaacuucaagaaccugcgcgaguucguguucaagaacaucgacggcuacuucaaaaucuacagcaagcacaccccuaucaaccucgugcgggaucugccucagggcuucucugcucuggaaccccugguggaucugcccaucggcaucaacaucacccgguuucagacacugcuggcccugcacagaagcuaccugacaccuggcgauagcagcagcggauggacagcuggugccgccgcuuacuaugugggcuaccugcagccuagaaccuuccugcugaaguacaacgagaacggcaccaucaccgacgccguggauugugcucuggauccucugagcgagacaaagugcacccugaaguccuucaccguggaaaagggcaucuaccagaccagcaacuuccgggugcagcccaccgaauccaucgugcgguuccccaauaucaccaaucugugccccuucggcgagguguucaaugccaccagauucgccucuguguacgccuggaaccggaagcggaucagcaauugcguggccgacuacuccgugcuguacaacuccgccagcuucagcaccuucaagugcuacggcguguccccuaccaagcugaacgaccugugcuucacaaacguguacgccgacagcuucgugauccggggagaugaagugcggcagauugccccuggacagacaggcaagaucgccgacuacaacuacaagcugcccgacgacuucaccggcugugugauugccuggaacagcaacaaccuggacuccaaagucggcggcaacuacaauuaccgcuaccggcuguuccggaaguccaaucugaagcccuucgagcgggacaucagcaccgaaaucuaucaggccggcagcaccccuugcaacggcguggaaggcuucaacugcuacuucccacugcaguccuacggcuuucagcccacaaauggcgugggcuaucagcccuacagagugguggugcugagcuucgaacugcugcaugcuccugccacagugugcggcccuaagaaaagcaccaaucucgugaagaacaaaugcgugaacuucaacuucaacggccugaccggcaccggcgugcugacagagagcaacaagaaguuccugccauuccagcaguuuggccgggauaucgccgauaccacagacgccguuagagauccccagacacuggaaauccuggacaucaccccaugcagcuucggcggagugucugugaucaccccuggcaccaacaccagcaaucagguggcagugcuguaccagggcgugaacuguaccgaagugcccguggccauucacgccgaucagcugacaccuacauggcggguguacuccaccggcagcaauguguuucagaccagagccggcugucugaucggagccgagcacgugaacaauagcuacgagugcgacauccccaucggcgcuggcaucugugccagcuaccagacacagacaaacagccccagacgggcuagaagcguggccagccagagcaucauugccuacacaaugucucugggcgccgagaacagcguggccuacuccaacaacucuaucgcuauccccaccaacuucaccaucagcgugaccaccgagauccugccuguguccaugaccaagaccagcguggacugcaccauguacaucugcggcgauuccaccgagugcuccaaccugcugcugcaguacggcagcuucugcacccagcugaauagagcccugacagggaucgccguggaacaggacaagaacacccaagagguguucgcccaagugaagcaaaucuacaagaccccuccuaucaaggacuucggcggcuucaauuucagccagauucugcccgauccuagcaagcccagcaagcggagcuucaucgaggaccugcuguucaacaaagugacacuggccgacgccggcuucaucaagcaguauggcgauugucugggcgacauugccgccagggaucugauuugcgcccagaaguuuaacggacugacagugcugccuccucugcugaccgaugagaugaucgcccaguacacaucugcccugcuggccggcacaaucacaagcggcuggacauuuggagcuggcgccgcucugcagauccccuuugcuaugcagauggccuaccgguucaacggcaucggagugacccagaaugugcuguacgagaaccagaagcugaucgccaaccaguucaacagcgccaucggcaagauccaggacagccugagcagcacagcaagcgcccugggaaagcugcaggacguggucaaccagaaugcccaggcacugaacacccuggucaagcagcuguccuccaacuucggcgccaucagcucugugcugaacgauauccugagcagacuggacccuccugaggccgaggugcagaucgacagacugaucacaggcagacugcagagccuccagacauacgugacccagcagcugaucagagccgccgagauuagagccucugccaaucuggccgccaccaagaugucugagugugugcugggccagagcaagagaguggacuuuugcggcaagggcuaccaccugaugagcuucccucagucugccccucacggcgugguguuucugcacgugacauaugugcccgcucaagagaagaauuucaccaccgcuccagccaucugccacgacggcaaagcccacuuuccuagagaaggcguguucguguccaacggcacccauugguucgugacacagcggaacuucuacgagccccagaucaucaccaccgacaacaccuucgugucuggcaacugcgacguugugaucggcauugugaacaauaccguguacgacccucugcagcccgagcuggacagcuucaaagaggaacuggacaaguacuuuaagaaccacacaagccccgacguggaccugggcgauaucagcggaaucaaugccagcgucgugaacauccagaaagagaucgaccggcugaacgagguggccaagaaucugaacgagagccugaucgaccugcaagaacuggggaaguacgagcaguacaucaaguggcccugguacaucuggcugggcuuuaucgccggacugauugccaucgugauggucacaaucaugcuguguugcaugaccagcugcuguagcugccugaagggcuguuguagcuguggcagcugcugcaaguucgacgaggacgauucugagcccgugcugaagggcgugaaacugcacuacaccugaggacuagucccuguucccagagcccacuuuuuuuucuuuuuuugaaauaaaauagccugucuuucagaucuaaaaaaaaaaaaaaaaaaaaaaaaaaaaaaaaaaaaaaaaaaaaaaaaaaaaaaaaaaaaaaaaaaaaaaaaaaaaaaaaaaaaaaaaaaaaaaaaaaaa

SEQ ID NO: 24927 - RNA, 4070 nt, Artificial Sequence
  SARS-CoV-2/Wuhan/WIV05/2019__EPI_ISL_402128 spike protein mRNA gc mod (1-1273)(K986P_V987P)
aggagagucccgcagucggcguccagcggcucugcuuguucgugugugugucguugcaggccuuauucaagcuuaccauguucguguuccuggugcugcugccucugguguccagccagugugugaaccugaccaccagaacacagcugccuccagccuacaccaacagcuuuaccagaggcguguacuaccccgacaagguguucagauccagcgugcugcacucuacccaggaccuguuccugccuuucuucagcaacgugaccugguuccacgccauccacguguccggcaccaauggcaccaagagauucgacaaccccgugcugcccuucaacgacgggguguacuuugccagcaccgagaaguccaacaucaucagaggcuggaucuucggcaccacacuggacagcaagacccagagccugcugaucgugaacaacgccaccaacguggucaucaaagugugcgaguuccaguucugcaacgaccccuuccugggcgucuacuaccacaagaacaacaagagcuggauggaaagcgaguuccggguguacagcagcgccaacaacugcaccuucgaguacgugucccagccuuuccugauggaccuggaaggcaagcagggcaacuucaagaaccugcgcgaguucguguuuaagaacaucgacggcuacuucaagaucuacagcaagcacaccccuaucaaccucgugcgggaucugccucagggcuucucugcucuggaaccccugguggaucugcccaucggcaucaacaucacccgguuucagacacugcuggcccugcacagaagcuaccugacaccuggcgauagcagcagcggauggacagcuggugccgccgcuuacuaugugggcuaccugcagccuagaaccuuccugcugaaguacaacgagaacggcaccaucaccgacgccguggauugugcucuggauccucugagcgagacaaagugcacccugaaguccuucaccguggaaaagggcaucuaccagaccagcaacuuccgggugcagcccaccgaauccaucgugcgguuccccaauaucaccaaucugugccccuucggcgagguguucaaugccaccagauucgccucuguguacgccuggaaccggaagcggaucagcaauugcguggccgacuacuccgugcuguacaacuccgccagcuucagcaccuucaagugcuacggcguguccccuaccaagcugaacgaccugugcuucacaaacguguacgccgacagcuucgugauccggggagaugaagugcggcagauugccccuggacagacaggcaagaucgccgacuacaacuacaagcugcccgacgacuucaccggcugugugauugccuggaacagcaacaaccuggacuccaaagucggcggcaacuacaauuaccuguaccggcuguuccggaaguccaaucugaagcccuucgagcgggacaucuccaccgagaucuaucaggccggcagcaccccuuguaacggcguggaaggcuucaacugcuacuucccacugcaguccuacggcuuucagcccacaaauggcgugggcuaucagcccuacagagugguggugcugagcuucgaacugcugcaugccccugccacagugugcggcccuaagaaaagcaccaaucucgugaagaacaaaugcgugaacuucaacuucaacggccugaccggcaccggcgugcugacagagagcaacaagaaguuccugccauuccagcaguuuggccgggauaucgccgauaccacagacgccguuagagauccccagacacuggaaauccuggacaucaccccuugcagcuucggcggagugucugugaucaccccuggcaccaacaccagcaaucagguggcagugcuguaccaggacgugaacuguaccgaagugcccguggccauucacgccgaucagcugacaccuacauggcggguguacuccaccggcagcaauguguuucagaccagagccggcugucugaucggagccgagcacgugaacaauagcuacgagugcgacauccccaucggcgcuggaaucugcgccagcuaccagacacagacaaacagcccucggagagccagaagcguggccagccagagcaucauugccuacacaaugucucugggcgccgagaacagcguggccuacuccaacaacucuaucgcuauccccaccaacuucaccaucagcgugaccacagagauccugccuguguccaugaccaagaccagcguggacugcaccauguacaucugcggcgauuccaccgagugcuccaaccugcugcugcaguacggcagcuucugcacccagcugaauagagcccugacagggaucgccguggaacaggacaagaacacccaagagguguucgcccaagugaagcagaucuacaagaccccuccuaucaaggacuucggcggcuucaauuucagccagauucugcccgauccuagcaagcccagcaagcggagcuucaucgaggaccugcuguucaacaaagugacacuggccgacgccggcuucaucaagcaguauggcgauugucugggcgacauugccgccagggaucugauuugcgcccagaaguuuaacggacugacagugcugccuccucugcugaccgaugagaugaucgcccaguacacaucugcccugcuggccggcacaaucacaagcggcuggacauuuggagcaggcgccgcucugcagauccccuuugcuaugcagauggccuaccgguucaacggcaucggagugacccagaaugugcuguacgagaaccagaagcugaucgccaaccaguucaacagcgccaucggcaagauccaggacagccugagcagcacagcaagcgcccugggaaagcugcaggacguggucaaccagaaugcccaggcacugaacacccuggucaagcagcuguccuccaacuucggcgccaucagcucugugcugaacgauauccugagcagacuggacccuccugaggccgaggugcagaucgacagacugaucacaggcagacugcagagccuccagacauacgugacccagcagcugaucagagccgccgagauuagagccucugccaaucuggccgccaccaagaugucugagugugugcugggccagagcaagagaguggacuuuugcggcaagggcuaccaccugaugagcuucccucagucugccccucacggcgugguguuucugcacgugacauaugugcccgcucaagagaagaauuucaccaccgcuccagccaucugccacgacggcaaagcccacuuuccuagagaaggcguguucguguccaacggcacccauugguucgugacacagcggaacuucuacgagccccagaucaucaccaccgacaacaccuucgugucuggcaacugcgacgucgugaucggcauugugaacaauaccguguacgacccucugcagcccgagcuggacagcuucaaagaggaacuggacaaguacuuuaagaaccacacaagccccgacguggaccugggcgauaucagcggaaucaaugccagcgucgugaacauccagaaagagaucgaccggcugaacgagguggccaagaaucugaacgagagccugaucgaccugcaagaacuggggaaguacgagcaguacaucaaguggcccugguacaucuggcugggcuuuaucgccggacugauugccaucgugauggucacaaucaugcuguguugcaugaccagcugcuguagcugccugaagggcuguuguagcuguggcagcugcugcaaguucgacgaggacgauucugagcccgugcugaagggcgugaaacugcacuacacaugaggacuagucccuguucccagagcccacuuuuuuuucuuuuuuugaaauaaaauagccugucuuucagaucuaaaaaaaaaaaaaaaaaaaaaaaaaaaaaaaaaaaaaaaaaaaaaaaaaaaaaaaaaaaaaaaaaaaaaaaaaaaaaaaaaaaaaaaaaaaaaaaaaaaa

SEQ ID NO: 24928 - RNA, 4070 nt, Artificial Sequence
  SARS-CoV-2/Wuhan/WIV05/2019__EPI_ISL_402128 spike protein mRNA gc mod (1-1273)(K986P_V987P_ D614G)
aggagagucccgcagucggcguccagcggcucugcuuguucgugugugugucguugcaggccuuauucaagcuuaccauguucguguuccuggugcugcugccucugguguccagccagugugugaaccugaccaccagaacacagcugccuccagccuacaccaacagcuuuaccagaggcguguacuaccccgacaagguguucagauccagcgugcugcacucuacccaggaccuguuccugccuuucuucagcaacgugaccugguuccacgccauccacguguccggcaccaauggcaccaagagauucgacaaccccgugcugcccuucaacgacgggguguacuuugccagcaccgagaaguccaacaucaucagaggcuggaucuucggcaccacacuggacagcaagacccagagccugcugaucgugaacaacgccaccaacguggucaucaaagugugcgaguuccaguucugcaacgaccccuuccugggcgucuacuaccacaagaacaacaagagcuggauggaaagcgaguuccggguguacagcagcgccaacaacugcaccuucgaguacgugucccagccuuuccugauggaccuggaaggcaagcagggcaacuucaagaaccugcgcgaguucguguuuaagaacaucgacggcuacuucaagaucuacagcaagcacaccccuaucaaccucgugcgggaucugccucagggcuucucugcucuggaaccccugguggaucugcccaucggcaucaacaucacccgguuucagacacugcuggcccugcacagaagcuaccugacaccuggcgauagcagcagcggauggacagcuggugccgccgcuuacuaugugggcuaccugcagccuagaaccuuccugcugaaguacaacgagaacggcaccaucaccgacgccguggauugugcucuggauccucugagcgagacaaagugcacccugaaguccuucaccguggaaaagggcaucuaccagaccagcaacuuccgggugcagcccaccgaauccaucgugcgguuccccaauaucaccaaucugugccccuucggcgagguguucaaugccaccagauucgccucuguguacgccuggaaccggaagcggaucagcaauugcguggccgacuacuccgugcuguacaacuccgccagcuucagcaccuucaagugcuacggcguguccccuaccaagcugaacgaccugugcuucacaaacguguacgccgacagcuucgugauccggggagaugaagugcggcagauugccccuggacagacaggcaagaucgccgacuacaacuacaagcugcccgacgacuucaccggcugugugauugccuggaacagcaacaaccuggacuccaaagucggcggcaacuacaauuaccuguaccggcuguuccggaaguccaaucugaagcccuucgagcgggacaucuccaccgagaucuaucaggccggcagcaccccuuguaacggcguggaaggcuucaacugcuacuucccacugcaguccuacggcuuucagcccacaaauggcgugggcuaucagcccuacagagugguggugcugagcuucgaacugcugcaugccccugccacagugugcggcccuaagaaaagcaccaaucucgugaagaacaaaugcgugaacuucaacuucaacggccugaccggcaccggcgugcugacagagagcaacaagaaguuccugccauuccagcaguuuggccgggauaucgccgauaccacagacgccguuagagauccccagacacuggaaauccuggacaucaccccuugcagcuucggcggagugucugugaucaccccuggcaccaacaccagcaaucagguggcagugcuguaccagggcgugaacuguaccgaagugcccguggccauucacgccgaucagcugacaccuacauggcggguguacuccaccggcagcaauguguuucagaccagagccggcugucugaucggagccgagcacgugaacaauagcuacgagugcgacauccccaucggcgcuggaaucugcgccagcuaccagacacagacaaacagcccucggagagccagaagcguggccagccagagcaucauugccuacacaaugucucugggcgccgagaacagcguggccuacuccaacaacucuaucgcuauccccaccaacuucaccaucagcgugaccacagagauccugccuguguccaugaccaagaccagcguggacugcaccauguacaucugcggcgauuccaccgagugcuccaaccugcugcugcaguacggcagcuucugcacccagcugaauagagcccugacagggaucgccguggaacaggacaagaacacccaagagguguucgcccaagugaagcagaucuacaagaccccuccuaucaaggacuucggcggcuucaauuucagccagauucugcccgauccuagcaagcccagcaagcggagcuucaucgaggaccugcuguucaacaaagugacacuggccgacgccggcuucaucaagcaguauggcgauugucugggcgacauugccgccagggaucugauuugcgcccagaaguuuaacggacugacagugcugccuccucugcugaccgaugagaugaucgcccaguacacaucugcccugcuggccggcacaaucacaagcggcuggacauuuggagcaggcgccgcucugcagauccccuuugcuaugcagauggccuaccgguucaacggcaucggagugacccagaaugugcuguacgagaaccagaagcugaucgccaaccaguucaacagcgccaucggcaagauccaggacagccugagcagcacagcaagcgcccugggaaagcugcaggacguggucaaccagaaugcccaggcacugaacacccuggucaagcagcuguccuccaacuucggcgccaucagcucugugcugaacgauauccugagcagacuggacccuccugaggccgaggugcagaucgacagacugaucacaggcagacugcagagccuccagacauacgugacccagcagcugaucagagccgccgagauuagagccucugccaaucuggccgccaccaagaugucugagugugugcugggccagagcaagagaguggacuuuugcggcaagggcuaccaccugaugagcuucccucagucugccccucacggcgugguguuucugcacgugacauaugugcccgcucaagagaagaauuucaccaccgcuccagccaucugccacgacggcaaagcccacuuuccuagagaaggcguguucguguccaacggcacccauugguucgugacacagcggaacuucuacgagccccagaucaucaccaccgacaacaccuucgugucuggcaacugcgacgucgugaucggcauugugaacaauaccguguacgacccucugcagcccgagcuggacagcuucaaagaggaacuggacaaguacuuuaagaaccacacaagccccgacguggaccugggcgauaucagcggaaucaaugccagcgucgugaacauccagaaagagaucgaccggcugaacgagguggccaagaaucugaacgagagccugaucgaccugcaagaacuggggaaguacgagcaguacaucaaguggcccugguacaucuggcugggcuuuaucgccggacugauugccaucgugauggucacaaucaugcuguguugcaugaccagcugcuguagcugccugaagggcuguuguagcuguggcagcugcugcaaguucgacgaggacgauucugagcccgugcugaagggcgugaaacugcacuacacaugaggacuagucccuguucccagagcccacuuuuuuuucuuuuuuugaaauaaaauagccugucuuucagaucuaaaaaaaaaaaaaaaaaaaaaaaaaaaaaaaaaaaaaaaaaaaaaaaaaaaaaaaaaaaaaaaaaaaaaaaaaaaaaaaaaaaaaaaaaaaaaaaaaaaa

SEQ ID NO: 24929 - RNA, 4070 nt, Artificial Sequence
  SARS-CoV-2/Wuhan/WIV05/2019__EPI_ISL_402128 spike protein mRNA gc mod (1-1273)(K986P_V987P_A222V_D614G)
aggagagucccgcagucggcguccagcggcucugcuuguucgugugugugucguugcaggccuuauucaagcuuaccauguucguguuccuggugcugcugccucugguguccagccagugugugaaccugaccaccagaacacagcugccuccagccuacaccaacagcuuuaccagaggcguguacuaccccgacaagguguucagauccagcgugcugcacucuacccaggaccuguuccugccuuucuucagcaacgugaccugguuccacgccauccacguguccggcaccaauggcaccaagagauucgacaaccccgugcugcccuucaacgacgggguguacuuugccagcaccgagaaguccaacaucaucagaggcuggaucuucggcaccacacuggacagcaagacccagagccugcugaucgugaacaacgccaccaacguggucaucaaagugugcgaguuccaguucugcaacgaccccuuccugggcgucuacuaccacaagaacaacaagagcuggauggaaagcgaguuccggguguacagcagcgccaacaacugcaccuucgaguacgugucccagccuuuccugauggaccuggaaggcaagcagggcaacuucaagaaccugcgcgaguucguguuuaagaacaucgacggcuacuucaagaucuacagcaagcacaccccuaucaaccucgugcgggaucugccucagggcuucucugugcuggaaccccugguggaucugcccaucggcaucaacaucacccgguuucagacacugcuggcccugcacagaagcuaccugacaccuggcgauagcagcagcggauggacagcuggugccgccgcuuacuaugugggcuaccugcagccuagaaccuuccugcugaaguacaacgagaacggcaccaucaccgacgccguggauugugcucuggauccucugagcgagacaaagugcacccugaaguccuucaccguggaaaagggcaucuaccagaccagcaacuuccgggugcagcccaccgaauccaucgugcgguuccccaauaucaccaaucugugccccuucggcgagguguucaaugccaccagauucgccucuguguacgccuggaaccggaagcggaucagcaauugcguggccgacuacuccgugcuguacaacuccgccagcuucagcaccuucaagugcuacggcguguccccuaccaagcugaacgaccugugcuucacaaacguguacgccgacagcuucgugauccggggagaugaagugcggcagauugccccuggacagacaggcaagaucgccgacuacaacuacaagcugcccgacgacuucaccggcugugugauugccuggaacagcaacaaccuggacuccaaagucggcggcaacuacaauuaccuguaccggcuguuccggaaguccaaucugaagcccuucgagcgggacaucuccaccgagaucuaucaggccggcagcaccccuuguaacggcguggaaggcuucaacugcuacuucccacugcaguccuacggcuuucagcccacaaauggcgugggcuaucagcccuacagagugguggugcugagcuucgaacugcugcaugccccugccacagugugcggcccuaagaaaagcaccaaucucgugaagaacaaaugcgugaacuucaacuucaacggccugaccggcaccggcgugcugacagagagcaacaagaaguuccugccauuccagcaguuuggccgggauaucgccgauaccacagacgccguuagagauccccagacacuggaaauccuggacaucaccccuugcagcuucggcggagugucugugaucaccccuggcaccaacaccagcaaucagguggcagugcuguaccagggcgugaacuguaccgaagugcccguggccauucacgccgaucagcugacaccuacauggcggguguacuccaccggcagcaauguguuucagaccagagccggcugucugaucggagccgagcacgugaacaauagcuacgagugcgacauccccaucggcgcuggaaucugcgccagcuaccagacacagacaaacagcccucggagagccagaagcguggccagccagagcaucauugccuacacaaugucucugggcgccgagaacagcguggccuacuccaacaacucuaucgcuauccccaccaacuucaccaucagcgugaccacagagauccugccuguguccaugaccaagaccagcguggacugcaccauguacaucugcggcgauuccaccgagugcuccaaccugcugcugcaguacggcagcuucugcacccagcugaauagagcccugacagggaucgccguggaacaggacaagaacacccaagagguguucgcccaagugaagcagaucuacaagaccccuccuaucaaggacuucggcggcuucaauuucagccagauucugcccgauccuagcaagcccagcaagcggagcuucaucgaggaccugcuguucaacaaagugacacuggccgacgccggcuucaucaagcaguauggcgauugucugggcgacauugccgccagggaucugauuugcgcccagaaguuuaacggacugacagugcugccuccucugcugaccgaugagaugaucgcccaguacacaucugcccugcuggccggcacaaucacaagcggcuggacauuuggagcaggcgccgcucugcagauccccuuugcuaugcagauggccuaccgguucaacggcaucggagugacccagaaugugcuguacgagaaccagaagcugaucgccaaccaguucaacagcgccaucggcaagauccaggacagccugagcagcacagcaagcgcccugggaaagcugcaggacguggucaaccagaaugcccaggcacugaacacccuggucaagcagcuguccuccaacuucggcgccaucagcucugugcugaacgauauccugagcagacuggacccuccugaggccgaggugcagaucgacagacugaucacaggcagacugcagagccuccagacauacgugacccagcagcugaucagagccgccgagauuagagccucugccaaucuggccgccaccaagaugucugagugugugcugggccagagcaagagaguggacuuuugcggcaagggcuaccaccugaugagcuucccucagucugccccucacggcgugguguuucugcacgugacauaugugcccgcucaagagaagaauuucaccaccgcuccagccaucugccacgacggcaaagcccacuuuccuagagaaggcguguucguguccaacggcacccauugguucgugacacagcggaacuucuacgagccccagaucaucaccaccgacaacaccuucgugucuggcaacugcgacgucgugaucggcauugugaacaauaccguguacgacccucugcagcccgagcuggacagcuucaaagaggaacuggacaaguacuuuaagaaccacacaagccccgacguggaccugggcgauaucagcggaaucaaugccagcgucgugaacauccagaaagagaucgaccggcugaacgagguggccaagaaucugaacgagagccugaucgaccugcaagaacuggggaaguacgagcaguacaucaaguggcccugguacaucuggcugggcuuuaucgccggacugauugccaucgugauggucacaaucaugcuguguugcaugaccagcugcuguagcugccugaagggcuguuguagcuguggcagcugcugcaaguucgacgaggacgauucugagcccgugcugaagggcgugaaacugcacuacacaugaggacuagucccuguucccagagcccacuuuuuuuucuuuuuuugaaauaaaauagccugucuuucagaucuaaaaaaaaaaaaaaaaaaaaaaaaaaaaaaaaaaaaaaaaaaaaaaaaaaaaaaaaaaaaaaaaaaaaaaaaaaaaaaaaaaaaaaaaaaaaaaaaaaaa

SEQ ID NO: 24930 - RNA, 4070 nt, Artificial Sequence
  SARS-CoV-2/Wuhan/WIV05/2019__EPI_ISL_402128 spike protein mRNA gc mod (1-1273)(K986P_V987P_N439K_D614G)
aggagagucccgcagucggcguccagcggcucugcuuguucgugugugugucguugcaggccuuauucaagcuuaccauguucguguuccuggugcugcugccucugguguccagccagugugugaaccugaccaccagaacacagcugccuccagccuacaccaacagcuuuaccagaggcguguacuaccccgacaagguguucagauccagcgugcugcacucuacccaggaccuguuccugccuuucuucagcaacgugaccugguuccacgccauccacguguccggcaccaauggcaccaagagauucgacaaccccgugcugcccuucaacgacgggguguacuuugccagcaccgagaaguccaacaucaucagaggcuggaucuucggcaccacacuggacagcaagacccagagccugcugaucgugaacaacgccaccaacguggucaucaaagugugcgaguuccaguucugcaacgaccccuuccugggcgucuacuaccacaagaacaacaagagcuggauggaaagcgaguuccggguguacagcagcgccaacaacugcaccuucgaguacgugucccagccuuuccugauggaccuggaaggcaagcagggcaacuucaagaaccugcgcgaguucguguuuaagaacaucgacggcuacuucaagaucuacagcaagcacaccccuaucaaccucgugcgggaucugccucagggcuucucugcucuggaaccccugguggaucugcccaucggcaucaacaucacccgguuucagacacugcuggcccugcacagaagcuaccugacaccuggcgauagcagcagcggauggacagcuggugccgccgcuuacuaugugggcuaccugcagccuagaaccuuccugcugaaguacaacgagaacggcaccaucaccgacgccguggauugugcucuggauccucugagcgagacaaagugcacccugaaguccuucaccguggaaaagggcaucuaccagaccagcaacuuccgggugcagcccaccgaauccaucgugcgguuccccaauaucaccaaucugugccccuucggcgagguguucaaugccaccagauucgccucuguguacgccuggaaccggaagcggaucagcaauugcguggccgacuacuccgugcuguacaacuccgccagcuucagcaccuucaagugcuacggcguguccccuaccaagcugaacgaccugugcuucacaaacguguacgccgacagcuucgugauccggggagaugaagugcggcagauugccccuggacagacaggcaagaucgccgacuacaacuacaagcugcccgacgacuucaccggcugugugauugccuggaacagcaagaaccuggacuccaaagucggcggcaacuacaauuaccuguaccggcuguuccggaaguccaaucugaagcccuucgagcgggacaucuccaccgagaucuaucaggccggcagcaccccuuguaacggcguggaaggcuucaacugcuacuucccacugcaguccuacggcuuucagcccacaaauggcgugggcuaucagcccuacagagugguggugcugagcuucgaacugcugcaugccccugccacagugugcggcccuaagaaaagcaccaaucucgugaagaacaaaugcgugaacuucaacuucaacggccugaccggcaccggcgugcugacagagagcaacaagaaguuccugccauuccagcaguuuggccgggauaucgccgauaccacagacgccguuagagauccccagacacuggaaauccuggacaucaccccuugcagcuucggcggagugucugugaucaccccuggcaccaacaccagcaaucagguggcagugcuguaccagggcgugaacuguaccgaagugcccguggccauucacgccgaucagcugacaccuacauggcggguguacuccaccggcagcaauguguuucagaccagagccggcugucugaucggagccgagcacgugaacaauagcuacgagugcgacauccccaucggcgcuggaaucugcgccagcuaccagacacagacaaacagcccucggagagccagaagcguggccagccagagcaucauugccuacacaaugucucugggcgccgagaacagcguggccuacuccaacaacucuaucgcuauccccaccaacuucaccaucagcgugaccacagagauccugccuguguccaugaccaagaccagcguggacugcaccauguacaucugcggcgauuccaccgagugcuccaaccugcugcugcaguacggcagcuucugcacccagcugaauagagcccugacagggaucgccguggaacaggacaagaacacccaagagguguucgcccaagugaagcagaucuacaagaccccuccuaucaaggacuucggcggcuucaauuucagccagauucugcccgauccuagcaagcccagcaagcggagcuucaucgaggaccugcuguucaacaaagugacacuggccgacgccggcuucaucaagcaguauggcgauugucugggcgacauugccgccagggaucugauuugcgcccagaaguuuaacggacugacagugcugccuccucugcugaccgaugagaugaucgcccaguacacaucugcccugcuggccggcacaaucacaagcggcuggacauuuggagcaggcgccgcucugcagauccccuuugcuaugcagauggccuaccgguucaacggcaucggagugacccagaaugugcuguacgagaaccagaagcugaucgccaaccaguucaacagcgccaucggcaagauccaggacagccugagcagcacagcaagcgcccugggaaagcugcaggacguggucaaccagaaugcccaggcacugaacacccuggucaagcagcuguccuccaacuucggcgccaucagcucugugcugaacgauauccugagcagacuggacccuccugaggccgaggugcagaucgacagacugaucacaggcagacugcagagccuccagacauacgugacccagcagcugaucagagccgccgagauuagagccucugccaaucuggccgccaccaagaugucugagugugugcugggccagagcaagagaguggacuuuugcggcaagggcuaccaccugaugagcuucccucagucugccccucacggcgugguguuucugcacgugacauaugugcccgcucaagagaagaauuucaccaccgcuccagccaucugccacgacggcaaagcccacuuuccuagagaaggcguguucguguccaacggcacccauugguucgugacacagcggaacuucuacgagccccagaucaucaccaccgacaacaccuucgugucuggcaacugcgacgucgugaucggcauugugaacaauaccguguacgacccucugcagcccgagcuggacagcuucaaagaggaacuggacaaguacuuuaagaaccacacaagccccgacguggaccugggcgauaucagcggaaucaaugccagcgucgugaacauccagaaagagaucgaccggcugaacgagguggccaagaaucugaacgagagccugaucgaccugcaagaacuggggaaguacgagcaguacaucaaguggcccugguacaucuggcugggcuuuaucgccggacugauugccaucgugauggucacaaucaugcuguguugcaugaccagcugcuguagcugccugaagggcuguuguagcuguggcagcugcugcaaguucgacgaggacgauucugagcccgugcugaagggcgugaaacugcacuacacaugaggacuagucccuguucccagagcccacuuuuuuuucuuuuuuugaaauaaaauagccugucuuucagaucuaaaaaaaaaaaaaaaaaaaaaaaaaaaaaaaaaaaaaaaaaaaaaaaaaaaaaaaaaaaaaaaaaaaaaaaaaaaaaaaaaaaaaaaaaaaaaaaaaaaa

SEQ ID NO: 24931 - RNA, 4070 nt, Artificial Sequence
  SARS-CoV-2/Wuhan/WIV05/2019__EPI_ISL_402128 spike protein mRNA gc mod (1-1273)(K986P_V987P_S477N_D614G)
aggagagucccgcagucggcguccagcggcucugcuuguucgugugugugucguugcaggccuuauucaagcuuaccauguucguguuccuggugcugcugccucugguguccagccagugugugaaccugaccaccagaacacagcugccuccagccuacaccaacagcuuuaccagaggcguguacuaccccgacaagguguucagauccagcgugcugcacucuacccaggaccuguuccugccuuucuucagcaacgugaccugguuccacgccauccacguguccggcaccaauggcaccaagagauucgacaaccccgugcugcccuucaacgacgggguguacuuugccagcaccgagaaguccaacaucaucagaggcuggaucuucggcaccacacuggacagcaagacccagagccugcugaucgugaacaacgccaccaacguggucaucaaagugugcgaguuccaguucugcaacgaccccuuccugggcgucuacuaccacaagaacaacaagagcuggauggaaagcgaguuccggguguacagcagcgccaacaacugcaccuucgaguacgugucccagccuuuccugauggaccuggaaggcaagcagggcaacuucaagaaccugcgcgaguucguguuuaagaacaucgacggcuacuucaagaucuacagcaagcacaccccuaucaaccucgugcgggaucugccucagggcuucucugcucuggaaccccugguggaucugcccaucggcaucaacaucacccgguuucagacacugcuggcccugcacagaagcuaccugacaccuggcgauagcagcagcggauggacagcuggugccgccgcuuacuaugugggcuaccugcagccuagaaccuuccugcugaaguacaacgagaacggcaccaucaccgacgccguggauugugcucuggauccucugagcgagacaaagugcacccugaaguccuucaccguggaaaagggcaucuaccagaccagcaacuuccgggugcagcccaccgaauccaucgugcgguuccccaauaucaccaaucugugccccuucggcgagguguucaaugccaccagauucgccucuguguacgccuggaaccggaagcggaucagcaauugcguggccgacuacuccgugcuguacaacuccgccagcuucagcaccuucaagugcuacggcguguccccuaccaagcugaacgaccugugcuucacaaacguguacgccgacagcuucgugauccggggagaugaagugcggcagauugccccuggacagacaggcaagaucgccgacuacaacuacaagcugcccgacgacuucaccggcugugugauugccuggaacagcaacaaccuggacuccaaagucggcggcaacuacaauuaccuguaccggcuguuccggaaguccaaucugaagcccuucgagcgggacaucuccaccgagaucuaucaggccggcaacaccccuuguaacggcguggaaggcuucaacugcuacuucccacugcaguccuacggcuuucagcccacaaauggcgugggcuaucagcccuacagagugguggugcugagcuucgaacugcugcaugccccugccacagugugcggcccuaagaaaagcaccaaucucgugaagaacaaaugcgugaacuucaacuucaacggccugaccggcaccggcgugcugacagagagcaacaagaaguuccugccauuccagcaguuuggccgggauaucgccgauaccacagacgccguuagagauccccagacacuggaaauccuggacaucaccccuugcagcuucggcggagugucugugaucaccccuggcaccaacaccagcaaucagguggcagugcuguaccagggcgugaacuguaccgaagugcccguggccauucacgccgaucagcugacaccuacauggcggguguacuccaccggcagcaauguguuucagaccagagccggcugucugaucggagccgagcacgugaacaauagcuacgagugcgacauccccaucggcgcuggaaucugcgccagcuaccagacacagacaaacagcccucggagagccagaagcguggccagccagagcaucauugccuacacaaugucucugggcgccgagaacagcguggccuacuccaacaacucuaucgcuauccccaccaacuucaccaucagcgugaccacagagauccugccuguguccaugaccaagaccagcguggacugcaccauguacaucugcggcgauuccaccgagugcuccaaccugcugcugcaguacggcagcuucugcacccagcugaauagagcccugacagggaucgccguggaacaggacaagaacacccaagagguguucgcccaagugaagcagaucuacaagaccccuccuaucaaggacuucggcggcuucaauuucagccagauucugcccgauccuagcaagcccagcaagcggagcuucaucgaggaccugcuguucaacaaagugacacuggccgacgccggcuucaucaagcaguauggcgauugucugggcgacauugccgccagggaucugauuugcgcccagaaguuuaacggacugacagugcugccuccucugcugaccgaugagaugaucgcccaguacacaucugcccugcuggccggcacaaucacaagcggcuggacauuuggagcaggcgccgcucugcagauccccuuugcuaugcagauggccuaccgguucaacggcaucggagugacccagaaugugcuguacgagaaccagaagcugaucgccaaccaguucaacagcgccaucggcaagauccaggacagccugagcagcacagcaagcgcccugggaaagcugcaggacguggucaaccagaaugcccaggcacugaacacccuggucaagcagcuguccuccaacuucggcgccaucagcucugugcugaacgauauccugagcagacuggacccuccugaggccgaggugcagaucgacagacugaucacaggcagacugcagagccuccagacauacgugacccagcagcugaucagagccgccgagauuagagccucugccaaucuggccgccaccaagaugucugagugugugcugggccagagcaagagaguggacuuuugcggcaagggcuaccaccugaugagcuucccucagucugccccucacggcgugguguuucugcacgugacauaugugcccgcucaagagaagaauuucaccaccgcuccagccaucugccacgacggcaaagcccacuuuccuagagaaggcguguucguguccaacggcacccauugguucgugacacagcggaacuucuacgagccccagaucaucaccaccgacaacaccuucgugucuggcaacugcgacgucgugaucggcauugugaacaauaccguguacgacccucugcagcccgagcuggacagcuucaaagaggaacuggacaaguacuuuaagaaccacacaagccccgacguggaccugggcgauaucagcggaaucaaugccagcgucgugaacauccagaaagagaucgaccggcugaacgagguggccaagaaucugaacgagagccugaucgaccugcaagaacuggggaaguacgagcaguacaucaaguggcccugguacaucuggcugggcuuuaucgccggacugauugccaucgugauggucacaaucaugcuguguugcaugaccagcugcuguagcugccugaagggcuguuguagcuguggcagcugcugcaaguucgacgaggacgauucugagcccgugcugaagggcgugaaacugcacuacacaugaggacuagucccuguucccagagcccacuuuuuuuucuuuuuuugaaauaaaauagccugucuuucagaucuaaaaaaaaaaaaaaaaaaaaaaaaaaaaaaaaaaaaaaaaaaaaaaaaaaaaaaaaaaaaaaaaaaaaaaaaaaaaaaaaaaaaaaaaaaaaaaaaaaaa

SEQ ID NO: 24932 - RNA, 4070 nt, Artificial Sequence
  SARS-CoV-2/Wuhan/WIV05/2019__EPI_ISL_402128 spike protein mRNA gc mod (1-1273)(K986P_V987P_N501Y_D614G)
aggagagucccgcagucggcguccagcggcucugcuuguucgugugugugucguugcaggccuuauucaagcuuaccauguucguguuccuggugcugcugccucugguguccagccagugugugaaccugaccaccagaacacagcugccuccagccuacaccaacagcuuuaccagaggcguguacuaccccgacaagguguucagauccagcgugcugcacucuacccaggaccuguuccugccuuucuucagcaacgugaccugguuccacgccauccacguguccggcaccaauggcaccaagagauucgacaaccccgugcugcccuucaacgacgggguguacuuugccagcaccgagaaguccaacaucaucagaggcuggaucuucggcaccacacuggacagcaagacccagagccugcugaucgugaacaacgccaccaacguggucaucaaagugugcgaguuccaguucugcaacgaccccuuccugggcgucuacuaccacaagaacaacaagagcuggauggaaagcgaguuccggguguacagcagcgccaacaacugcaccuucgaguacgugucccagccuuuccugauggaccuggaaggcaagcagggcaacuucaagaaccugcgcgaguucguguuuaagaacaucgacggcuacuucaagaucuacagcaagcacaccccuaucaaccucgugcgggaucugccucagggcuucucugcucuggaaccccugguggaucugcccaucggcaucaacaucacccgguuucagacacugcuggcccugcacagaagcuaccugacaccuggcgauagcagcagcggauggacagcuggugccgccgcuuacuaugugggcuaccugcagccuagaaccuuccugcugaaguacaacgagaacggcaccaucaccgacgccguggauugugcucuggauccucugagcgagacaaagugcacccugaaguccuucaccguggaaaagggcaucuaccagaccagcaacuuccgggugcagcccaccgaauccaucgugcgguuccccaauaucaccaaucugugccccuucggcgagguguucaaugccaccagauucgccucuguguacgccuggaaccggaagcggaucagcaauugcguggccgacuacuccgugcuguacaacuccgccagcuucagcaccuucaagugcuacggcguguccccuaccaagcugaacgaccugugcuucacaaacguguacgccgacagcuucgugauccggggagaugaagugcggcagauugccccuggacagacaggcaagaucgccgacuacaacuacaagcugcccgacgacuucaccggcugugugauugccuggaacagcaacaaccuggacuccaaagucggcggcaacuacaauuaccuguaccggcuguuccggaaguccaaucugaagcccuucgagcgggacaucuccaccgagaucuaucaggccggcagcaccccuuguaacggcguggaaggcuucaacugcuacuucccacugcaguccuacggcuuucagcccacauacggcgugggcuaucagcccuacagagugguggugcugagcuucgaacugcugcaugccccugccacagugugcggcccuaagaaaagcaccaaucucgugaagaacaaaugcgugaacuucaacuucaacggccugaccggcaccggcgugcugacagagagcaacaagaaguuccugccauuccagcaguuuggccgggauaucgccgauaccacagacgccguuagagauccccagacacuggaaauccuggacaucaccccuugcagcuucggcggagugucugugaucaccccuggcaccaacaccagcaaucagguggcagugcuguaccagggcgugaacuguaccgaagugcccguggccauucacgccgaucagcugacaccuacauggcggguguacuccaccggcagcaauguguuucagaccagagccggcugucugaucggagccgagcacgugaacaauagcuacgagugcgacauccccaucggcgcuggaaucugcgccagcuaccagacacagacaaacagcccucggagagccagaagcguggccagccagagcaucauugccuacacaaugucucugggcgccgagaacagcguggccuacuccaacaacucuaucgcuauccccaccaacuucaccaucagcgugaccacagagauccugccuguguccaugaccaagaccagcguggacugcaccauguacaucugcggcgauuccaccgagugcuccaaccugcugcugcaguacggcagcuucugcacccagcugaauagagcccugacagggaucgccguggaacaggacaagaacacccaagagguguucgcccaagugaagcagaucuacaagaccccuccuaucaaggacuucggcggcuucaauuucagccagauucugcccgauccuagcaagcccagcaagcggagcuucaucgaggaccugcuguucaacaaagugacacuggccgacgccggcuucaucaagcaguauggcgauugucugggcgacauugccgccagggaucugauuugcgcccagaaguuuaacggacugacagugcugccuccucugcugaccgaugagaugaucgcccaguacacaucugcccugcuggccggcacaaucacaagcggcuggacauuuggagcaggcgccgcucugcagauccccuuugcuaugcagauggccuaccgguucaacggcaucggagugacccagaaugugcuguacgagaaccagaagcugaucgccaaccaguucaacagcgccaucggcaagauccaggacagccugagcagcacagcaagcgcccugggaaagcugcaggacguggucaaccagaaugcccaggcacugaacacccuggucaagcagcuguccuccaacuucggcgccaucagcucugugcugaacgauauccugagcagacuggacccuccugaggccgaggugcagaucgacagacugaucacaggcagacugcagagccuccagacauacgugacccagcagcugaucagagccgccgagauuagagccucugccaaucuggccgccaccaagaugucugagugugugcugggccagagcaagagaguggacuuuugcggcaagggcuaccaccugaugagcuucccucagucugccccucacggcgugguguuucugcacgugacauaugugcccgcucaagagaagaauuucaccaccgcuccagccaucugccacgacggcaaagcccacuuuccuagagaaggcguguucguguccaacggcacccauugguucgugacacagcggaacuucuacgagccccagaucaucaccaccgacaacaccuucgugucuggcaacugcgacgucgugaucggcauugugaacaauaccguguacgacccucugcagcccgagcuggacagcuucaaagaggaacuggacaaguacuuuaagaaccacacaagccccgacguggaccugggcgauaucagcggaaucaaugccagcgucgugaacauccagaaagagaucgaccggcugaacgagguggccaagaaucugaacgagagccugaucgaccugcaagaacuggggaaguacgagcaguacaucaaguggcccugguacaucuggcugggcuuuaucgccggacugauugccaucgugauggucacaaucaugcuguguugcaugaccagcugcuguagcugccugaagggcuguuguagcuguggcagcugcugcaaguucgacgaggacgauucugagcccgugcugaagggcgugaaacugcacuacacaugaggacuagucccuguucccagagcccacuuuuuuuucuuuuuuugaaauaaaauagccugucuuucagaucuaaaaaaaaaaaaaaaaaaaaaaaaaaaaaaaaaaaaaaaaaaaaaaaaaaaaaaaaaaaaaaaaaaaaaaaaaaaaaaaaaaaaaaaaaaaaaaaaaaaa

SEQ ID NO: 24933 - RNA, 4064 nt, Artificial Sequence
  SARS-CoV-2/Wuhan/WIV05/2019__EPI_ISL_402128 spike protein mRNA gc mod (1-1273)(K986P_V987P_H69del_V70del_D614G)
aggagagucccgcagucggcguccagcggcucugcuuguucgugugugugucguugcaggccuuauucaagcuuaccauguucguguuccuggugcugcugccucugguguccagccagugugugaaccugaccaccagaacacagcugccuccagccuacaccaacagcuuuaccagaggcguguacuaccccgacaagguguucagauccagcgugcugcacucuacccaggaccuguuccugccuuucuucagcaacgugaccugguuccacgccaucuccggcaccaauggcaccaagagauucgacaaccccgugcugcccuucaacgacgggguguacuuugccagcaccgagaaguccaacaucaucagaggcuggaucuucggcaccacacuggacagcaagacccagagccugcugaucgugaacaacgccaccaacguggucaucaaagugugcgaguuccaguucugcaacgaccccuuccugggcgucuacuaccacaagaacaacaagagcuggauggaaagcgaguuccggguguacagcagcgccaacaacugcaccuucgaguacgugucccagccuuuccugauggaccuggaaggcaagcagggcaacuucaagaaccugcgcgaguucguguuuaagaacaucgacggcuacuucaagaucuacagcaagcacaccccuaucaaccucgugcgggaucugccucagggcuucucugcucuggaaccccugguggaucugcccaucggcaucaacaucacccgguuucagacacugcuggcccugcacagaagcuaccugacaccuggcgauagcagcagcggauggacagcuggugccgccgcuuacuaugugggcuaccugcagccuagaaccuuccugcugaaguacaacgagaacggcaccaucaccgacgccguggauugugcucuggauccucugagcgagacaaagugcacccugaaguccuucaccguggaaaagggcaucuaccagaccagcaacuuccgggugcagcccaccgaauccaucgugcgguuccccaauaucaccaaucugugccccuucggcgagguguucaaugccaccagauucgccucuguguacgccuggaaccggaagcggaucagcaauugcguggccgacuacuccgugcuguacaacuccgccagcuucagcaccuucaagugcuacggcguguccccuaccaagcugaacgaccugugcuucacaaacguguacgccgacagcuucgugauccggggagaugaagugcggcagauugccccuggacagacaggcaagaucgccgacuacaacuacaagcugcccgacgacuucaccggcugugugauugccuggaacagcaacaaccuggacuccaaagucggcggcaacuacaauuaccuguaccggcuguuccggaaguccaaucugaagcccuucgagcgggacaucuccaccgagaucuaucaggccggcagcaccccuuguaacggcguggaaggcuucaacugcuacuucccacugcaguccuacggcuuucagcccacaaauggcgugggcuaucagcccuacagagugguggugcugagcuucgaacugcugcaugccccugccacagugugcggcccuaagaaaagcaccaaucucgugaagaacaaaugcgugaacuucaacuucaacggccugaccggcaccggcgugcugacagagagcaacaagaaguuccugccauuccagcaguuuggccgggauaucgccgauaccacagacgccguuagagauccccagacacuggaaauccuggacaucaccccuugcagcuucggcggagugucugugaucaccccuggcaccaacaccagcaaucagguggcagugcuguaccagggcgugaacuguaccgaagugcccguggccauucacgccgaucagcugacaccuacauggcggguguacuccaccggcagcaauguguuucagaccagagccggcugucugaucggagccgagcacgugaacaauagcuacgagugcgacauccccaucggcgcuggaaucugcgccagcuaccagacacagacaaacagcccucggagagccagaagcguggccagccagagcaucauugccuacacaaugucucugggcgccgagaacagcguggccuacuccaacaacucuaucgcuauccccaccaacuucaccaucagcgugaccacagagauccugccuguguccaugaccaagaccagcguggacugcaccauguacaucugcggcgauuccaccgagugcuccaaccugcugcugcaguacggcagcuucugcacccagcugaauagagcccugacagggaucgccguggaacaggacaagaacacccaagagguguucgcccaagugaagcagaucuacaagaccccuccuaucaaggacuucggcggcuucaauuucagccagauucugcccgauccuagcaagcccagcaagcggagcuucaucgaggaccugcuguucaacaaagugacacuggccgacgccggcuucaucaagcaguauggcgauugucugggcgacauugccgccagggaucugauuugcgcccagaaguuuaacggacugacagugcugccuccucugcugaccgaugagaugaucgcccaguacacaucugcccugcuggccggcacaaucacaagcggcuggacauuuggagcaggcgccgcucugcagauccccuuugcuaugcagauggccuaccgguucaacggcaucggagugacccagaaugugcuguacgagaaccagaagcugaucgccaaccaguucaacagcgccaucggcaagauccaggacagccugagcagcacagcaagcgcccugggaaagcugcaggacguggucaaccagaaugcccaggcacugaacacccuggucaagcagcuguccuccaacuucggcgccaucagcucugugcugaacgauauccugagcagacuggacccuccugaggccgaggugcagaucgacagacugaucacaggcagacugcagagccuccagacauacgugacccagcagcugaucagagccgccgagauuagagccucugccaaucuggccgccaccaagaugucugagugugugcugggccagagcaagagaguggacuuuugcggcaagggcuaccaccugaugagcuucccucagucugccccucacggcgugguguuucugcacgugacauaugugcccgcucaagagaagaauuucaccaccgcuccagccaucugccacgacggcaaagcccacuuuccuagagaaggcguguucguguccaacggcacccauugguucgugacacagcggaacuucuacgagccccagaucaucaccaccgacaacaccuucgugucuggcaacugcgacgucgugaucggcauugugaacaauaccguguacgacccucugcagcccgagcuggacagcuucaaagaggaacuggacaaguacuuuaagaaccacacaagccccgacguggaccugggcgauaucagcggaaucaaugccagcgucgugaacauccagaaagagaucgaccggcugaacgagguggccaagaaucugaacgagagccugaucgaccugcaagaacuggggaaguacgagcaguacaucaaguggcccugguacaucuggcugggcuuuaucgccggacugauugccaucgugauggucacaaucaugcuguguugcaugaccagcugcuguagcugccugaagggcuguuguagcuguggcagcugcugcaaguucgacgaggacgauucugagcccgugcugaagggcgugaaacugcacuacacaugaggacuagucccuguucccagagcccacuuuuuuuucuuuuuuugaaauaaaauagccugucuuucagaucuaaaaaaaaaaaaaaaaaaaaaaaaaaaaaaaaaaaaaaaaaaaaaaaaaaaaaaaaaaaaaaaaaaaaaaaaaaaaaaaaaaaaaaaaaaaaaaaaaaaa

SEQ ID NO: 24934 - RNA, 4070 nt, Artificial Sequence
  SARS-CoV-2/Wuhan/WIV05/2019__EPI_ISL_402128 spike protein mRNA gc mod (1-1273)(K986P_V987P_Y453F_D614G)
aggagagucccgcagucggcguccagcggcucugcuuguucgugugugugucguugcaggccuuauucaagcuuaccauguucguguuccuggugcugcugccucugguguccagccagugugugaaccugaccaccagaacacagcugccuccagccuacaccaacagcuuuaccagaggcguguacuaccccgacaagguguucagauccagcgugcugcacucuacccaggaccuguuccugccuuucuucagcaacgugaccugguuccacgccauccacguguccggcaccaauggcaccaagagauucgacaaccccgugcugcccuucaacgacgggguguacuuugccagcaccgagaaguccaacaucaucagaggcuggaucuucggcaccacacuggacagcaagacccagagccugcugaucgugaacaacgccaccaacguggucaucaaagugugcgaguuccaguucugcaacgaccccuuccugggcgucuacuaccacaagaacaacaagagcuggauggaaagcgaguuccggguguacagcagcgccaacaacugcaccuucgaguacgugucccagccuuuccugauggaccuggaaggcaagcagggcaacuucaagaaccugcgcgaguucguguuuaagaacaucgacggcuacuucaagaucuacagcaagcacaccccuaucaaccucgugcgggaucugccucagggcuucucugcucuggaaccccugguggaucugcccaucggcaucaacaucacccgguuucagacacugcuggcccugcacagaagcuaccugacaccuggcgauagcagcagcggauggacagcuggugccgccgcuuacuaugugggcuaccugcagccuagaaccuuccugcugaaguacaacgagaacggcaccaucaccgacgccguggauugugcucuggauccucugagcgagacaaagugcacccugaaguccuucaccguggaaaagggcaucuaccagaccagcaacuuccgggugcagcccaccgaauccaucgugcgguuccccaauaucaccaaucugugccccuucggcgagguguucaaugccaccagauucgccucuguguacgccuggaaccggaagcggaucagcaauugcguggccgacuacuccgugcuguacaacuccgccagcuucagcaccuucaagugcuacggcguguccccuaccaagcugaacgaccugugcuucacaaacguguacgccgacagcuucgugauccggggagaugaagugcggcagauugccccuggacagacaggcaagaucgccgacuacaacuacaagcugcccgacgacuucaccggcugugugauugccuggaacagcaacaaccuggacuccaaagucggcggcaacuacaauuaccuguuccggcuguuccggaaguccaaucugaagcccuucgagcgggacaucuccaccgagaucuaucaggccggcagcaccccuuguaacggcguggaaggcuucaacugcuacuucccacugcaguccuacggcuuucagcccacaaauggcgugggcuaucagcccuacagagugguggugcugagcuucgaacugcugcaugccccugccacagugugcggcccuaagaaaagcaccaaucucgugaagaacaaaugcgugaacuucaacuucaacggccugaccggcaccggcgugcugacagagagcaacaagaaguuccugccauuccagcaguuuggccgggauaucgccgauaccacagacgccguuagagauccccagacacuggaaauccuggacaucaccccuugcagcuucggcggagugucugugaucaccccuggcaccaacaccagcaaucagguggcagugcuguaccagggcgugaacuguaccgaagugcccguggccauucacgccgaucagcugacaccuacauggcggguguacuccaccggcagcaauguguuucagaccagagccggcugucugaucggagccgagcacgugaacaauagcuacgagugcgacauccccaucggcgcuggaaucugcgccagcuaccagacacagacaaacagcccucggagagccagaagcguggccagccagagcaucauugccuacacaaugucucugggcgccgagaacagcguggccuacuccaacaacucuaucgcuauccccaccaacuucaccaucagcgugaccacagagauccugccuguguccaugaccaagaccagcguggacugcaccauguacaucugcggcgauuccaccgagugcuccaaccugcugcugcaguacggcagcuucugcacccagcugaauagagcccugacagggaucgccguggaacaggacaagaacacccaagagguguucgcccaagugaagcagaucuacaagaccccuccuaucaaggacuucggcggcuucaauuucagccagauucugcccgauccuagcaagcccagcaagcggagcuucaucgaggaccugcuguucaacaaagugacacuggccgacgccggcuucaucaagcaguauggcgauugucugggcgacauugccgccagggaucugauuugcgcccagaaguuuaacggacugacagugcugccuccucugcugaccgaugagaugaucgcccaguacacaucugcccugcuggccggcacaaucacaagcggcuggacauuuggagcaggcgccgcucugcagauccccuuugcuaugcagauggccuaccgguucaacggcaucggagugacccagaaugugcuguacgagaaccagaagcugaucgccaaccaguucaacagcgccaucggcaagauccaggacagccugagcagcacagcaagcgcccugggaaagcugcaggacguggucaaccagaaugcccaggcacugaacacccuggucaagcagcuguccuccaacuucggcgccaucagcucugugcugaacgauauccugagcagacuggacccuccugaggccgaggugcagaucgacagacugaucacaggcagacugcagagccuccagacauacgugacccagcagcugaucagagccgccgagauuagagccucugccaaucuggccgccaccaagaugucugagugugugcugggccagagcaagagaguggacuuuugcggcaagggcuaccaccugaugagcuucccucagucugccccucacggcgugguguuucugcacgugacauaugugcccgcucaagagaagaauuucaccaccgcuccagccaucugccacgacggcaaagcccacuuuccuagagaaggcguguucguguccaacggcacccauugguucgugacacagcggaacuucuacgagccccagaucaucaccaccgacaacaccuucgugucuggcaacugcgacgucgugaucggcauugugaacaauaccguguacgacccucugcagcccgagcuggacagcuucaaagaggaacuggacaaguacuuuaagaaccacacaagccccgacguggaccugggcgauaucagcggaaucaaugccagcgucgugaacauccagaaagagaucgaccggcugaacgagguggccaagaaucugaacgagagccugaucgaccugcaagaacuggggaaguacgagcaguacaucaaguggcccugguacaucuggcugggcuuuaucgccggacugauugccaucgugauggucacaaucaugcuguguugcaugaccagcugcuguagcugccugaagggcuguuguagcuguggcagcugcugcaaguucgacgaggacgauucugagcccgugcugaagggcgugaaacugcacuacacaugaggacuagucccuguucccagagcccacuuuuuuuucuuuuuuugaaauaaaauagccugucuuucagaucuaaaaaaaaaaaaaaaaaaaaaaaaaaaaaaaaaaaaaaaaaaaaaaaaaaaaaaaaaaaaaaaaaaaaaaaaaaaaaaaaaaaaaaaaaaaaaaaaaaaa

SEQ ID NO: 24935 - RNA, 4070 nt, Artificial Sequence
  SARS-CoV-2/Wuhan/WIV05/2019__EPI_ISL_402128 spike protein mRNA gc mod (1-1273)(K986P_V987P_D614G_I692V)
aggagagucccgcagucggcguccagcggcucugcuuguucgugugugugucguugcaggccuuauucaagcuuaccauguucguguuccuggugcugcugccucugguguccagccagugugugaaccugaccaccagaacacagcugccuccagccuacaccaacagcuuuaccagaggcguguacuaccccgacaagguguucagauccagcgugcugcacucuacccaggaccuguuccugccuuucuucagcaacgugaccugguuccacgccauccacguguccggcaccaauggcaccaagagauucgacaaccccgugcugcccuucaacgacgggguguacuuugccagcaccgagaaguccaacaucaucagaggcuggaucuucggcaccacacuggacagcaagacccagagccugcugaucgugaacaacgccaccaacguggucaucaaagugugcgaguuccaguucugcaacgaccccuuccugggcgucuacuaccacaagaacaacaagagcuggauggaaagcgaguuccggguguacagcagcgccaacaacugcaccuucgaguacgugucccagccuuuccugauggaccuggaaggcaagcagggcaacuucaagaaccugcgcgaguucguguuuaagaacaucgacggcuacuucaagaucuacagcaagcacaccccuaucaaccucgugcgggaucugccucagggcuucucugcucuggaaccccugguggaucugcccaucggcaucaacaucacccgguuucagacacugcuggcccugcacagaagcuaccugacaccuggcgauagcagcagcggauggacagcuggugccgccgcuuacuaugugggcuaccugcagccuagaaccuuccugcugaaguacaacgagaacggcaccaucaccgacgccguggauugugcucuggauccucugagcgagacaaagugcacccugaaguccuucaccguggaaaagggcaucuaccagaccagcaacuuccgggugcagcccaccgaauccaucgugcgguuccccaauaucaccaaucugugccccuucggcgagguguucaaugccaccagauucgccucuguguacgccuggaaccggaagcggaucagcaauugcguggccgacuacuccgugcuguacaacuccgccagcuucagcaccuucaagugcuacggcguguccccuaccaagcugaacgaccugugcuucacaaacguguacgccgacagcuucgugauccggggagaugaagugcggcagauugccccuggacagacaggcaagaucgccgacuacaacuacaagcugcccgacgacuucaccggcugugugauugccuggaacagcaacaaccuggacuccaaagucggcggcaacuacaauuaccuguaccggcuguuccggaaguccaaucugaagcccuucgagcgggacaucuccaccgagaucuaucaggccggcagcaccccuuguaacggcguggaaggcuucaacugcuacuucccacugcaguccuacggcuuucagcccacaaauggcgugggcuaucagcccuacagagugguggugcugagcuucgaacugcugcaugccccugccacagugugcggcccuaagaaaagcaccaaucucgugaagaacaaaugcgugaacuucaacuucaacggccugaccggcaccggcgugcugacagagagcaacaagaaguuccugccauuccagcaguuuggccgggauaucgccgauaccacagacgccguuagagauccccagacacuggaaauccuggacaucaccccuugcagcuucggcggagugucugugaucaccccuggcaccaacaccagcaaucagguggcagugcuguaccagggcgugaacuguaccgaagugcccguggccauucacgccgaucagcugacaccuacauggcggguguacuccaccggcagcaauguguuucagaccagagccggcugucugaucggagccgagcacgugaacaauagcuacgagugcgacauccccaucggcgcuggaaucugcgccagcuaccagacacagacaaacagcccucggagagccagaagcguggccagccagagcgugauugccuacacaaugucucugggcgccgagaacagcguggccuacuccaacaacucuaucgcuauccccaccaacuucaccaucagcgugaccacagagauccugccuguguccaugaccaagaccagcguggacugcaccauguacaucugcggcgauuccaccgagugcuccaaccugcugcugcaguacggcagcuucugcacccagcugaauagagcccugacagggaucgccguggaacaggacaagaacacccaagagguguucgcccaagugaagcagaucuacaagaccccuccuaucaaggacuucggcggcuucaauuucagccagauucugcccgauccuagcaagcccagcaagcggagcuucaucgaggaccugcuguucaacaaagugacacuggccgacgccggcuucaucaagcaguauggcgauugucugggcgacauugccgccagggaucugauuugcgcccagaaguuuaacggacugacagugcugccuccucugcugaccgaugagaugaucgcccaguacacaucugcccugcuggccggcacaaucacaagcggcuggacauuuggagcaggcgccgcucugcagauccccuuugcuaugcagauggccuaccgguucaacggcaucggagugacccagaaugugcuguacgagaaccagaagcugaucgccaaccaguucaacagcgccaucggcaagauccaggacagccugagcagcacagcaagcgcccugggaaagcugcaggacguggucaaccagaaugcccaggcacugaacacccuggucaagcagcuguccuccaacuucggcgccaucagcucugugcugaacgauauccugagcagacuggacccuccugaggccgaggugcagaucgacagacugaucacaggcagacugcagagccuccagacauacgugacccagcagcugaucagagccgccgagauuagagccucugccaaucuggccgccaccaagaugucugagugugugcugggccagagcaagagaguggacuuuugcggcaagggcuaccaccugaugagcuucccucagucugccccucacggcgugguguuucugcacgugacauaugugcccgcucaagagaagaauuucaccaccgcuccagccaucugccacgacggcaaagcccacuuuccuagagaaggcguguucguguccaacggcacccauugguucgugacacagcggaacuucuacgagccccagaucaucaccaccgacaacaccuucgugucuggcaacugcgacgucgugaucggcauugugaacaauaccguguacgacccucugcagcccgagcuggacagcuucaaagaggaacuggacaaguacuuuaagaaccacacaagccccgacguggaccugggcgauaucagcggaaucaaugccagcgucgugaacauccagaaagagaucgaccggcugaacgagguggccaagaaucugaacgagagccugaucgaccugcaagaacuggggaaguacgagcaguacaucaaguggcccugguacaucuggcugggcuuuaucgccggacugauugccaucgugauggucacaaucaugcuguguugcaugaccagcugcuguagcugccugaagggcuguuguagcuguggcagcugcugcaaguucgacgaggacgauucugagcccgugcugaagggcgugaaacugcacuacacaugaggacuagucccuguucccagagcccacuuuuuuuucuuuuuuugaaauaaaauagccugucuuucagaucuaaaaaaaaaaaaaaaaaaaaaaaaaaaaaaaaaaaaaaaaaaaaaaaaaaaaaaaaaaaaaaaaaaaaaaaaaaaaaaaaaaaaaaaaaaaaaaaaaaaa

SEQ ID NO: 24936 - RNA, 4070 nt, Artificial Sequence
  SARS-CoV-2/Wuhan/WIV05/2019__EPI_ISL_402128 spike protein mRNA gc mod (1-1273)(K986P_V987P_D614G_M1229I)
aggagagucccgcagucggcguccagcggcucugcuuguucgugugugugucguugcaggccuuauucaagcuuaccauguucguguuccuggugcugcugccucugguguccagccagugugugaaccugaccaccagaacacagcugccuccagccuacaccaacagcuuuaccagaggcguguacuaccccgacaagguguucagauccagcgugcugcacucuacccaggaccuguuccugccuuucuucagcaacgugaccugguuccacgccauccacguguccggcaccaauggcaccaagagauucgacaaccccgugcugcccuucaacgacgggguguacuuugccagcaccgagaaguccaacaucaucagaggcuggaucuucggcaccacacuggacagcaagacccagagccugcugaucgugaacaacgccaccaacguggucaucaaagugugcgaguuccaguucugcaacgaccccuuccugggcgucuacuaccacaagaacaacaagagcuggauggaaagcgaguuccggguguacagcagcgccaacaacugcaccuucgaguacgugucccagccuuuccugauggaccuggaaggcaagcagggcaacuucaagaaccugcgcgaguucguguuuaagaacaucgacggcuacuucaagaucuacagcaagcacaccccuaucaaccucgugcgggaucugccucagggcuucucugcucuggaaccccugguggaucugcccaucggcaucaacaucacccgguuucagacacugcuggcccugcacagaagcuaccugacaccuggcgauagcagcagcggauggacagcuggugccgccgcuuacuaugugggcuaccugcagccuagaaccuuccugcugaaguacaacgagaacggcaccaucaccgacgccguggauugugcucuggauccucugagcgagacaaagugcacccugaaguccuucaccguggaaaagggcaucuaccagaccagcaacuuccgggugcagcccaccgaauccaucgugcgguuccccaauaucaccaaucugugccccuucggcgagguguucaaugccaccagauucgccucuguguacgccuggaaccggaagcggaucagcaauugcguggccgacuacuccgugcuguacaacuccgccagcuucagcaccuucaagugcuacggcguguccccuaccaagcugaacgaccugugcuucacaaacguguacgccgacagcuucgugauccggggagaugaagugcggcagauugccccuggacagacaggcaagaucgccgacuacaacuacaagcugcccgacgacuucaccggcugugugauugccuggaacagcaacaaccuggacuccaaagucggcggcaacuacaauuaccuguaccggcuguuccggaaguccaaucugaagcccuucgagcgggacaucuccaccgagaucuaucaggccggcagcaccccuuguaacggcguggaaggcuucaacugcuacuucccacugcaguccuacggcuuucagcccacaaauggcgugggcuaucagcccuacagagugguggugcugagcuucgaacugcugcaugccccugccacagugugcggcccuaagaaaagcaccaaucucgugaagaacaaaugcgugaacuucaacuucaacggccugaccggcaccggcgugcugacagagagcaacaagaaguuccugccauuccagcaguuuggccgggauaucgccgauaccacagacgccguuagagauccccagacacuggaaauccuggacaucaccccuugcagcuucggcggagugucugugaucaccccuggcaccaacaccagcaaucagguggcagugcuguaccagggcgugaacuguaccgaagugcccguggccauucacgccgaucagcugacaccuacauggcggguguacuccaccggcagcaauguguuucagaccagagccggcugucugaucggagccgagcacgugaacaauagcuacgagugcgacauccccaucggcgcuggaaucugcgccagcuaccagacacagacaaacagcccucggagagccagaagcguggccagccagagcaucauugccuacacaaugucucugggcgccgagaacagcguggccuacuccaacaacucuaucgcuauccccaccaacuucaccaucagcgugaccacagagauccugccuguguccaugaccaagaccagcguggacugcaccauguacaucugcggcgauuccaccgagugcuccaaccugcugcugcaguacggcagcuucugcacccagcugaauagagcccugacagggaucgccguggaacaggacaagaacacccaagagguguucgcccaagugaagcagaucuacaagaccccuccuaucaaggacuucggcggcuucaauuucagccagauucugcccgauccuagcaagcccagcaagcggagcuucaucgaggaccugcuguucaacaaagugacacuggccgacgccggcuucaucaagcaguauggcgauugucugggcgacauugccgccagggaucugauuugcgcccagaaguuuaacggacugacagugcugccuccucugcugaccgaugagaugaucgcccaguacacaucugcccugcuggccggcacaaucacaagcggcuggacauuuggagcaggcgccgcucugcagauccccuuugcuaugcagauggccuaccgguucaacggcaucggagugacccagaaugugcuguacgagaaccagaagcugaucgccaaccaguucaacagcgccaucggcaagauccaggacagccugagcagcacagcaagcgcccugggaaagcugcaggacguggucaaccagaaugcccaggcacugaacacccuggucaagcagcuguccuccaacuucggcgccaucagcucugugcugaacgauauccugagcagacuggacccuccugaggccgaggugcagaucgacagacugaucacaggcagacugcagagccuccagacauacgugacccagcagcugaucagagccgccgagauuagagccucugccaaucuggccgccaccaagaugucugagugugugcugggccagagcaagagaguggacuuuugcggcaagggcuaccaccugaugagcuucccucagucugccccucacggcgugguguuucugcacgugacauaugugcccgcucaagagaagaauuucaccaccgcuccagccaucugccacgacggcaaagcccacuuuccuagagaaggcguguucguguccaacggcacccauugguucgugacacagcggaacuucuacgagccccagaucaucaccaccgacaacaccuucgugucuggcaacugcgacgucgugaucggcauugugaacaauaccguguacgacccucugcagcccgagcuggacagcuucaaagaggaacuggacaaguacuuuaagaaccacacaagccccgacguggaccugggcgauaucagcggaaucaaugccagcgucgugaacauccagaaagagaucgaccggcugaacgagguggccaagaaucugaacgagagccugaucgaccugcaagaacuggggaaguacgagcaguacaucaaguggcccugguacaucuggcugggcuuuaucgccggacugauugccaucgugaucgucacaaucaugcuguguugcaugaccagcugcuguagcugccugaagggcuguuguagcuguggcagcugcugcaaguucgacgaggacgauucugagcccgugcugaagggcgugaaacugcacuacacaugaggacuagucccuguucccagagcccacuuuuuuuucuuuuuuugaaauaaaauagccugucuuucagaucuaaaaaaaaaaaaaaaaaaaaaaaaaaaaaaaaaaaaaaaaaaaaaaaaaaaaaaaaaaaaaaaaaaaaaaaaaaaaaaaaaaaaaaaaaaaaaaaaaaaa

SEQ ID NO: 24937 - RNA, 4064 nt, Artificial Sequence
  SARS-CoV-2/Wuhan/WIV05/2019__EPI_ISL_402128 spike protein mRNA gc mod (1-1273)(K986P_V987P_H69del_V70del_A222V_Y453F_S477N_D614G_I692V)
aggagagucccgcagucggcguccagcggcucugcuuguucgugugugugucguugcaggccuuauucaagcuuaccauguucguguuccuggugcugcugccucugguguccagccagugugugaaccugaccaccagaacacagcugccuccagccuacaccaacagcuuuaccagaggcguguacuaccccgacaagguguucagauccagcgugcugcacucuacccaggaccuguuccugccuuucuucagcaacgugaccugguuccacgccaucuccggcaccaauggcaccaagagauucgacaaccccgugcugcccuucaacgacgggguguacuuugccagcaccgagaaguccaacaucaucagaggcuggaucuucggcaccacacuggacagcaagacccagagccugcugaucgugaacaacgccaccaacguggucaucaaagugugcgaguuccaguucugcaacgaccccuuccugggcgucuacuaccacaagaacaacaagagcuggauggaaagcgaguuccggguguacagcagcgccaacaacugcaccuucgaguacgugucccagccuuuccugauggaccuggaaggcaagcagggcaacuucaagaaccugcgcgaguucguguuuaagaacaucgacggcuacuucaagaucuacagcaagcacaccccuaucaaccucgugcgggaucugccucagggcuucucugugcuggaaccccugguggaucugcccaucggcaucaacaucacccgguuucagacacugcuggcccugcacagaagcuaccugacaccuggcgauagcagcagcggauggacagcuggugccgccgcuuacuaugugggcuaccugcagccuagaaccuuccugcugaaguacaacgagaacggcaccaucaccgacgccguggauugugcucuggauccucugagcgagacaaagugcacccugaaguccuucaccguggaaaagggcaucuaccagaccagcaacuuccgggugcagcccaccgaauccaucgugcgguuccccaauaucaccaaucugugccccuucggcgagguguucaaugccaccagauucgccucuguguacgccuggaaccggaagcggaucagcaauugcguggccgacuacuccgugcuguacaacuccgccagcuucagcaccuucaagugcuacggcguguccccuaccaagcugaacgaccugugcuucacaaacguguacgccgacagcuucgugauccggggagaugaagugcggcagauugccccuggacagacaggcaagaucgccgacuacaacuacaagcugcccgacgacuucaccggcugugugauugccuggaacagcaacaaccuggacuccaaagucggcggcaacuacaauuaccuguuccggcuguuccggaaguccaaucugaagcccuucgagcgggacaucuccaccgagaucuaucaggccggcaacaccccuuguaacggcguggaaggcuucaacugcuacuucccacugcaguccuacggcuuucagcccacaaauggcgugggcuaucagcccuacagagugguggugcugagcuucgaacugcugcaugccccugccacagugugcggcccuaagaaaagcaccaaucucgugaagaacaaaugcgugaacuucaacuucaacggccugaccggcaccggcgugcugacagagagcaacaagaaguuccugccauuccagcaguuuggccgggauaucgccgauaccacagacgccguuagagauccccagacacuggaaauccuggacaucaccccuugcagcuucggcggagugucugugaucaccccuggcaccaacaccagcaaucagguggcagugcuguaccagggcgugaacuguaccgaagugcccguggccauucacgccgaucagcugacaccuacauggcggguguacuccaccggcagcaauguguuucagaccagagccggcugucugaucggagccgagcacgugaacaauagcuacgagugcgacauccccaucggcgcuggaaucugcgccagcuaccagacacagacaaacagcccucggagagccagaagcguggccagccagagcgugauugccuacacaaugucucugggcgccgagaacagcguggccuacuccaacaacucuaucgcuauccccaccaacuucaccaucagcgugaccacagagauccugccuguguccaugaccaagaccagcguggacugcaccauguacaucugcggcgauuccaccgagugcuccaaccugcugcugcaguacggcagcuucugcacccagcugaauagagcccugacagggaucgccguggaacaggacaagaacacccaagagguguucgcccaagugaagcagaucuacaagaccccuccuaucaaggacuucggcggcuucaauuucagccagauucugcccgauccuagcaagcccagcaagcggagcuucaucgaggaccugcuguucaacaaagugacacuggccgacgccggcuucaucaagcaguauggcgauugucugggcgacauugccgccagggaucugauuugcgcccagaaguuuaacggacugacagugcugccuccucugcugaccgaugagaugaucgcccaguacacaucugcccugcuggccggcacaaucacaagcggcuggacauuuggagcaggcgccgcucugcagauccccuuugcuaugcagauggccuaccgguucaacggcaucggagugacccagaaugugcuguacgagaaccagaagcugaucgccaaccaguucaacagcgccaucggcaagauccaggacagccugagcagcacagcaagcgcccugggaaagcugcaggacguggucaaccagaaugcccaggcacugaacacccuggucaagcagcuguccuccaacuucggcgccaucagcucugugcugaacgauauccugagcagacuggacccuccugaggccgaggugcagaucgacagacugaucacaggcagacugcagagccuccagacauacgugacccagcagcugaucagagccgccgagauuagagccucugccaaucuggccgccaccaagaugucugagugugugcugggccagagcaagagaguggacuuuugcggcaagggcuaccaccugaugagcuucccucagucugccccucacggcgugguguuucugcacgugacauaugugcccgcucaagagaagaauuucaccaccgcuccagccaucugccacgacggcaaagcccacuuuccuagagaaggcguguucguguccaacggcacccauugguucgugacacagcggaacuucuacgagccccagaucaucaccaccgacaacaccuucgugucuggcaacugcgacgucgugaucggcauugugaacaauaccguguacgacccucugcagcccgagcuggacagcuucaaagaggaacuggacaaguacuuuaagaaccacacaagccccgacguggaccugggcgauaucagcggaaucaaugccagcgucgugaacauccagaaagagaucgaccggcugaacgagguggccaagaaucugaacgagagccugaucgaccugcaagaacuggggaaguacgagcaguacaucaaguggcccugguacaucuggcugggcuuuaucgccggacugauugccaucgugauggucacaaucaugcuguguugcaugaccagcugcuguagcugccugaagggcuguuguagcuguggcagcugcugcaaguucgacgaggacgauucugagcccgugcugaagggcgugaaacugcacuacacaugaggacuagucccuguucccagagcccacuuuuuuuucuuuuuuugaaauaaaauagccugucuuucagaucuaaaaaaaaaaaaaaaaaaaaaaaaaaaaaaaaaaaaaaaaaaaaaaaaaaaaaaaaaaaaaaaaaaaaaaaaaaaaaaaaaaaaaaaaaaaaaaaaaaaa

SEQ ID NO: 24938 - RNA, 4064 nt, Artificial Sequence
  SARS-CoV-2/Wuhan/WIV05/2019__EPI_ISL_402128 spike protein mRNA gc mod (1-1273)(K986P_V987P_H69del_V70del_Y453F_D614G_I692V_M1229I)
aggagagucccgcagucggcguccagcggcucugcuuguucgugugugugucguugcaggccuuauucaagcuuaccauguucguguuccuggugcugcugccucugguguccagccagugugugaaccugaccaccagaacacagcugccuccagccuacaccaacagcuuuaccagaggcguguacuaccccgacaagguguucagauccagcgugcugcacucuacccaggaccuguuccugccuuucuucagcaacgugaccugguuccacgccaucuccggcaccaauggcaccaagagauucgacaaccccgugcugcccuucaacgacgggguguacuuugccagcaccgagaaguccaacaucaucagaggcuggaucuucggcaccacacuggacagcaagacccagagccugcugaucgugaacaacgccaccaacguggucaucaaagugugcgaguuccaguucugcaacgaccccuuccugggcgucuacuaccacaagaacaacaagagcuggauggaaagcgaguuccggguguacagcagcgccaacaacugcaccuucgaguacgugucccagccuuuccugauggaccuggaaggcaagcagggcaacuucaagaaccugcgcgaguucguguuuaagaacaucgacggcuacuucaagaucuacagcaagcacaccccuaucaaccucgugcgggaucugccucagggcuucucugcucuggaaccccugguggaucugcccaucggcaucaacaucacccgguuucagacacugcuggcccugcacagaagcuaccugacaccuggcgauagcagcagcggauggacagcuggugccgccgcuuacuaugugggcuaccugcagccuagaaccuuccugcugaaguacaacgagaacggcaccaucaccgacgccguggauugugcucuggauccucugagcgagacaaagugcacccugaaguccuucaccguggaaaagggcaucuaccagaccagcaacuuccgggugcagcccaccgaauccaucgugcgguuccccaauaucaccaaucugugccccuucggcgagguguucaaugccaccagauucgccucuguguacgccuggaaccggaagcggaucagcaauugcguggccgacuacuccgugcuguacaacuccgccagcuucagcaccuucaagugcuacggcguguccccuaccaagcugaacgaccugugcuucacaaacguguacgccgacagcuucgugauccggggagaugaagugcggcagauugccccuggacagacaggcaagaucgccgacuacaacuacaagcugcccgacgacuucaccggcugugugauugccuggaacagcaacaaccuggacuccaaagucggcggcaacuacaauuaccuguuccggcuguuccggaaguccaaucugaagcccuucgagcgggacaucuccaccgagaucuaucaggccggcagcaccccuuguaacggcguggaaggcuucaacugcuacuucccacugcaguccuacggcuuucagcccacaaauggcgugggcuaucagcccuacagagugguggugcugagcuucgaacugcugcaugccccugccacagugugcggcccuaagaaaagcaccaaucucgugaagaacaaaugcgugaacuucaacuucaacggccugaccggcaccggcgugcugacagagagcaacaagaaguuccugccauuccagcaguuuggccgggauaucgccgauaccacagacgccguuagagauccccagacacuggaaauccuggacaucaccccuugcagcuucggcggagugucugugaucaccccuggcaccaacaccagcaaucagguggcagugcuguaccagggcgugaacuguaccgaagugcccguggccauucacgccgaucagcugacaccuacauggcggguguacuccaccggcagcaauguguuucagaccagagccggcugucugaucggagccgagcacgugaacaauagcuacgagugcgacauccccaucggcgcuggaaucugcgccagcuaccagacacagacaaacagcccucggagagccagaagcguggccagccagagcgugauugccuacacaaugucucugggcgccgagaacagcguggccuacuccaacaacucuaucgcuauccccaccaacuucaccaucagcgugaccacagagauccugccuguguccaugaccaagaccagcguggacugcaccauguacaucugcggcgauuccaccgagugcuccaaccugcugcugcaguacggcagcuucugcacccagcugaauagagcccugacagggaucgccguggaacaggacaagaacacccaagagguguucgcccaagugaagcagaucuacaagaccccuccuaucaaggacuucggcggcuucaauuucagccagauucugcccgauccuagcaagcccagcaagcggagcuucaucgaggaccugcuguucaacaaagugacacuggccgacgccggcuucaucaagcaguauggcgauugucugggcgacauugccgccagggaucugauuugcgcccagaaguuuaacggacugacagugcugccuccucugcugaccgaugagaugaucgcccaguacacaucugcccugcuggccggcacaaucacaagcggcuggacauuuggagcaggcgccgcucugcagauccccuuugcuaugcagauggccuaccgguucaacggcaucggagugacccagaaugugcuguacgagaaccagaagcugaucgccaaccaguucaacagcgccaucggcaagauccaggacagccugagcagcacagcaagcgcccugggaaagcugcaggacguggucaaccagaaugcccaggcacugaacacccuggucaagcagcuguccuccaacuucggcgccaucagcucugugcugaacgauauccugagcagacuggacccuccugaggccgaggugcagaucgacagacugaucacaggcagacugcagagccuccagacauacgugacccagcagcugaucagagccgccgagauuagagccucugccaaucuggccgccaccaagaugucugagugugugcugggccagagcaagagaguggacuuuugcggcaagggcuaccaccugaugagcuucccucagucugccccucacggcgugguguuucugcacgugacauaugugcccgcucaagagaagaauuucaccaccgcuccagccaucugccacgacggcaaagcccacuuuccuagagaaggcguguucguguccaacggcacccauugguucgugacacagcggaacuucuacgagccccagaucaucaccaccgacaacaccuucgugucuggcaacugcgacgucgugaucggcauugugaacaauaccguguacgacccucugcagcccgagcuggacagcuucaaagaggaacuggacaaguacuuuaagaaccacacaagccccgacguggaccugggcgauaucagcggaaucaaugccagcgucgugaacauccagaaagagaucgaccggcugaacgagguggccaagaaucugaacgagagccugaucgaccugcaagaacuggggaaguacgagcaguacaucaaguggcccugguacaucuggcugggcuuuaucgccggacugauugccaucgugaucgucacaaucaugcuguguugcaugaccagcugcuguagcugccugaagggcuguuguagcuguggcagcugcugcaaguucgacgaggacgauucugagcccgugcugaagggcgugaaacugcacuacacaugaggacuagucccuguucccagagcccacuuuuuuuucuuuuuuugaaauaaaauagccugucuuucagaucuaaaaaaaaaaaaaaaaaaaaaaaaaaaaaaaaaaaaaaaaaaaaaaaaaaaaaaaaaaaaaaaaaaaaaaaaaaaaaaaaaaaaaaaaaaaaaaaaaaaa

SEQ ID NO: 24939 - RNA, 4061 nt, Artificial Sequence
  SARS-CoV-2/Wuhan/WIV05/2019__EPI_ISL_402128 spike protein mRNA gc mod (1-1273)(K986P_V987P_K986P_V987P_H69del_V70del_Y144del_N501Y_A570 D_D614G_P681H_T716I_S982A_D1118H)
aggagagucccgcagucggcguccagcggcucugcuuguucgugugugugucguugcaggccuuauucaagcuuaccauguucguguuccuggugcugcugccucugguguccagccagugugugaaccugaccaccagaacacagcugccuccagccuacaccaacagcuuuaccagaggcguguacuaccccgacaagguguucagauccagcgugcugcacucuacccaggaccuguuccugccuuucuucagcaacgugaccugguuccacgccaucuccggcaccaauggcaccaagagauucgacaaccccgugcugcccuucaacgacgggguguacuuugccagcaccgagaaguccaacaucaucagaggcuggaucuucggcaccacacuggacagcaagacccagagccugcugaucgugaacaacgccaccaacguggucaucaaagugugcgaguuccaguucugcaacgaccccuuccugggcgucuaccacaagaacaacaagagcuggauggaaagcgaguuccggguguacagcagcgccaacaacugcaccuucgaguacgugucccagccuuuccugauggaccuggaaggcaagcagggcaacuucaagaaccugcgcgaguucguguuuaagaacaucgacggcuacuucaagaucuacagcaagcacaccccuaucaaccucgugcgggaucugccucagggcuucucugcucuggaaccccugguggaucugcccaucggcaucaacaucacccgguuucagacacugcuggcccugcacagaagcuaccugacaccuggcgauagcagcagcggauggacagcuggugccgccgcuuacuaugugggcuaccugcagccuagaaccuuccugcugaaguacaacgagaacggcaccaucaccgacgccguggauugugcucuggauccucugagcgagacaaagugcacccugaaguccuucaccguggaaaagggcaucuaccagaccagcaacuuccgggugcagcccaccgaauccaucgugcgguuccccaauaucaccaaucugugccccuucggcgagguguucaaugccaccagauucgccucuguguacgccuggaaccggaagcggaucagcaauugcguggccgacuacuccgugcuguacaacuccgccagcuucagcaccuucaagugcuacggcguguccccuaccaagcugaacgaccugugcuucacaaacguguacgccgacagcuucgugauccggggagaugaagugcggcagauugccccuggacagacaggcaagaucgccgacuacaacuacaagcugcccgacgacuucaccggcugugugauugccuggaacagcaacaaccuggacuccaaagucggcggcaacuacaauuaccuguaccggcuguuccggaaguccaaucugaagcccuucgagcgggacaucuccaccgagaucuaucaggccggcagcaccccuuguaacggcguggaaggcuucaacugcuacuucccacugcaguccuacggcuuucagcccacauacggcgugggcuaucagcccuacagagugguggugcugagcuucgaacugcugcaugccccugccacagugugcggcccuaagaaaagcaccaaucucgugaagaacaaaugcgugaacuucaacuucaacggccugaccggcaccggcgugcugacagagagcaacaagaaguuccugccauuccagcaguuuggccgggauaucgacgauaccacagacgccguuagagauccccagacacuggaaauccuggacaucaccccuugcagcuucggcggagugucugugaucaccccuggcaccaacaccagcaaucagguggcagugcuguaccagggcgugaacuguaccgaagugcccguggccauucacgccgaucagcugacaccuacauggcggguguacuccaccggcagcaauguguuucagaccagagccggcugucugaucggagccgagcacgugaacaauagcuacgagugcgacauccccaucggcgcuggaaucugcgccagcuaccagacacagacaaacagccaccggagagccagaagcguggccagccagagcaucauugccuacacaaugucucugggcgccgagaacagcguggccuacuccaacaacucuaucgcuauccccaucaacuucaccaucagcgugaccacagagauccugccuguguccaugaccaagaccagcguggacugcaccauguacaucugcggcgauuccaccgagugcuccaaccugcugcugcaguacggcagcuucugcacccagcugaauagagcccugacagggaucgccguggaacaggacaagaacacccaagagguguucgcccaagugaagcagaucuacaagaccccuccuaucaaggacuucggcggcuucaauuucagccagauucugcccgauccuagcaagcccagcaagcggagcuucaucgaggaccugcuguucaacaaagugacacuggccgacgccggcuucaucaagcaguauggcgauugucugggcgacauugccgccagggaucugauuugcgcccagaaguuuaacggacugacagugcugccuccucugcugaccgaugagaugaucgcccaguacacaucugcccugcuggccggcacaaucacaagcggcuggacauuuggagcaggcgccgcucugcagauccccuuugcuaugcagauggccuaccgguucaacggcaucggagugacccagaaugugcuguacgagaaccagaagcugaucgccaaccaguucaacagcgccaucggcaagauccaggacagccugagcagcacagcaagcgcccugggaaagcugcaggacguggucaaccagaaugcccaggcacugaacacccuggucaagcagcuguccuccaacuucggcgccaucagcucugugcugaacgauauccuggccagacuggacccuccugaggccgaggugcagaucgacagacugaucacaggcagacugcagagccuccagacauacgugacccagcagcugaucagagccgccgagauuagagccucugccaaucuggccgccaccaagaugucugagugugugcugggccagagcaagagaguggacuuuugcggcaagggcuaccaccugaugagcuucccucagucugccccucacggcgugguguuucugcacgugacauaugugcccgcucaagagaagaauuucaccaccgcuccagccaucugccacgacggcaaagcccacuuuccuagagaaggcguguucguguccaacggcacccauugguucgugacacagcggaacuucuacgagccccagaucaucaccacccacaacaccuucgugucuggcaacugcgacgucgugaucggcauugugaacaauaccguguacgacccucugcagcccgagcuggacagcuucaaagaggaacuggacaaguacuuuaagaaccacacaagccccgacguggaccugggcgauaucagcggaaucaaugccagcgucgugaacauccagaaagagaucgaccggcugaacgagguggccaagaaucugaacgagagccugaucgaccugcaagaacuggggaaguacgagcaguacaucaaguggcccugguacaucuggcugggcuuuaucgccggacugauugccaucgugauggucacaaucaugcuguguugcaugaccagcugcuguagcugccugaagggcuguuguagcuguggcagcugcugcaaguucgacgaggacgauucugagcccgugcugaagggcgugaaacugcacuacacaugaggacuagucccuguucccagagcccacuuuuuuuucuuuuuuugaaauaaaauagccugucuuucagaucuaaaaaaaaaaaaaaaaaaaaaaaaaaaaaaaaaaaaaaaaaaaaaaaaaaaaaaaaaaaaaaaaaaaaaaaaaaaaaaaaaaaaaaaaaaaaaaaaaaaa

SEQ ID NO: 24940 - RNA, 4070 nt, Artificial Sequence
  SARS-CoV-2/Wuhan/WIV05/2019__EPI_ISL_402128 spike protein mRNA gc mod (1-1273)(K986P_V987P_K986P_V987P_K417N_E484K_N501Y_D614G)
aggagagucccgcagucggcguccagcggcucugcuuguucgugugugugucguugcaggccuuauucaagcuuaccauguucguguuccuggugcugcugccucugguguccagccagugugugaaccugaccaccagaacacagcugccuccagccuacaccaacagcuuuaccagaggcguguacuaccccgacaagguguucagauccagcgugcugcacucuacccaggaccuguuccugccuuucuucagcaacgugaccugguuccacgccauccacguguccggcaccaauggcaccaagagauucgacaaccccgugcugcccuucaacgacgggguguacuuugccagcaccgagaaguccaacaucaucagaggcuggaucuucggcaccacacuggacagcaagacccagagccugcugaucgugaacaacgccaccaacguggucaucaaagugugcgaguuccaguucugcaacgaccccuuccugggcgucuacuaccacaagaacaacaagagcuggauggaaagcgaguuccggguguacagcagcgccaacaacugcaccuucgaguacgugucccagccuuuccugauggaccuggaaggcaagcagggcaacuucaagaaccugcgcgaguucguguuuaagaacaucgacggcuacuucaagaucuacagcaagcacaccccuaucaaccucgugcgggaucugccucagggcuucucugcucuggaaccccugguggaucugcccaucggcaucaacaucacccgguuucagacacugcuggcccugcacagaagcuaccugacaccuggcgauagcagcagcggauggacagcuggugccgccgcuuacuaugugggcuaccugcagccuagaaccuuccugcugaaguacaacgagaacggcaccaucaccgacgccguggauugugcucuggauccucugagcgagacaaagugcacccugaaguccuucaccguggaaaagggcaucuaccagaccagcaacuuccgggugcagcccaccgaauccaucgugcgguuccccaauaucaccaaucugugccccuucggcgagguguucaaugccaccagauucgccucuguguacgccuggaaccggaagcggaucagcaauugcguggccgacuacuccgugcuguacaacuccgccagcuucagcaccuucaagugcuacggcguguccccuaccaagcugaacgaccugugcuucacaaacguguacgccgacagcuucgugauccggggagaugaagugcggcagauugccccuggacagacaggcaacaucgccgacuacaacuacaagcugcccgacgacuucaccggcugugugauugccuggaacagcaacaaccuggacuccaaagucggcggcaacuacaauuaccuguaccggcuguuccggaaguccaaucugaagcccuucgagcgggacaucuccaccgagaucuaucaggccggcagcaccccuuguaacggcgugaagggcuucaacugcuacuucccacugcaguccuacggcuuucagcccacauacggcgugggcuaucagcccuacagagugguggugcugagcuucgaacugcugcaugccccugccacagugugcggcccuaagaaaagcaccaaucucgugaagaacaaaugcgugaacuucaacuucaacggccugaccggcaccggcgugcugacagagagcaacaagaaguuccugccauuccagcaguuuggccgggauaucgccgauaccacagacgccguuagagauccccagacacuggaaauccuggacaucaccccuugcagcuucggcggagugucugugaucaccccuggcaccaacaccagcaaucagguggcagugcuguaccagggcgugaacuguaccgaagugcccguggccauucacgccgaucagcugacaccuacauggcggguguacuccaccggcagcaauguguuucagaccagagccggcugucugaucggagccgagcacgugaacaauagcuacgagugcgacauccccaucggcgcuggaaucugcgccagcuaccagacacagacaaacagcccucggagagccagaagcguggccagccagagcaucauugccuacacaaugucucugggcgccgagaacagcguggccuacuccaacaacucuaucgcuauccccaccaacuucaccaucagcgugaccacagagauccugccuguguccaugaccaagaccagcguggacugcaccauguacaucugcggcgauuccaccgagugcuccaaccugcugcugcaguacggcagcuucugcacccagcugaauagagcccugacagggaucgccguggaacaggacaagaacacccaagagguguucgcccaagugaagcagaucuacaagaccccuccuaucaaggacuucggcggcuucaauuucagccagauucugcccgauccuagcaagcccagcaagcggagcuucaucgaggaccugcuguucaacaaagugacacuggccgacgccggcuucaucaagcaguauggcgauugucugggcgacauugccgccagggaucugauuugcgcccagaaguuuaacggacugacagugcugccuccucugcugaccgaugagaugaucgcccaguacacaucugcccugcuggccggcacaaucacaagcggcuggacauuuggagcaggcgccgcucugcagauccccuuugcuaugcagauggccuaccgguucaacggcaucggagugacccagaaugugcuguacgagaaccagaagcugaucgccaaccaguucaacagcgccaucggcaagauccaggacagccugagcagcacagcaagcgcccugggaaagcugcaggacguggucaaccagaaugcccaggcacugaacacccuggucaagcagcuguccuccaacuucggcgccaucagcucugugcugaacgauauccugagcagacuggacccuccugaggccgaggugcagaucgacagacugaucacaggcagacugcagagccuccagacauacgugacccagcagcugaucagagccgccgagauuagagccucugccaaucuggccgccaccaagaugucugagugugugcugggccagagcaagagaguggacuuuugcggcaagggcuaccaccugaugagcuucccucagucugccccucacggcgugguguuucugcacgugacauaugugcccgcucaagagaagaauuucaccaccgcuccagccaucugccacgacggcaaagcccacuuuccuagagaaggcguguucguguccaacggcacccauugguucgugacacagcggaacuucuacgagccccagaucaucaccaccgacaacaccuucgugucuggcaacugcgacgucgugaucggcauugugaacaauaccguguacgacccucugcagcccgagcuggacagcuucaaagaggaacuggacaaguacuuuaagaaccacacaagccccgacguggaccugggcgauaucagcggaaucaaugccagcgucgugaacauccagaaagagaucgaccggcugaacgagguggccaagaaucugaacgagagccugaucgaccugcaagaacuggggaaguacgagcaguacaucaaguggcccugguacaucuggcugggcuuuaucgccggacugauugccaucgugauggucacaaucaugcuguguugcaugaccagcugcuguagcugccugaagggcuguuguagcuguggcagcugcugcaaguucgacgaggacgauucugagcccgugcugaagggcgugaaacugcacuacacaugaggacuagucccuguucccagagcccacuuuuuuuucuuuuuuugaaauaaaauagccugucuuucagaucuaaaaaaaaaaaaaaaaaaaaaaaaaaaaaaaaaaaaaaaaaaaaaaaaaaaaaaaaaaaaaaaaaaaaaaaaaaaaaaaaaaaaaaaaaaaaaaaaaaaa

SEQ ID NO: 24941 - RNA, 4061 nt, Artificial Sequence
  SARS-CoV-2/Wuhan/WIV05/2019__EPI_ISL_402128 spike protein mRNA gc mod (1-1273)(K986P_V987P_K986P_V987P_L18F_D80A_D215G_L242del_A243del_ L244del_R246I_K417N_E484K_N501Y_D614G_A701V)
aggagagucccgcagucggcguccagcggcucugcuuguucgugugugugucguugcaggccuuauucaagcuuaccauguucguguuccuggugcugcugccucugguguccagccagugugugaacuucaccaccagaacacagcugccuccagccuacaccaacagcuuuaccagaggcguguacuaccccgacaagguguucagauccagcgugcugcacucuacccaggaccuguuccugccuuucuucagcaacgugaccugguuccacgccauccacguguccggcaccaauggcaccaagagauucgccaaccccgugcugcccuucaacgacgggguguacuuugccagcaccgagaaguccaacaucaucagaggcuggaucuucggcaccacacuggacagcaagacccagagccugcugaucgugaacaacgccaccaacguggucaucaaagugugcgaguuccaguucugcaacgaccccuuccugggcgucuacuaccacaagaacaacaagagcuggauggaaagcgaguuccggguguacagcagcgccaacaacugcaccuucgaguacgugucccagccuuuccugauggaccuggaaggcaagcagggcaacuucaagaaccugcgcgaguucguguuuaagaacaucgacggcuacuucaagaucuacagcaagcacaccccuaucaaccucgugcggggccugccucagggcuucucugcucuggaaccccugguggaucugcccaucggcaucaacaucacccgguuucagacacugcacaucagcuaccugacaccuggcgauagcagcagcggauggacagcuggugccgccgcuuacuaugugggcuaccugcagccuagaaccuuccugcugaaguacaacgagaacggcaccaucaccgacgccguggauugugcucuggauccucugagcgagacaaagugcacccugaaguccuucaccguggaaaagggcaucuaccagaccagcaacuuccgggugcagcccaccgaauccaucgugcgguuccccaauaucaccaaucugugccccuucggcgagguguucaaugccaccagauucgccucuguguacgccuggaaccggaagcggaucagcaauugcguggccgacuacuccgugcuguacaacuccgccagcuucagcaccuucaagugcuacggcguguccccuaccaagcugaacgaccugugcuucacaaacguguacgccgacagcuucgugauccggggagaugaagugcggcagauugccccuggacagacaggcaacaucgccgacuacaacuacaagcugcccgacgacuucaccggcugugugauugccuggaacagcaacaaccuggacuccaaagucggcggcaacuacaauuaccuguaccggcuguuccggaaguccaaucugaagcccuucgagcgggacaucuccaccgagaucuaucaggccggcagcaccccuuguaacggcgugaagggcuucaacugcuacuucccacugcaguccuacggcuuucagcccacauacggcgugggcuaucagcccuacagagugguggugcugagcuucgaacugcugcaugccccugccacagugugcggcccuaagaaaagcaccaaucucgugaagaacaaaugcgugaacuucaacuucaacggccugaccggcaccggcgugcugacagagagcaacaagaaguuccugccauuccagcaguuuggccgggauaucgccgauaccacagacgccguuagagauccccagacacuggaaauccuggacaucaccccuugcagcuucggcggagugucugugaucaccccuggcaccaacaccagcaaucagguggcagugcuguaccagggcgugaacuguaccgaagugcccguggccauucacgccgaucagcugacaccuacauggcggguguacuccaccggcagcaauguguuucagaccagagccggcugucugaucggagccgagcacgugaacaauagcuacgagugcgacauccccaucggcgcuggaaucugcgccagcuaccagacacagacaaacagcccucggagagccagaagcguggccagccagagcaucauugccuacacaaugucucugggcguggagaacagcguggccuacuccaacaacucuaucgcuauccccaccaacuucaccaucagcgugaccacagagauccugccuguguccaugaccaagaccagcguggacugcaccauguacaucugcggcgauuccaccgagugcuccaaccugcugcugcaguacggcagcuucugcacccagcugaauagagcccugacagggaucgccguggaacaggacaagaacacccaagagguguucgcccaagugaagcagaucuacaagaccccuccuaucaaggacuucggcggcuucaauuucagccagauucugcccgauccuagcaagcccagcaagcggagcuucaucgaggaccugcuguucaacaaagugacacuggccgacgccggcuucaucaagcaguauggcgauugucugggcgacauugccgccagggaucugauuugcgcccagaaguuuaacggacugacagugcugccuccucugcugaccgaugagaugaucgcccaguacacaucugcccugcuggccggcacaaucacaagcggcuggacauuuggagcaggcgccgcucugcagauccccuuugcuaugcagauggccuaccgguucaacggcaucggagugacccagaaugugcuguacgagaaccagaagcugaucgccaaccaguucaacagcgccaucggcaagauccaggacagccugagcagcacagcaagcgcccugggaaagcugcaggacguggucaaccagaaugcccaggcacugaacacccuggucaagcagcuguccuccaacuucggcgccaucagcucugugcugaacgauauccugagcagacuggacccuccugaggccgaggugcagaucgacagacugaucacaggcagacugcagagccuccagacauacgugacccagcagcugaucagagccgccgagauuagagccucugccaaucuggccgccaccaagaugucugagugugugcugggccagagcaagagaguggacuuuugcggcaagggcuaccaccugaugagcuucccucagucugccccucacggcgugguguuucugcacgugacauaugugcccgcucaagagaagaauuucaccaccgcuccagccaucugccacgacggcaaagcccacuuuccuagagaaggcguguucguguccaacggcacccauugguucgugacacagcggaacuucuacgagccccagaucaucaccaccgacaacaccuucgugucuggcaacugcgacgucgugaucggcauugugaacaauaccguguacgacccucugcagcccgagcuggacagcuucaaagaggaacuggacaaguacuuuaagaaccacacaagccccgacguggaccugggcgauaucagcggaaucaaugccagcgucgugaacauccagaaagagaucgaccggcugaacgagguggccaagaaucugaacgagagccugaucgaccugcaagaacuggggaaguacgagcaguacaucaaguggcccugguacaucuggcugggcuuuaucgccggacugauugccaucgugauggucacaaucaugcuguguugcaugaccagcugcuguagcugccugaagggcuguuguagcuguggcagcugcugcaaguucgacgaggacgauucugagcccgugcugaagggcgugaaacugcacuacacaugaggacuagucccuguucccagagcccacuuuuuuuucuuuuuuugaaauaaaauagccugucuuucagaucuaaaaaaaaaaaaaaaaaaaaaaaaaaaaaaaaaaaaaaaaaaaaaaaaaaaaaaaaaaaaaaaaaaaaaaaaaaaaaaaaaaaaaaaaaaaaaaaaaaaa

SEQ ID NO: 24942 - RNA, 4070 nt, Artificial Sequence
  SARS-CoV-2/Wuhan/WIV05/2019__EPI_ISL_402128 spike protein mRNA gc mod (1-1273)(K986P_V987P_K986P_V987P_E484K_D614G)
aggagagucccgcagucggcguccagcggcucugcuuguucgugugugugucguugcaggccuuauucaagcuuaccauguucguguuccuggugcugcugccucugguguccagccagugugugaaccugaccaccagaacacagcugccuccagccuacaccaacagcuuuaccagaggcguguacuaccccgacaagguguucagauccagcgugcugcacucuacccaggaccuguuccugccuuucuucagcaacgugaccugguuccacgccauccacguguccggcaccaauggcaccaagagauucgacaaccccgugcugcccuucaacgacgggguguacuuugccagcaccgagaaguccaacaucaucagaggcuggaucuucggcaccacacuggacagcaagacccagagccugcugaucgugaacaacgccaccaacguggucaucaaagugugcgaguuccaguucugcaacgaccccuuccugggcgucuacuaccacaagaacaacaagagcuggauggaaagcgaguuccggguguacagcagcgccaacaacugcaccuucgaguacgugucccagccuuuccugauggaccuggaaggcaagcagggcaacuucaagaaccugcgcgaguucguguuuaagaacaucgacggcuacuucaagaucuacagcaagcacaccccuaucaaccucgugcgggaucugccucagggcuucucugcucuggaaccccugguggaucugcccaucggcaucaacaucacccgguuucagacacugcuggcccugcacagaagcuaccugacaccuggcgauagcagcagcggauggacagcuggugccgccgcuuacuaugugggcuaccugcagccuagaaccuuccugcugaaguacaacgagaacggcaccaucaccgacgccguggauugugcucuggauccucugagcgagacaaagugcacccugaaguccuucaccguggaaaagggcaucuaccagaccagcaacuuccgggugcagcccaccgaauccaucgugcgguuccccaauaucaccaaucugugccccuucggcgagguguucaaugccaccagauucgccucuguguacgccuggaaccggaagcggaucagcaauugcguggccgacuacuccgugcuguacaacuccgccagcuucagcaccuucaagugcuacggcguguccccuaccaagcugaacgaccugugcuucacaaacguguacgccgacagcuucgugauccggggagaugaagugcggcagauugccccuggacagacaggcaagaucgccgacuacaacuacaagcugcccgacgacuucaccggcugugugauugccuggaacagcaacaaccuggacuccaaagucggcggcaacuacaauuaccuguaccggcuguuccggaaguccaaucugaagcccuucgagcgggacaucuccaccgagaucuaucaggccggcagcaccccuuguaacggcgugaagggcuucaacugcuacuucccacugcaguccuacggcuuucagcccacaaauggcgugggcuaucagcccuacagagugguggugcugagcuucgaacugcugcaugccccugccacagugugcggcccuaagaaaagcaccaaucucgugaagaacaaaugcgugaacuucaacuucaacggccugaccggcaccggcgugcugacagagagcaacaagaaguuccugccauuccagcaguuuggccgggauaucgccgauaccacagacgccguuagagauccccagacacuggaaauccuggacaucaccccuugcagcuucggcggagugucugugaucaccccuggcaccaacaccagcaaucagguggcagugcuguaccagggcgugaacuguaccgaagugcccguggccauucacgccgaucagcugacaccuacauggcggguguacuccaccggcagcaauguguuucagaccagagccggcugucugaucggagccgagcacgugaacaauagcuacgagugcgacauccccaucggcgcuggaaucugcgccagcuaccagacacagacaaacagcccucggagagccagaagcguggccagccagagcaucauugccuacacaaugucucugggcgccgagaacagcguggccuacuccaacaacucuaucgcuauccccaccaacuucaccaucagcgugaccacagagauccugccuguguccaugaccaagaccagcguggacugcaccauguacaucugcggcgauuccaccgagugcuccaaccugcugcugcaguacggcagcuucugcacccagcugaauagagcccugacagggaucgccguggaacaggacaagaacacccaagagguguucgcccaagugaagcagaucuacaagaccccuccuaucaaggacuucggcggcuucaauuucagccagauucugcccgauccuagcaagcccagcaagcggagcuucaucgaggaccugcuguucaacaaagugacacuggccgacgccggcuucaucaagcaguauggcgauugucugggcgacauugccgccagggaucugauuugcgcccagaaguuuaacggacugacagugcugccuccucugcugaccgaugagaugaucgcccaguacacaucugcccugcuggccggcacaaucacaagcggcuggacauuuggagcaggcgccgcucugcagauccccuuugcuaugcagauggccuaccgguucaacggcaucggagugacccagaaugugcuguacgagaaccagaagcugaucgccaaccaguucaacagcgccaucggcaagauccaggacagccugagcagcacagcaagcgcccugggaaagcugcaggacguggucaaccagaaugcccaggcacugaacacccuggucaagcagcuguccuccaacuucggcgccaucagcucugugcugaacgauauccugagcagacuggacccuccugaggccgaggugcagaucgacagacugaucacaggcagacugcagagccuccagacauacgugacccagcagcugaucagagccgccgagauuagagccucugccaaucuggccgccaccaagaugucugagugugugcugggccagagcaagagaguggacuuuugcggcaagggcuaccaccugaugagcuucccucagucugccccucacggcgugguguuucugcacgugacauaugugcccgcucaagagaagaauuucaccaccgcuccagccaucugccacgacggcaaagcccacuuuccuagagaaggcguguucguguccaacggcacccauugguucgugacacagcggaacuucuacgagccccagaucaucaccaccgacaacaccuucgugucuggcaacugcgacgucgugaucggcauugugaacaauaccguguacgacccucugcagcccgagcuggacagcuucaaagaggaacuggacaaguacuuuaagaaccacacaagccccgacguggaccugggcgauaucagcggaaucaaugccagcgucgugaacauccagaaagagaucgaccggcugaacgagguggccaagaaucugaacgagagccugaucgaccugcaagaacuggggaaguacgagcaguacaucaaguggcccugguacaucuggcugggcuuuaucgccggacugauugccaucgugauggucacaaucaugcuguguugcaugaccagcugcuguagcugccugaagggcuguuguagcuguggcagcugcugcaaguucgacgaggacgauucugagcccgugcugaagggcgugaaacugcacuacacaugaggacuagucccuguucccagagcccacuuuuuuuucuuuuuuugaaauaaaauagccugucuuucagaucuaaaaaaaaaaaaaaaaaaaaaaaaaaaaaaaaaaaaaaaaaaaaaaaaaaaaaaaaaaaaaaaaaaaaaaaaaaaaaaaaaaaaaaaaaaaaaaaaaaaa

SEQ ID NO: 24943 - RNA, 4070 nt, Artificial Sequence
  SARS-CoV-2/Wuhan/WIV05/2019__EPI_ISL_402128 spike protein mRNA gc mod (1-1273)(K986P_V987P_K986P_V987P_L18F_T20N_P26S_D138Y_R190S_K417T _E484K_N501Y_D614G_H655Y_T1027I)
aggagagucccgcagucggcguccagcggcucugcuuguucgugugugugucguugcaggccuuauucaagcuuaccauguucguguuccuggugcugcugccucugguguccagccagugugugaacuucaccaacagaacacagcugccuagcgccuacaccaacagcuuuaccagaggcguguacuaccccgacaagguguucagauccagcgugcugcacucuacccaggaccuguuccugccuuucuucagcaacgugaccugguuccacgccauccacguguccggcaccaauggcaccaagagauucgacaaccccgugcugcccuucaacgacgggguguacuuugccagcaccgagaaguccaacaucaucagaggcuggaucuucggcaccacacuggacagcaagacccagagccugcugaucgugaacaacgccaccaacguggucaucaaagugugcgaguuccaguucugcaacuaccccuuccugggcgucuacuaccacaagaacaacaagagcuggauggaaagcgaguuccggguguacagcagcgccaacaacugcaccuucgaguacgugucccagccuuuccugauggaccuggaaggcaagcagggcaacuucaagaaccugagcgaguucguguuuaagaacaucgacggcuacuucaagaucuacagcaagcacaccccuaucaaccucgugcgggaucugccucagggcuucucugcucuggaaccccugguggaucugcccaucggcaucaacaucacccgguuucagacacugcuggcccugcacagaagcuaccugacaccuggcgauagcagcagcggauggacagcuggugccgccgcuuacuaugugggcuaccugcagccuagaaccuuccugcugaaguacaacgagaacggcaccaucaccgacgccguggauugugcucuggauccucugagcgagacaaagugcacccugaaguccuucaccguggaaaagggcaucuaccagaccagcaacuuccgggugcagcccaccgaauccaucgugcgguuccccaauaucaccaaucugugccccuucggcgagguguucaaugccaccagauucgccucuguguacgccuggaaccggaagcggaucagcaauugcguggccgacuacuccgugcuguacaacuccgccagcuucagcaccuucaagugcuacggcguguccccuaccaagcugaacgaccugugcuucacaaacguguacgccgacagcuucgugauccggggagaugaagugcggcagauugccccuggacagacaggcaccaucgccgacuacaacuacaagcugcccgacgacuucaccggcugugugauugccuggaacagcaacaaccuggacuccaaagucggcggcaacuacaauuaccuguaccggcuguuccggaaguccaaucugaagcccuucgagcgggacaucuccaccgagaucuaucaggccggcagcaccccuuguaacggcgugaagggcuucaacugcuacuucccacugcaguccuacggcuuucagcccacauacggcgugggcuaucagcccuacagagugguggugcugagcuucgaacugcugcaugccccugccacagugugcggcccuaagaaaagcaccaaucucgugaagaacaaaugcgugaacuucaacuucaacggccugaccggcaccggcgugcugacagagagcaacaagaaguuccugccauuccagcaguuuggccgggauaucgccgauaccacagacgccguuagagauccccagacacuggaaauccuggacaucaccccuugcagcuucggcggagugucugugaucaccccuggcaccaacaccagcaaucagguggcagugcuguaccagggcgugaacuguaccgaagugcccguggccauucacgccgaucagcugacaccuacauggcggguguacuccaccggcagcaauguguuucagaccagagccggcugucugaucggagccgaguacgugaacaauagcuacgagugcgacauccccaucggcgcuggaaucugcgccagcuaccagacacagacaaacagcccucggagagccagaagcguggccagccagagcaucauugccuacacaaugucucugggcgccgagaacagcguggccuacuccaacaacucuaucgcuauccccaccaacuucaccaucagcgugaccacagagauccugccuguguccaugaccaagaccagcguggacugcaccauguacaucugcggcgauuccaccgagugcuccaaccugcugcugcaguacggcagcuucugcacccagcugaauagagcccugacagggaucgccguggaacaggacaagaacacccaagagguguucgcccaagugaagcagaucuacaagaccccuccuaucaaggacuucggcggcuucaauuucagccagauucugcccgauccuagcaagcccagcaagcggagcuucaucgaggaccugcuguucaacaaagugacacuggccgacgccggcuucaucaagcaguauggcgauugucugggcgacauugccgccagggaucugauuugcgcccagaaguuuaacggacugacagugcugccuccucugcugaccgaugagaugaucgcccaguacacaucugcccugcuggccggcacaaucacaagcggcuggacauuuggagcaggcgccgcucugcagauccccuuugcuaugcagauggccuaccgguucaacggcaucggagugacccagaaugugcuguacgagaaccagaagcugaucgccaaccaguucaacagcgccaucggcaagauccaggacagccugagcagcacagcaagcgcccugggaaagcugcaggacguggucaaccagaaugcccaggcacugaacacccuggucaagcagcuguccuccaacuucggcgccaucagcucugugcugaacgauauccugagcagacuggacccuccugaggccgaggugcagaucgacagacugaucacaggcagacugcagagccuccagacauacgugacccagcagcugaucagagccgccgagauuagagccucugccaaucuggccgccaucaagaugucugagugugugcugggccagagcaagagaguggacuuuugcggcaagggcuaccaccugaugagcuucccucagucugccccucacggcgugguguuucugcacgugacauaugugcccgcucaagagaagaauuucaccaccgcuccagccaucugccacgacggcaaagcccacuuuccuagagaaggcguguucguguccaacggcacccauugguucgugacacagcggaacuucuacgagccccagaucaucaccaccgacaacaccuucgugucuggcaacugcgacgucgugaucggcauugugaacaauaccguguacgacccucugcagcccgagcuggacagcuucaaagaggaacuggacaaguacuuuaagaaccacacaagccccgacguggaccugggcgauaucagcggaaucaaugccagcgucgugaacauccagaaagagaucgaccggcugaacgagguggccaagaaucugaacgagagccugaucgaccugcaagaacuggggaaguacgagcaguacaucaaguggcccugguacaucuggcugggcuuuaucgccggacugauugccaucgugauggucacaaucaugcuguguugcaugaccagcugcuguagcugccugaagggcuguuguagcuguggcagcugcugcaaguucgacgaggacgauucugagcccgugcugaagggcgugaaacugcacuacacaugaggacuagucccuguucccagagcccacuuuuuuuucuuuuuuugaaauaaaauagccugucuuucagaucuaaaaaaaaaaaaaaaaaaaaaaaaaaaaaaaaaaaaaaaaaaaaaaaaaaaaaaaaaaaaaaaaaaaaaaaaaaaaaaaaaaaaaaaaaaaaaaaaaaaa

SEQ ID NO: 24944 - RNA, 4070 nt, Artificial Sequence
  SARS-CoV-2/Wuhan/WIV05/2019__EPI_ISL_402128 spike protein mRNA gc mod (1-1273)(K986P_V987P_K986P_V987P_S13I_W152C_L452R_D614G)
aggagagucccgcagucggcguccagcggcucugcuuguucgugugugugucguugcaggccuuauucaagcuuaccauguucguguuccuggugcugcugccucugguguccauccagugugugaaccugaccaccagaacacagcugccuccagccuacaccaacagcuuuaccagaggcguguacuaccccgacaagguguucagauccagcgugcugcacucuacccaggaccuguuccugccuuucuucagcaacgugaccugguuccacgccauccacguguccggcaccaauggcaccaagagauucgacaaccccgugcugcccuucaacgacgggguguacuuugccagcaccgagaaguccaacaucaucagaggcuggaucuucggcaccacacuggacagcaagacccagagccugcugaucgugaacaacgccaccaacguggucaucaaagugugcgaguuccaguucugcaacgaccccuuccugggcgucuacuaccacaagaacaacaagagcugcauggaaagcgaguuccggguguacagcagcgccaacaacugcaccuucgaguacgugucccagccuuuccugauggaccuggaaggcaagcagggcaacuucaagaaccugcgcgaguucguguuuaagaacaucgacggcuacuucaagaucuacagcaagcacaccccuaucaaccucgugcgggaucugccucagggcuucucugcucuggaaccccugguggaucugcccaucggcaucaacaucacccgguuucagacacugcuggcccugcacagaagcuaccugacaccuggcgauagcagcagcggauggacagcuggugccgccgcuuacuaugugggcuaccugcagccuagaaccuuccugcugaaguacaacgagaacggcaccaucaccgacgccguggauugugcucuggauccucugagcgagacaaagugcacccugaaguccuucaccguggaaaagggcaucuaccagaccagcaacuuccgggugcagcccaccgaauccaucgugcgguuccccaauaucaccaaucugugccccuucggcgagguguucaaugccaccagauucgccucuguguacgccuggaaccggaagcggaucagcaauugcguggccgacuacuccgugcuguacaacuccgccagcuucagcaccuucaagugcuacggcguguccccuaccaagcugaacgaccugugcuucacaaacguguacgccgacagcuucgugauccggggagaugaagugcggcagauugccccuggacagacaggcaagaucgccgacuacaacuacaagcugcccgacgacuucaccggcugugugauugccuggaacagcaacaaccuggacuccaaagucggcggcaacuacaauuaccgcuaccggcuguuccggaaguccaaucugaagcccuucgagcgggacaucuccaccgagaucuaucaggccggcagcaccccuuguaacggcguggaaggcuucaacugcuacuucccacugcaguccuacggcuuucagcccacaaauggcgugggcuaucagcccuacagagugguggugcugagcuucgaacugcugcaugccccugccacagugugcggcccuaagaaaagcaccaaucucgugaagaacaaaugcgugaacuucaacuucaacggccugaccggcaccggcgugcugacagagagcaacaagaaguuccugccauuccagcaguuuggccgggauaucgccgauaccacagacgccguuagagauccccagacacuggaaauccuggacaucaccccuugcagcuucggcggagugucugugaucaccccuggcaccaacaccagcaaucagguggcagugcuguaccagggcgugaacuguaccgaagugcccguggccauucacgccgaucagcugacaccuacauggcggguguacuccaccggcagcaauguguuucagaccagagccggcugucugaucggagccgagcacgugaacaauagcuacgagugcgacauccccaucggcgcuggaaucugcgccagcuaccagacacagacaaacagcccucggagagccagaagcguggccagccagagcaucauugccuacacaaugucucugggcgccgagaacagcguggccuacuccaacaacucuaucgcuauccccaccaacuucaccaucagcgugaccacagagauccugccuguguccaugaccaagaccagcguggacugcaccauguacaucugcggcgauuccaccgagugcuccaaccugcugcugcaguacggcagcuucugcacccagcugaauagagcccugacagggaucgccguggaacaggacaagaacacccaagagguguucgcccaagugaagcagaucuacaagaccccuccuaucaaggacuucggcggcuucaauuucagccagauucugcccgauccuagcaagcccagcaagcggagcuucaucgaggaccugcuguucaacaaagugacacuggccgacgccggcuucaucaagcaguauggcgauugucugggcgacauugccgccagggaucugauuugcgcccagaaguuuaacggacugacagugcugccuccucugcugaccgaugagaugaucgcccaguacacaucugcccugcuggccggcacaaucacaagcggcuggacauuuggagcaggcgccgcucugcagauccccuuugcuaugcagauggccuaccgguucaacggcaucggagugacccagaaugugcuguacgagaaccagaagcugaucgccaaccaguucaacagcgccaucggcaagauccaggacagccugagcagcacagcaagcgcccugggaaagcugcaggacguggucaaccagaaugcccaggcacugaacacccuggucaagcagcuguccuccaacuucggcgccaucagcucugugcugaacgauauccugagcagacuggacccuccugaggccgaggugcagaucgacagacugaucacaggcagacugcagagccuccagacauacgugacccagcagcugaucagagccgccgagauuagagccucugccaaucuggccgccaccaagaugucugagugugugcugggccagagcaagagaguggacuuuugcggcaagggcuaccaccugaugagcuucccucagucugccccucacggcgugguguuucugcacgugacauaugugcccgcucaagagaagaauuucaccaccgcuccagccaucugccacgacggcaaagcccacuuuccuagagaaggcguguucguguccaacggcacccauugguucgugacacagcggaacuucuacgagccccagaucaucaccaccgacaacaccuucgugucuggcaacugcgacgucgugaucggcauugugaacaauaccguguacgacccucugcagcccgagcuggacagcuucaaagaggaacuggacaaguacuuuaagaaccacacaagccccgacguggaccugggcgauaucagcggaaucaaugccagcgucgugaacauccagaaagagaucgaccggcugaacgagguggccaagaaucugaacgagagccugaucgaccugcaagaacuggggaaguacgagcaguacaucaaguggcccugguacaucuggcugggcuuuaucgccggacugauugccaucgugauggucacaaucaugcuguguugcaugaccagcugcuguagcugccugaagggcuguuguagcuguggcagcugcugcaaguucgacgaggacgauucugagcccgugcugaagggcgugaaacugcacuacacaugaggacuagucccuguucccagagcccacuuuuuuuucuuuuuuugaaauaaaauagccugucuuucagaucuaaaaaaaaaaaaaaaaaaaaaaaaaaaaaaaaaaaaaaaaaaaaaaaaaaaaaaaaaaaaaaaaaaaaaaaaaaaaaaaaaaaaaaaaaaaaaaaaaaaa

SEQ ID NO: 24945 - RNA, 1497 nt, Artificial Sequence
  SARS-CoV-2/Wuhan/WIV05/2019__EPI_ISL_402128 spike protein mRNA gc (1-15,334-528) Ferritin construct
aggagagggcgcuuggcuugcaaggacccugagcugcggcauugaagcacacccaacccaacucgacugaagucagccucacugaaccggaucugagaaucuucucucucugggcuugccagggcucuccgaaccuagcuagcauccucuucaauuccaacuagaaagcuuaccauguucguguuccugguccuccugccccuggugagcucccagugcaaccugugccccuucggcgagguguucaacgccacccgguucgccagcgucuacgccuggaaccgcaagcggaucuccaacugcguggcggacuacagcgugcuguacaacuccgccagcuucuccacguucaagugcuacggcgucagccccaccaagcucaacgaccugugcuucaccaacguguacgccgacuccuucgugauccgcggggacgagguccggcagaucgcccccggccagaccgggaagaucgccgacuacaacuacaagcugccggacgacuucacgggcugcgugaucgcguggaacagcaacaaccucgacuccaaggucgggggcaacuacaacuaccuguaccgccuguuccgcaagagcaaccucaagcccuucgagcgggacaucuccaccgagaucuaccaggccggcagcacccccugcaacgggguggagggcuucaacugcuacuucccccugcaguccuacggguuccagccgaccaacggcgugggguaccagcccuaccggguggucgugcugagcuucgagcuccugcacgcccccgccacggugugcggccccaagggcggggguggaagcggcggggguggaagugacaucaucaagcuccugaacgagcaggucaacaaggagaugcaguccagcaaccuguacauguccaugagcuccuggugcuacacccacagccucgacggcgccgggcuguuccuguucgaccacgccgcggaggaguacgagcacgccaagaagcucaucaucuuccugaacgagaacaacgugcccgugcagcugaccuccaucagcgccccggagcacaaguucgagggccucacgcagaucuuccagaaggccuacgagcacgagcagcacaucuccgagagcaucaacaacaucguggaccacgccaucaaguccaaggaccacgcgaccuucaacuuccugcagugguacgucgccgagcagcacgaggaggaggugcuguucaaggacauccucgacaagaucgagcugaucgggaacgagaaccacggccuguaccucgccgaccaguacgugaaggggaucgccaagagccgcaaguccugaggacuagucccuguucccagagcccacuuuuuuuucuuuuuuugaaauaaaauagccugucuuucagaucuaaaaaaaaaaaaaaaaaaaaaaaaaaaaaaaaaaaaaaaaaaaaaaaaaaaaaaaaaaaaaaaaaaaaaaaaaaaaaaaaaaaaaaaaaaaaaaaaaaaa

SEQ ID NO: 24946 - RNA, 1095 nt, Artificial Sequence
  SARS-CoV-2/Wuhan/WIV05/2019__EPI_ISL_402128 spike protein mRNA gc (334-528) Foldon construct
aggagagggcgcuuggcuugcaaggacccugagcugcggcauugaagcacacccaacccaacucgacugaagucagccucacugaaccggaucugagaaucuucucucucugggcuugccagggcucuccgaaccuagcuagcauccucuucaauuccaacuagaaagcuuaccaugcccaugggcagccugcagccgcucgccacccuguaccugcucgggaugcugguggccuccguccuggcgaaccugugccccuucggcgagguguucaacgccacccgguucgccagcgucuacgccuggaaccgcaagcggaucuccaacugcguggcggacuacagcgugcuguacaacuccgccagcuucuccacguucaagugcuacggcgucagccccaccaagcucaacgaccugugcuucaccaacguguacgccgacuccuucgugauccgcggggacgagguccggcagaucgcccccggccagaccgggaagaucgccgacuacaacuacaagcugccggacgacuucacgggcugcgugaucgcguggaacagcaacaaccucgacuccaaggucgggggcaacuacaacuaccuguaccgccuguuccgcaagagcaaccucaagcccuucgagcgggacaucuccaccgagaucuaccaggccggcagcacccccugcaacgggguggagggcuucaacugcuacuucccccugcaguccuacggguuccagccgaccaacggcgugggguaccagcccuaccggguggucgugcugagcuucgagcuccugcacgcccccgccacggugugcggccccaagggcagcggcggguacauccccgaggccccgcgcgacggccaggccuacgugcggaaggacggcgaguggguccugcugagcaccuuccucugaggacuagucccuguucccagagcccacuuuuuuuucuuuuuuugaaauaaaauagccugucuuucagaucuaaaaaaaaaaaaaaaaaaaaaaaaaaaaaaaaaaaaaaaaaaaaaaaaaaaaaaaaaaaaaaaaaaaaaaaaaaaaaaaaaaaaaaaaaaaaaaaaaaaa

SEQ ID NO: 24947 - RNA, 1473 nt, Artificial Sequence
  SARS-CoV-2/Wuhan/WIV05/2019__EPI_ISL_402128 spike protein mRNA gc (1-15,334-528) LumSynth construct
aggagagggcgcuuggcuugcaaggacccugagcugcggcauugaagcacacccaacccaacucgacugaagucagccucacugaaccggaucugagaaucuucucucucugggcuugccagggcucuccgaaccuagcuagcauccucuucaauuccaacuagaaagcuuaccauguucguguuccugguccuccugccccuggugagcucccagugcaaccugugccccuucggcgagguguucaacgccacccgguucgccagcgucuacgccuggaaccgcaagcggaucuccaacugcguggcggacuacagcgugcuguacaacuccgccagcuucuccacguucaagugcuacggcgucagccccaccaagcucaacgaccugugcuucaccaacguguacgccgacuccuucgugauccgcggggacgagguccggcagaucgcccccggccagaccgggaagaucgccgacuacaacuacaagcugccggacgacuucacgggcugcgugaucgcguggaacagcaacaaccucgacuccaaggucgggggcaacuacaacuaccuguaccgccuguuccgcaagagcaaccucaagcccuucgagcgggacaucuccaccgagaucuaccaggccggcagcacccccugcaacgggguggagggcuucaacugcuacuucccccugcaguccuacggguuccagccgaccaacggcgugggguaccagcccuaccggguggucgugcugagcuucgagcuccugcacgcccccgccacggugugcggccccaagggcggcggcggcuccggaggcggagguagcgggggacagaucuacgagggcaagcugaccgccgaggggcuccgcuucggcaucguggccagccgguucaaccacgcgcuggucgaccgccugguggagggggccaucgacgccaucgugcggcacggcgggcgcgaggaggacaucacccucguccgggugcccggcuccugggagaucccgguggccgccggcgagcuggcccgcaaggaggacaucgacgcggucaucgccaucggggugcugauccggggcgccacgccccacuucgacuacaucgccagcgagguguccaaggggcucgcggaccugagccuggagcuccgcaagcccaucaccuucggcgucaucaccgccgacacccuggagcaggccaucgagcgggccgggacgaagcacggcaacaagggcugggaggccgcgcuguccgccaucgagauggccaaccucuucaagagccugcgcugaggacuagucccuguucccagagcccacuuuuuuuucuuuuuuugaaauaaaauagccugucuuucagaucuaaaaaaaaaaaaaaaaaaaaaaaaaaaaaaaaaaaaaaaaaaaaaaaaaaaaaaaaaaaaaaaaaaaaaaaaaaaaaaaaaaaaaaaaaaaaaaaaaaaa

SEQ ID NO: 24948 - RNA, 1434 nt, Artificial Sequence
  SARS-CoV-2/Wuhan/WIV05/2019__EPI_ISL_402128 spike protein mRNA gc (334-528) LumSynth construct
aggagagggcgcuuggcuugcaaggacccugagcugcggcauugaagcacacccaacccaacucgacugaagucagccucacugaaccggaucugagaaucuucucucucugggcuugccagggcucuccgaaccuagcuagcauccucuucaauuccaacuagaaagcuuaccaugcagaucuacgagggcaagcugaccgccgaggggcuccgcuucggcaucguggccagccgguucaaccacgcgcuggucgaccgccugguggagggggccaucgacgccaucgugcggcacggcgggcgcgaggaggacaucacccucguccgggugcccggcuccugggagaucccgguggccgccggcgagcuggcccgcaaggaggacaucgacgcggucaucgccaucggggugcugauccggggcgccacgccccacuucgacuacaucgccagcgagguguccaaggggcucgcggaccugagccuggagcuccgcaagcccaucaccuucggcgucaucaccgccgacacccuggagcaggccaucgagcgggccgggacgaagcacggcaacaagggcugggaggccgcgcuguccgccaucgagauggccaaccucuucaagagccugcgcggcgggggcgggagcggcgggggcggcuccgggggcgggaaccugugccccuucggcgagguguucaacgccacccgguucgccagcgucuacgccuggaaccgcaagcggaucuccaacugcguggcggacuacagcgugcuguacaacuccgccagcuucuccacguucaagugcuacggcgucagccccaccaagcucaacgaccugugcuucaccaacguguacgccgacuccuucgugauccgcggggacgagguccggcagaucgcccccggccagaccgggaagaucgccgacuacaacuacaagcugccggacgacuucacgggcugcgugaucgcguggaacagcaacaaccucgacuccaaggucgggggcaacuacaacuaccuguaccgccuguuccgcaagagcaaccucaagcccuucgagcgggacaucuccaccgagaucuaccaggccggcagcacccccugcaacgggguggagggcuucaacugcuacuucccccugcaguccuacggguuccagccgaccaacggcgugggguaccagcccuaccggguggucgugcugagcuucgagcuccugcacgcccccgccacggugugcggccccaagugaggacuagucccuguucccagagcccacuuuuuuuucuuuuuuugaaauaaaauagccugucuuucagaucuaaaaaaaaaaaaaaaaaaaaaaaaaaaaaaaaaaaaaaaaaaaaaaaaaaaaaaaaaaaaaaaaaaaaaaaaaaaaaaaaaaaaaaaaaaaaaaaaaaaa

SEQ ID NO: 24949 - RNA, 4167 nt, Artificial Sequence
  SARS-CoV-2/Wuhan/WIV05/2019__EPI_ISL_402128 spike protein mRNA gc (1-1273)
aggagagggcgcuuggcuugcaaggacccugagcugcggcauugaagcacacccaacccaacucgacugaagucagccucacugaaccggaucugagaaucuucucucucugggcuugccagggcucuccgaaccuagcuagcauccucuucaauuccaacuagaaagcuuaccauguucguguuccugguccuccugccccuggugagcucccagugcgugaaccucaccacccgcacgcagcugccgcccgccuacaccaacagcuucacccggggcgucuacuaccccgacaagguguuccgcuccagcgugcugcacuccacccaggaccucuuccugcccuucuucagcaacgucacgugguuccacgccauccacguguccgggaccaacggcaccaagcgguucgacaacccggugcugcccuucaacgacggggucuacuucgcgagcaccgagaaguccaacaucauccgcggcuggaucuucgggacgacccucgacagcaagacccagucccugcugaucgugaacaacgccaccaacguggucaucaaggugugcgaguuccaguucugcaacgaccccuuccucggcguguacuaccacaagaacaacaagagcuggauggaguccgaguuccgggucuacagcuccgccaacaacugcacguucgaguacgugagccagcccuuccugauggaccuggagggcaagcaggggaacuucaagaaccuccgcgaguucguguucaagaacaucgacggcuacuucaagaucuacuccaagcacaccccgaucaaccugguccgggaccugccccagggguucagcgcccucgagccccugguggaccugcccaucggcaucaacaucacccgcuuccagacccuccuggcccugcaccgguccuaccucacgccgggggacagcagcuccggcuggaccgcgggcgccgccgccuacuacgugggguaccugcagccccgcaccuuccugcucaaguacaacgagaacggcaccaucacggacgcggucgacugcgcccuggacccccugagcgagaccaagugcacccucaaguccuucaccguggagaaggggaucuaccagacgagcaacuuccgggugcagcccaccgaguccaucguccgcuucccgaacaucaccaaccugugccccuucggcgagguguucaacgccacccgguucgccagcgucuacgccuggaaccgcaagcggaucuccaacugcguggcggacuacagcgugcuguacaacuccgccagcuucuccacguucaagugcuacggcgucagccccaccaagcucaacgaccugugcuucaccaacguguacgccgacuccuucgugauccgcggggacgagguccggcagaucgcccccggccagaccgggaagaucgccgacuacaacuacaagcugccggacgacuucacgggcugcgugaucgcguggaacagcaacaaccucgacuccaaggucgggggcaacuacaacuaccuguaccgccuguuccgcaagagcaaccucaagcccuucgagcgggacaucuccaccgagaucuaccaggccggcagcacccccugcaacgggguggagggcuucaacugcuacuucccccugcaguccuacggguuccagccgaccaacggcgugggguaccagcccuaccggguggucgugcugagcuucgagcuccugcacgcccccgccacggugugcggccccaagaaguccaccaaccuggucaagaacaagugcgugaacuucaacuucaacggccucaccgggaccggcgugcugaccgagagcaacaagaaguuccugccguuccagcaguucgggcgcgacaucgccgacacgaccgacgcgguccgcgacccccagacccuggagauccucgacaucacccccugcagcuucggcgggguguccgugaucacgccgggcaccaacaccagcaaccaggucgccgugcuguaccaggacgugaacugcaccgagguccccguggccauccacgccgaccagcugacgcccaccuggcggguguacuccaccggcagcaacgucuuccagacccgcgccgggugccucaucggcgcggagcacgugaacaacuccuacgagugcgacauccccaucggggccggcaucugcgccagcuaccagacgcagaccaacuccccgcggcgcgcccggagcguggcgucccagagcaucaucgccuacaccaugucccugggcgccgagaacagcgucgccuacuccaacaacagcaucgccauccccaccaacuucacgaucuccgugaccaccgagauccugcccgugagcaugaccaagacgagcgucgacugcaccauguacaucugcggggacuccaccgagugcagcaaccuccugcugcaguacggcuccuucugcacccagcucaaccgcgcgcugacggggaucgccguggagcaggacaagaacacccaggagguguucgcccaggucaagcagaucuacaagacgcccccgaucaaggacuucggcggguucaacuucagccagauccugcccgaccccuccaagcccagcaagcgguccuucaucgaggaccuccuguucaacaaggugacccuggccgacgccggcuucaucaagcaguacggcgacugccucggggacaucgcggcccgcgaccugaucugcgcccagaaguucaacggccugaccgugcucccgccccugcugaccgacgagaugaucgcccaguacaccagcgcccuccuggcggggaccaucacguccggcuggaccuucggggccggcgccgcccugcagauccccuucgcgaugcagauggccuaccgguucaacggcaucggggucacccagaacgugcucuacgagaaccagaagcugaucgccaaccaguucaacagcgccaucggcaagauccaggacucccugagcuccaccgccagcgcgcucgggaagcugcaggacguggucaaccagaacgcccaggcccugaacacgcucgugaagcagcuguccagcaacuucggcgccaucuccagcgugcugaacgacauccucucccgccuggacaaggucgaggccgaggugcagaucgaccggcugaucaccgggcgccuccagagccugcagaccuacgugacccagcagcugauccgggcggccgagauccgcgccagcgccaaccucgccgcgaccaagauguccgagugcguccugggccagagcaagcggguggacuucugcggcaagggguaccaccugauguccuucccccagagcgccccgcacggcguggucuuccuccacgugacguacguccccgcccaggagaagaacuucaccaccgcccccgcgaucugccacgacgggaaggcccacuucccccgcgagggcguguucguguccaacgggacccacugguucgucacgcagcggaacuucuacgagccgcagaucaucaccaccgacaacaccuucgugagcggcaacugcgacguggucaucggcaucgugaacaacacgguguacgacccccugcagcccgagcuggacuccuucaaggaggagcucgacaaguacuucaagaaccacaccagccccgacgucgaccugggggacaucuccggcaucaacgccagcguggugaacauccagaaggagaucgaccgccugaacgaggucgccaagaaccucaacgagucccugaucgaccugcaggagcucgggaaguacgagcaguacaucaaguggccgugguacaucuggcugggcuucaucgccggccugaucgcgaucgugauggugaccaucaugcucugcugcaugaccagcugcugcuccugccugaaggggugcugcagcugcggcuccugcugcaaguucgacgaggacgacagcgagcccguccugaagggggugaagcuccacuacacgugaggacuagucccuguucccagagcccacuuuuuuuucuuuuuuugaaauaaaauagccugucuuucagaucuaaaaaaaaaaaaaaaaaaaaaaaaaaaaaaaaaaaaaaaaaaaaaaaaaaaaaaaaaaaaaaaaaaaaaaaaaaaaaaaaaaaaaaaaaaaaaaaaaaaa

SEQ ID NO: 24950 - RNA, 4167 nt, Artificial Sequence
  SARS-CoV-2/Wuhan/WIV05/2019__EPI_ISL_402128 spike protein mRNA gc (1-1273)(D614G)
aggagagggcgcuuggcuugcaaggacccugagcugcggcauugaagcacacccaacccaacucgacugaagucagccucacugaaccggaucugagaaucuucucucucugggcuugccagggcucuccgaaccuagcuagcauccucuucaauuccaacuagaaagcuuaccauguucguguuccugguccuccugccccuggugagcucccagugcgugaaccucaccacccgcacgcagcugccgcccgccuacaccaacagcuucacccggggcgucuacuaccccgacaagguguuccgcuccagcgugcugcacuccacccaggaccucuuccugcccuucuucagcaacgucacgugguuccacgccauccacguguccgggaccaacggcaccaagcgguucgacaacccggugcugcccuucaacgacggggucuacuucgcgagcaccgagaaguccaacaucauccgcggcuggaucuucgggacgacccucgacagcaagacccagucccugcugaucgugaacaacgccaccaacguggucaucaaggugugcgaguuccaguucugcaacgaccccuuccucggcguguacuaccacaagaacaacaagagcuggauggaguccgaguuccgggucuacagcuccgccaacaacugcacguucgaguacgugagccagcccuuccugauggaccuggagggcaagcaggggaacuucaagaaccuccgcgaguucguguucaagaacaucgacggcuacuucaagaucuacuccaagcacaccccgaucaaccugguccgggaccugccccagggguucagcgcccucgagccccugguggaccugcccaucggcaucaacaucacccgcuuccagacccuccuggcccugcaccgguccuaccucacgccgggggacagcagcuccggcuggaccgcgggcgccgccgccuacuacgugggguaccugcagccccgcaccuuccugcucaaguacaacgagaacggcaccaucacggacgcggucgacugcgcccuggacccccugagcgagaccaagugcacccucaaguccuucaccguggagaaggggaucuaccagacgagcaacuuccgggugcagcccaccgaguccaucguccgcuucccgaacaucaccaaccugugccccuucggcgagguguucaacgccacccgguucgccagcgucuacgccuggaaccgcaagcggaucuccaacugcguggcggacuacagcgugcuguacaacuccgccagcuucuccacguucaagugcuacggcgucagccccaccaagcucaacgaccugugcuucaccaacguguacgccgacuccuucgugauccgcggggacgagguccggcagaucgcccccggccagaccgggaagaucgccgacuacaacuacaagcugccggacgacuucacgggcugcgugaucgcguggaacagcaacaaccucgacuccaaggucgggggcaacuacaacuaccuguaccgccuguuccgcaagagcaaccucaagcccuucgagcgggacaucuccaccgagaucuaccaggccggcagcacccccugcaacgggguggagggcuucaacugcuacuucccccugcaguccuacggguuccagccgaccaacggcgugggguaccagcccuaccggguggucgugcugagcuucgagcuccugcacgcccccgccacggugugcggccccaagaaguccaccaaccuggucaagaacaagugcgugaacuucaacuucaacggccucaccgggaccggcgugcugaccgagagcaacaagaaguuccugccguuccagcaguucgggcgcgacaucgccgacacgaccgacgcgguccgcgacccccagacccuggagauccucgacaucacccccugcagcuucggcgggguguccgugaucacgccgggcaccaacaccagcaaccaggucgccgugcuguaccagggcgugaacugcaccgagguccccguggccauccacgccgaccagcugacgcccaccuggcggguguacuccaccggcagcaacgucuuccagacccgcgccgggugccucaucggcgcggagcacgugaacaacuccuacgagugcgacauccccaucggggccggcaucugcgccagcuaccagacgcagaccaacuccccgcggcgcgcccggagcguggcgucccagagcaucaucgccuacaccaugucccugggcgccgagaacagcgucgccuacuccaacaacagcaucgccauccccaccaacuucacgaucuccgugaccaccgagauccugcccgugagcaugaccaagacgagcgucgacugcaccauguacaucugcggggacuccaccgagugcagcaaccuccugcugcaguacggcuccuucugcacccagcucaaccgcgcgcugacggggaucgccguggagcaggacaagaacacccaggagguguucgcccaggucaagcagaucuacaagacgcccccgaucaaggacuucggcggguucaacuucagccagauccugcccgaccccuccaagcccagcaagcgguccuucaucgaggaccuccuguucaacaaggugacccuggccgacgccggcuucaucaagcaguacggcgacugccucggggacaucgcggcccgcgaccugaucugcgcccagaaguucaacggccugaccgugcucccgccccugcugaccgacgagaugaucgcccaguacaccagcgcccuccuggcggggaccaucacguccggcuggaccuucggggccggcgccgcccugcagauccccuucgcgaugcagauggccuaccgguucaacggcaucggggucacccagaacgugcucuacgagaaccagaagcugaucgccaaccaguucaacagcgccaucggcaagauccaggacucccugagcuccaccgccagcgcgcucgggaagcugcaggacguggucaaccagaacgcccaggcccugaacacgcucgugaagcagcuguccagcaacuucggcgccaucuccagcgugcugaacgacauccucucccgccuggacaaggucgaggccgaggugcagaucgaccggcugaucaccgggcgccuccagagccugcagaccuacgugacccagcagcugauccgggcggccgagauccgcgccagcgccaaccucgccgcgaccaagauguccgagugcguccugggccagagcaagcggguggacuucugcggcaagggguaccaccugauguccuucccccagagcgccccgcacggcguggucuuccuccacgugacguacguccccgcccaggagaagaacuucaccaccgcccccgcgaucugccacgacgggaaggcccacuucccccgcgagggcguguucguguccaacgggacccacugguucgucacgcagcggaacuucuacgagccgcagaucaucaccaccgacaacaccuucgugagcggcaacugcgacguggucaucggcaucgugaacaacacgguguacgacccccugcagcccgagcuggacuccuucaaggaggagcucgacaaguacuucaagaaccacaccagccccgacgucgaccugggggacaucuccggcaucaacgccagcguggugaacauccagaaggagaucgaccgccugaacgaggucgccaagaaccucaacgagucccugaucgaccugcaggagcucgggaaguacgagcaguacaucaaguggccgugguacaucuggcugggcuucaucgccggccugaucgcgaucgugauggugaccaucaugcucugcugcaugaccagcugcugcuccugccugaaggggugcugcagcugcggcuccugcugcaaguucgacgaggacgacagcgagcccguccugaagggggugaagcuccacuacacgugaggacuagucccuguucccagagcccacuuuuuuuucuuuuuuugaaauaaaauagccugucuuucagaucuaaaaaaaaaaaaaaaaaaaaaaaaaaaaaaaaaaaaaaaaaaaaaaaaaaaaaaaaaaaaaaaaaaaaaaaaaaaaaaaaaaaaaaaaaaaaaaaaaaaa

SEQ ID NO: 24951 - RNA, 4167 nt, Artificial Sequence
  SARS-CoV-2/Wuhan/WIV05/2019__EPI_ISL_402128 spike protein mRNA gc (1-1273)(A222V_D614G)
aggagagggcgcuuggcuugcaaggacccugagcugcggcauugaagcacacccaacccaacucgacugaagucagccucacugaaccggaucugagaaucuucucucucugggcuugccagggcucuccgaaccuagcuagcauccucuucaauuccaacuagaaagcuuaccauguucguguuccugguccuccugccccuggugagcucccagugcgugaaccucaccacccgcacgcagcugccgcccgccuacaccaacagcuucacccggggcgucuacuaccccgacaagguguuccgcuccagcgugcugcacuccacccaggaccucuuccugcccuucuucagcaacgucacgugguuccacgccauccacguguccgggaccaacggcaccaagcgguucgacaacccggugcugcccuucaacgacggggucuacuucgcgagcaccgagaaguccaacaucauccgcggcuggaucuucgggacgacccucgacagcaagacccagucccugcugaucgugaacaacgccaccaacguggucaucaaggugugcgaguuccaguucugcaacgaccccuuccucggcguguacuaccacaagaacaacaagagcuggauggaguccgaguuccgggucuacagcuccgccaacaacugcacguucgaguacgugagccagcccuuccugauggaccuggagggcaagcaggggaacuucaagaaccuccgcgaguucguguucaagaacaucgacggcuacuucaagaucuacuccaagcacaccccgaucaaccugguccgggaccugccccagggguucagcguccucgagccccugguggaccugcccaucggcaucaacaucacccgcuuccagacccuccuggcccugcaccgguccuaccucacgccgggggacagcagcuccggcuggaccgcgggcgccgccgccuacuacgugggguaccugcagccccgcaccuuccugcucaaguacaacgagaacggcaccaucacggacgcggucgacugcgcccuggacccccugagcgagaccaagugcacccucaaguccuucaccguggagaaggggaucuaccagacgagcaacuuccgggugcagcccaccgaguccaucguccgcuucccgaacaucaccaaccugugccccuucggcgagguguucaacgccacccgguucgccagcgucuacgccuggaaccgcaagcggaucuccaacugcguggcggacuacagcgugcuguacaacuccgccagcuucuccacguucaagugcuacggcgucagccccaccaagcucaacgaccugugcuucaccaacguguacgccgacuccuucgugauccgcggggacgagguccggcagaucgcccccggccagaccgggaagaucgccgacuacaacuacaagcugccggacgacuucacgggcugcgugaucgcguggaacagcaacaaccucgacuccaaggucgggggcaacuacaacuaccuguaccgccuguuccgcaagagcaaccucaagcccuucgagcgggacaucuccaccgagaucuaccaggccggcagcacccccugcaacgggguggagggcuucaacugcuacuucccccugcaguccuacggguuccagccgaccaacggcgugggguaccagcccuaccggguggucgugcugagcuucgagcuccugcacgcccccgccacggugugcggccccaagaaguccaccaaccuggucaagaacaagugcgugaacuucaacuucaacggccucaccgggaccggcgugcugaccgagagcaacaagaaguuccugccguuccagcaguucgggcgcgacaucgccgacacgaccgacgcgguccgcgacccccagacccuggagauccucgacaucacccccugcagcuucggcgggguguccgugaucacgccgggcaccaacaccagcaaccaggucgccgugcuguaccagggcgugaacugcaccgagguccccguggccauccacgccgaccagcugacgcccaccuggcggguguacuccaccggcagcaacgucuuccagacccgcgccgggugccucaucggcgcggagcacgugaacaacuccuacgagugcgacauccccaucggggccggcaucugcgccagcuaccagacgcagaccaacuccccgcggcgcgcccggagcguggcgucccagagcaucaucgccuacaccaugucccugggcgccgagaacagcgucgccuacuccaacaacagcaucgccauccccaccaacuucacgaucuccgugaccaccgagauccugcccgugagcaugaccaagacgagcgucgacugcaccauguacaucugcggggacuccaccgagugcagcaaccuccugcugcaguacggcuccuucugcacccagcucaaccgcgcgcugacggggaucgccguggagcaggacaagaacacccaggagguguucgcccaggucaagcagaucuacaagacgcccccgaucaaggacuucggcggguucaacuucagccagauccugcccgaccccuccaagcccagcaagcgguccuucaucgaggaccuccuguucaacaaggugacccuggccgacgccggcuucaucaagcaguacggcgacugccucggggacaucgcggcccgcgaccugaucugcgcccagaaguucaacggccugaccgugcucccgccccugcugaccgacgagaugaucgcccaguacaccagcgcccuccuggcggggaccaucacguccggcuggaccuucggggccggcgccgcccugcagauccccuucgcgaugcagauggccuaccgguucaacggcaucggggucacccagaacgugcucuacgagaaccagaagcugaucgccaaccaguucaacagcgccaucggcaagauccaggacucccugagcuccaccgccagcgcgcucgggaagcugcaggacguggucaaccagaacgcccaggcccugaacacgcucgugaagcagcuguccagcaacuucggcgccaucuccagcgugcugaacgacauccucucccgccuggacaaggucgaggccgaggugcagaucgaccggcugaucaccgggcgccuccagagccugcagaccuacgugacccagcagcugauccgggcggccgagauccgcgccagcgccaaccucgccgcgaccaagauguccgagugcguccugggccagagcaagcggguggacuucugcggcaagggguaccaccugauguccuucccccagagcgccccgcacggcguggucuuccuccacgugacguacguccccgcccaggagaagaacuucaccaccgcccccgcgaucugccacgacgggaaggcccacuucccccgcgagggcguguucguguccaacgggacccacugguucgucacgcagcggaacuucuacgagccgcagaucaucaccaccgacaacaccuucgugagcggcaacugcgacguggucaucggcaucgugaacaacacgguguacgacccccugcagcccgagcuggacuccuucaaggaggagcucgacaaguacuucaagaaccacaccagccccgacgucgaccugggggacaucuccggcaucaacgccagcguggugaacauccagaaggagaucgaccgccugaacgaggucgccaagaaccucaacgagucccugaucgaccugcaggagcucgggaaguacgagcaguacaucaaguggccgugguacaucuggcugggcuucaucgccggccugaucgcgaucgugauggugaccaucaugcucugcugcaugaccagcugcugcuccugccugaaggggugcugcagcugcggcuccugcugcaaguucgacgaggacgacagcgagcccguccugaagggggugaagcuccacuacacgugaggacuagucccuguucccagagcccacuuuuuuuucuuuuuuugaaauaaaauagccugucuuucagaucuaaaaaaaaaaaaaaaaaaaaaaaaaaaaaaaaaaaaaaaaaaaaaaaaaaaaaaaaaaaaaaaaaaaaaaaaaaaaaaaaaaaaaaaaaaaaaaaaaaaa

SEQ ID NO: 24952 - RNA, 4167 nt, Artificial Sequence
  SARS-CoV-2/Wuhan/WIV05/2019__EPI_ISL_402128 spike protein mRNA gc (1-1273)(N439K_D614G)
aggagagggcgcuuggcuugcaaggacccugagcugcggcauugaagcacacccaacccaacucgacugaagucagccucacugaaccggaucugagaaucuucucucucugggcuugccagggcucuccgaaccuagcuagcauccucuucaauuccaacuagaaagcuuaccauguucguguuccugguccuccugccccuggugagcucccagugcgugaaccucaccacccgcacgcagcugccgcccgccuacaccaacagcuucacccggggcgucuacuaccccgacaagguguuccgcuccagcgugcugcacuccacccaggaccucuuccugcccuucuucagcaacgucacgugguuccacgccauccacguguccgggaccaacggcaccaagcgguucgacaacccggugcugcccuucaacgacggggucuacuucgcgagcaccgagaaguccaacaucauccgcggcuggaucuucgggacgacccucgacagcaagacccagucccugcugaucgugaacaacgccaccaacguggucaucaaggugugcgaguuccaguucugcaacgaccccuuccucggcguguacuaccacaagaacaacaagagcuggauggaguccgaguuccgggucuacagcuccgccaacaacugcacguucgaguacgugagccagcccuuccugauggaccuggagggcaagcaggggaacuucaagaaccuccgcgaguucguguucaagaacaucgacggcuacuucaagaucuacuccaagcacaccccgaucaaccugguccgggaccugccccagggguucagcgcccucgagccccugguggaccugcccaucggcaucaacaucacccgcuuccagacccuccuggcccugcaccgguccuaccucacgccgggggacagcagcuccggcuggaccgcgggcgccgccgccuacuacgugggguaccugcagccccgcaccuuccugcucaaguacaacgagaacggcaccaucacggacgcggucgacugcgcccuggacccccugagcgagaccaagugcacccucaaguccuucaccguggagaaggggaucuaccagacgagcaacuuccgggugcagcccaccgaguccaucguccgcuucccgaacaucaccaaccugugccccuucggcgagguguucaacgccacccgguucgccagcgucuacgccuggaaccgcaagcggaucuccaacugcguggcggacuacagcgugcuguacaacuccgccagcuucuccacguucaagugcuacggcgucagccccaccaagcucaacgaccugugcuucaccaacguguacgccgacuccuucgugauccgcggggacgagguccggcagaucgcccccggccagaccgggaagaucgccgacuacaacuacaagcugccggacgacuucacgggcugcgugaucgcguggaacagcaagaaccucgacuccaaggucgggggcaacuacaacuaccuguaccgccuguuccgcaagagcaaccucaagcccuucgagcgggacaucuccaccgagaucuaccaggccggcagcacccccugcaacgggguggagggcuucaacugcuacuucccccugcaguccuacggguuccagccgaccaacggcgugggguaccagcccuaccggguggucgugcugagcuucgagcuccugcacgcccccgccacggugugcggccccaagaaguccaccaaccuggucaagaacaagugcgugaacuucaacuucaacggccucaccgggaccggcgugcugaccgagagcaacaagaaguuccugccguuccagcaguucgggcgcgacaucgccgacacgaccgacgcgguccgcgacccccagacccuggagauccucgacaucacccccugcagcuucggcgggguguccgugaucacgccgggcaccaacaccagcaaccaggucgccgugcuguaccagggcgugaacugcaccgagguccccguggccauccacgccgaccagcugacgcccaccuggcggguguacuccaccggcagcaacgucuuccagacccgcgccgggugccucaucggcgcggagcacgugaacaacuccuacgagugcgacauccccaucggggccggcaucugcgccagcuaccagacgcagaccaacuccccgcggcgcgcccggagcguggcgucccagagcaucaucgccuacaccaugucccugggcgccgagaacagcgucgccuacuccaacaacagcaucgccauccccaccaacuucacgaucuccgugaccaccgagauccugcccgugagcaugaccaagacgagcgucgacugcaccauguacaucugcggggacuccaccgagugcagcaaccuccugcugcaguacggcuccuucugcacccagcucaaccgcgcgcugacggggaucgccguggagcaggacaagaacacccaggagguguucgcccaggucaagcagaucuacaagacgcccccgaucaaggacuucggcggguucaacuucagccagauccugcccgaccccuccaagcccagcaagcgguccuucaucgaggaccuccuguucaacaaggugacccuggccgacgccggcuucaucaagcaguacggcgacugccucggggacaucgcggcccgcgaccugaucugcgcccagaaguucaacggccugaccgugcucccgccccugcugaccgacgagaugaucgcccaguacaccagcgcccuccuggcggggaccaucacguccggcuggaccuucggggccggcgccgcccugcagauccccuucgcgaugcagauggccuaccgguucaacggcaucggggucacccagaacgugcucuacgagaaccagaagcugaucgccaaccaguucaacagcgccaucggcaagauccaggacucccugagcuccaccgccagcgcgcucgggaagcugcaggacguggucaaccagaacgcccaggcccugaacacgcucgugaagcagcuguccagcaacuucggcgccaucuccagcgugcugaacgacauccucucccgccuggacaaggucgaggccgaggugcagaucgaccggcugaucaccgggcgccuccagagccugcagaccuacgugacccagcagcugauccgggcggccgagauccgcgccagcgccaaccucgccgcgaccaagauguccgagugcguccugggccagagcaagcggguggacuucugcggcaagggguaccaccugauguccuucccccagagcgccccgcacggcguggucuuccuccacgugacguacguccccgcccaggagaagaacuucaccaccgcccccgcgaucugccacgacgggaaggcccacuucccccgcgagggcguguucguguccaacgggacccacugguucgucacgcagcggaacuucuacgagccgcagaucaucaccaccgacaacaccuucgugagcggcaacugcgacguggucaucggcaucgugaacaacacgguguacgacccccugcagcccgagcuggacuccuucaaggaggagcucgacaaguacuucaagaaccacaccagccccgacgucgaccugggggacaucuccggcaucaacgccagcguggugaacauccagaaggagaucgaccgccugaacgaggucgccaagaaccucaacgagucccugaucgaccugcaggagcucgggaaguacgagcaguacaucaaguggccgugguacaucuggcugggcuucaucgccggccugaucgcgaucgugauggugaccaucaugcucugcugcaugaccagcugcugcuccugccugaaggggugcugcagcugcggcuccugcugcaaguucgacgaggacgacagcgagcccguccugaagggggugaagcuccacuacacgugaggacuagucccuguucccagagcccacuuuuuuuucuuuuuuugaaauaaaauagccugucuuucagaucuaaaaaaaaaaaaaaaaaaaaaaaaaaaaaaaaaaaaaaaaaaaaaaaaaaaaaaaaaaaaaaaaaaaaaaaaaaaaaaaaaaaaaaaaaaaaaaaaaaaa

SEQ ID NO: 24953 - RNA, 4167 nt, Artificial Sequence
  SARS-CoV-2/Wuhan/WIV05/2019__EPI_ISL_402128 spike protein mRNA gc (1-1273)(S477N_D614G)
aggagagggcgcuuggcuugcaaggacccugagcugcggcauugaagcacacccaacccaacucgacugaagucagccucacugaaccggaucugagaaucuucucucucugggcuugccagggcucuccgaaccuagcuagcauccucuucaauuccaacuagaaagcuuaccauguucguguuccugguccuccugccccuggugagcucccagugcgugaaccucaccacccgcacgcagcugccgcccgccuacaccaacagcuucacccggggcgucuacuaccccgacaagguguuccgcuccagcgugcugcacuccacccaggaccucuuccugcccuucuucagcaacgucacgugguuccacgccauccacguguccgggaccaacggcaccaagcgguucgacaacccggugcugcccuucaacgacggggucuacuucgcgagcaccgagaaguccaacaucauccgcggcuggaucuucgggacgacccucgacagcaagacccagucccugcugaucgugaacaacgccaccaacguggucaucaaggugugcgaguuccaguucugcaacgaccccuuccucggcguguacuaccacaagaacaacaagagcuggauggaguccgaguuccgggucuacagcuccgccaacaacugcacguucgaguacgugagccagcccuuccugauggaccuggagggcaagcaggggaacuucaagaaccuccgcgaguucguguucaagaacaucgacggcuacuucaagaucuacuccaagcacaccccgaucaaccugguccgggaccugccccagggguucagcgcccucgagccccugguggaccugcccaucggcaucaacaucacccgcuuccagacccuccuggcccugcaccgguccuaccucacgccgggggacagcagcuccggcuggaccgcgggcgccgccgccuacuacgugggguaccugcagccccgcaccuuccugcucaaguacaacgagaacggcaccaucacggacgcggucgacugcgcccuggacccccugagcgagaccaagugcacccucaaguccuucaccguggagaaggggaucuaccagacgagcaacuuccgggugcagcccaccgaguccaucguccgcuucccgaacaucaccaaccugugccccuucggcgagguguucaacgccacccgguucgccagcgucuacgccuggaaccgcaagcggaucuccaacugcguggcggacuacagcgugcuguacaacuccgccagcuucuccacguucaagugcuacggcgucagccccaccaagcucaacgaccugugcuucaccaacguguacgccgacuccuucgugauccgcggggacgagguccggcagaucgcccccggccagaccgggaagaucgccgacuacaacuacaagcugccggacgacuucacgggcugcgugaucgcguggaacagcaacaaccucgacuccaaggucgggggcaacuacaacuaccuguaccgccuguuccgcaagagcaaccucaagcccuucgagcgggacaucuccaccgagaucuaccaggccggcaacacccccugcaacgggguggagggcuucaacugcuacuucccccugcaguccuacggguuccagccgaccaacggcgugggguaccagcccuaccggguggucgugcugagcuucgagcuccugcacgcccccgccacggugugcggccccaagaaguccaccaaccuggucaagaacaagugcgugaacuucaacuucaacggccucaccgggaccggcgugcugaccgagagcaacaagaaguuccugccguuccagcaguucgggcgcgacaucgccgacacgaccgacgcgguccgcgacccccagacccuggagauccucgacaucacccccugcagcuucggcgggguguccgugaucacgccgggcaccaacaccagcaaccaggucgccgugcuguaccagggcgugaacugcaccgagguccccguggccauccacgccgaccagcugacgcccaccuggcggguguacuccaccggcagcaacgucuuccagacccgcgccgggugccucaucggcgcggagcacgugaacaacuccuacgagugcgacauccccaucggggccggcaucugcgccagcuaccagacgcagaccaacuccccgcggcgcgcccggagcguggcgucccagagcaucaucgccuacaccaugucccugggcgccgagaacagcgucgccuacuccaacaacagcaucgccauccccaccaacuucacgaucuccgugaccaccgagauccugcccgugagcaugaccaagacgagcgucgacugcaccauguacaucugcggggacuccaccgagugcagcaaccuccugcugcaguacggcuccuucugcacccagcucaaccgcgcgcugacggggaucgccguggagcaggacaagaacacccaggagguguucgcccaggucaagcagaucuacaagacgcccccgaucaaggacuucggcggguucaacuucagccagauccugcccgaccccuccaagcccagcaagcgguccuucaucgaggaccuccuguucaacaaggugacccuggccgacgccggcuucaucaagcaguacggcgacugccucggggacaucgcggcccgcgaccugaucugcgcccagaaguucaacggccugaccgugcucccgccccugcugaccgacgagaugaucgcccaguacaccagcgcccuccuggcggggaccaucacguccggcuggaccuucggggccggcgccgcccugcagauccccuucgcgaugcagauggccuaccgguucaacggcaucggggucacccagaacgugcucuacgagaaccagaagcugaucgccaaccaguucaacagcgccaucggcaagauccaggacucccugagcuccaccgccagcgcgcucgggaagcugcaggacguggucaaccagaacgcccaggcccugaacacgcucgugaagcagcuguccagcaacuucggcgccaucuccagcgugcugaacgacauccucucccgccuggacaaggucgaggccgaggugcagaucgaccggcugaucaccgggcgccuccagagccugcagaccuacgugacccagcagcugauccgggcggccgagauccgcgccagcgccaaccucgccgcgaccaagauguccgagugcguccugggccagagcaagcggguggacuucugcggcaagggguaccaccugauguccuucccccagagcgccccgcacggcguggucuuccuccacgugacguacguccccgcccaggagaagaacuucaccaccgcccccgcgaucugccacgacgggaaggcccacuucccccgcgagggcguguucguguccaacgggacccacugguucgucacgcagcggaacuucuacgagccgcagaucaucaccaccgacaacaccuucgugagcggcaacugcgacguggucaucggcaucgugaacaacacgguguacgacccccugcagcccgagcuggacuccuucaaggaggagcucgacaaguacuucaagaaccacaccagccccgacgucgaccugggggacaucuccggcaucaacgccagcguggugaacauccagaaggagaucgaccgccugaacgaggucgccaagaaccucaacgagucccugaucgaccugcaggagcucgggaaguacgagcaguacaucaaguggccgugguacaucuggcugggcuucaucgccggccugaucgcgaucgugauggugaccaucaugcucugcugcaugaccagcugcugcuccugccugaaggggugcugcagcugcggcuccugcugcaaguucgacgaggacgacagcgagcccguccugaagggggugaagcuccacuacacgugaggacuagucccuguucccagagcccacuuuuuuuucuuuuuuugaaauaaaauagccugucuuucagaucuaaaaaaaaaaaaaaaaaaaaaaaaaaaaaaaaaaaaaaaaaaaaaaaaaaaaaaaaaaaaaaaaaaaaaaaaaaaaaaaaaaaaaaaaaaaaaaaaaaaa

SEQ ID NO: 24954 - RNA, 4167 nt, Artificial Sequence
  SARS-CoV-2/Wuhan/WIV05/2019__EPI_ISL_402128 spike protein mRNA gc (1-1273)(N501Y_D614G)
aggagagggcgcuuggcuugcaaggacccugagcugcggcauugaagcacacccaacccaacucgacugaagucagccucacugaaccggaucugagaaucuucucucucugggcuugccagggcucuccgaaccuagcuagcauccucuucaauuccaacuagaaagcuuaccauguucguguuccugguccuccugccccuggugagcucccagugcgugaaccucaccacccgcacgcagcugccgcccgccuacaccaacagcuucacccggggcgucuacuaccccgacaagguguuccgcuccagcgugcugcacuccacccaggaccucuuccugcccuucuucagcaacgucacgugguuccacgccauccacguguccgggaccaacggcaccaagcgguucgacaacccggugcugcccuucaacgacggggucuacuucgcgagcaccgagaaguccaacaucauccgcggcuggaucuucgggacgacccucgacagcaagacccagucccugcugaucgugaacaacgccaccaacguggucaucaaggugugcgaguuccaguucugcaacgaccccuuccucggcguguacuaccacaagaacaacaagagcuggauggaguccgaguuccgggucuacagcuccgccaacaacugcacguucgaguacgugagccagcccuuccugauggaccuggagggcaagcaggggaacuucaagaaccuccgcgaguucguguucaagaacaucgacggcuacuucaagaucuacuccaagcacaccccgaucaaccugguccgggaccugccccagggguucagcgcccucgagccccugguggaccugcccaucggcaucaacaucacccgcuuccagacccuccuggcccugcaccgguccuaccucacgccgggggacagcagcuccggcuggaccgcgggcgccgccgccuacuacgugggguaccugcagccccgcaccuuccugcucaaguacaacgagaacggcaccaucacggacgcggucgacugcgcccuggacccccugagcgagaccaagugcacccucaaguccuucaccguggagaaggggaucuaccagacgagcaacuuccgggugcagcccaccgaguccaucguccgcuucccgaacaucaccaaccugugccccuucggcgagguguucaacgccacccgguucgccagcgucuacgccuggaaccgcaagcggaucuccaacugcguggcggacuacagcgugcuguacaacuccgccagcuucuccacguucaagugcuacggcgucagccccaccaagcucaacgaccugugcuucaccaacguguacgccgacuccuucgugauccgcggggacgagguccggcagaucgcccccggccagaccgggaagaucgccgacuacaacuacaagcugccggacgacuucacgggcugcgugaucgcguggaacagcaacaaccucgacuccaaggucgggggcaacuacaacuaccuguaccgccuguuccgcaagagcaaccucaagcccuucgagcgggacaucuccaccgagaucuaccaggccggcagcacccccugcaacgggguggagggcuucaacugcuacuucccccugcaguccuacggguuccagccgaccuacggcgugggguaccagcccuaccggguggucgugcugagcuucgagcuccugcacgcccccgccacggugugcggccccaagaaguccaccaaccuggucaagaacaagugcgugaacuucaacuucaacggccucaccgggaccggcgugcugaccgagagcaacaagaaguuccugccguuccagcaguucgggcgcgacaucgccgacacgaccgacgcgguccgcgacccccagacccuggagauccucgacaucacccccugcagcuucggcgggguguccgugaucacgccgggcaccaacaccagcaaccaggucgccgugcuguaccagggcgugaacugcaccgagguccccguggccauccacgccgaccagcugacgcccaccuggcggguguacuccaccggcagcaacgucuuccagacccgcgccgggugccucaucggcgcggagcacgugaacaacuccuacgagugcgacauccccaucggggccggcaucugcgccagcuaccagacgcagaccaacuccccgcggcgcgcccggagcguggcgucccagagcaucaucgccuacaccaugucccugggcgccgagaacagcgucgccuacuccaacaacagcaucgccauccccaccaacuucacgaucuccgugaccaccgagauccugcccgugagcaugaccaagacgagcgucgacugcaccauguacaucugcggggacuccaccgagugcagcaaccuccugcugcaguacggcuccuucugcacccagcucaaccgcgcgcugacggggaucgccguggagcaggacaagaacacccaggagguguucgcccaggucaagcagaucuacaagacgcccccgaucaaggacuucggcggguucaacuucagccagauccugcccgaccccuccaagcccagcaagcgguccuucaucgaggaccuccuguucaacaaggugacccuggccgacgccggcuucaucaagcaguacggcgacugccucggggacaucgcggcccgcgaccugaucugcgcccagaaguucaacggccugaccgugcucccgccccugcugaccgacgagaugaucgcccaguacaccagcgcccuccuggcggggaccaucacguccggcuggaccuucggggccggcgccgcccugcagauccccuucgcgaugcagauggccuaccgguucaacggcaucggggucacccagaacgugcucuacgagaaccagaagcugaucgccaaccaguucaacagcgccaucggcaagauccaggacucccugagcuccaccgccagcgcgcucgggaagcugcaggacguggucaaccagaacgcccaggcccugaacacgcucgugaagcagcuguccagcaacuucggcgccaucuccagcgugcugaacgacauccucucccgccuggacaaggucgaggccgaggugcagaucgaccggcugaucaccgggcgccuccagagccugcagaccuacgugacccagcagcugauccgggcggccgagauccgcgccagcgccaaccucgccgcgaccaagauguccgagugcguccugggccagagcaagcggguggacuucugcggcaagggguaccaccugauguccuucccccagagcgccccgcacggcguggucuuccuccacgugacguacguccccgcccaggagaagaacuucaccaccgcccccgcgaucugccacgacgggaaggcccacuucccccgcgagggcguguucguguccaacgggacccacugguucgucacgcagcggaacuucuacgagccgcagaucaucaccaccgacaacaccuucgugagcggcaacugcgacguggucaucggcaucgugaacaacacgguguacgacccccugcagcccgagcuggacuccuucaaggaggagcucgacaaguacuucaagaaccacaccagccccgacgucgaccugggggacaucuccggcaucaacgccagcguggugaacauccagaaggagaucgaccgccugaacgaggucgccaagaaccucaacgagucccugaucgaccugcaggagcucgggaaguacgagcaguacaucaaguggccgugguacaucuggcugggcuucaucgccggccugaucgcgaucgugauggugaccaucaugcucugcugcaugaccagcugcugcuccugccugaaggggugcugcagcugcggcuccugcugcaaguucgacgaggacgacagcgagcccguccugaagggggugaagcuccacuacacgugaggacuagucccuguucccagagcccacuuuuuuuucuuuuuuugaaauaaaauagccugucuuucagaucuaaaaaaaaaaaaaaaaaaaaaaaaaaaaaaaaaaaaaaaaaaaaaaaaaaaaaaaaaaaaaaaaaaaaaaaaaaaaaaaaaaaaaaaaaaaaaaaaaaaa

SEQ ID NO: 24955 - RNA, 4161 nt, Artificial Sequence
  SARS-CoV-2/Wuhan/WIV05/2019__EPI_ISL_402128 spike protein mRNA gc (1-1273)(H69del_V70del_D614G)
aggagagggcgcuuggcuugcaaggacccugagcugcggcauugaagcacacccaacccaacucgacugaagucagccucacugaaccggaucugagaaucuucucucucugggcuugccagggcucuccgaaccuagcuagcauccucuucaauuccaacuagaaagcuuaccauguucguguuccugguccuccugccccuggugagcucccagugcgugaaccucaccacccgcacgcagcugccgcccgccuacaccaacagcuucacccggggcgucuacuaccccgacaagguguuccgcuccagcgugcugcacuccacccaggaccucuuccugcccuucuucagcaacgucacgugguuccacgccaucuccgggaccaacggcaccaagcgguucgacaacccggugcugcccuucaacgacggggucuacuucgcgagcaccgagaaguccaacaucauccgcggcuggaucuucgggacgacccucgacagcaagacccagucccugcugaucgugaacaacgccaccaacguggucaucaaggugugcgaguuccaguucugcaacgaccccuuccucggcguguacuaccacaagaacaacaagagcuggauggaguccgaguuccgggucuacagcuccgccaacaacugcacguucgaguacgugagccagcccuuccugauggaccuggagggcaagcaggggaacuucaagaaccuccgcgaguucguguucaagaacaucgacggcuacuucaagaucuacuccaagcacaccccgaucaaccugguccgggaccugccccagggguucagcgcccucgagccccugguggaccugcccaucggcaucaacaucacccgcuuccagacccuccuggcccugcaccgguccuaccucacgccgggggacagcagcuccggcuggaccgcgggcgccgccgccuacuacgugggguaccugcagccccgcaccuuccugcucaaguacaacgagaacggcaccaucacggacgcggucgacugcgcccuggacccccugagcgagaccaagugcacccucaaguccuucaccguggagaaggggaucuaccagacgagcaacuuccgggugcagcccaccgaguccaucguccgcuucccgaacaucaccaaccugugccccuucggcgagguguucaacgccacccgguucgccagcgucuacgccuggaaccgcaagcggaucuccaacugcguggcggacuacagcgugcuguacaacuccgccagcuucuccacguucaagugcuacggcgucagccccaccaagcucaacgaccugugcuucaccaacguguacgccgacuccuucgugauccgcggggacgagguccggcagaucgcccccggccagaccgggaagaucgccgacuacaacuacaagcugccggacgacuucacgggcugcgugaucgcguggaacagcaacaaccucgacuccaaggucgggggcaacuacaacuaccuguaccgccuguuccgcaagagcaaccucaagcccuucgagcgggacaucuccaccgagaucuaccaggccggcagcacccccugcaacgggguggagggcuucaacugcuacuucccccugcaguccuacggguuccagccgaccaacggcgugggguaccagcccuaccggguggucgugcugagcuucgagcuccugcacgcccccgccacggugugcggccccaagaaguccaccaaccuggucaagaacaagugcgugaacuucaacuucaacggccucaccgggaccggcgugcugaccgagagcaacaagaaguuccugccguuccagcaguucgggcgcgacaucgccgacacgaccgacgcgguccgcgacccccagacccuggagauccucgacaucacccccugcagcuucggcgggguguccgugaucacgccgggcaccaacaccagcaaccaggucgccgugcuguaccagggcgugaacugcaccgagguccccguggccauccacgccgaccagcugacgcccaccuggcggguguacuccaccggcagcaacgucuuccagacccgcgccgggugccucaucggcgcggagcacgugaacaacuccuacgagugcgacauccccaucggggccggcaucugcgccagcuaccagacgcagaccaacuccccgcggcgcgcccggagcguggcgucccagagcaucaucgccuacaccaugucccugggcgccgagaacagcgucgccuacuccaacaacagcaucgccauccccaccaacuucacgaucuccgugaccaccgagauccugcccgugagcaugaccaagacgagcgucgacugcaccauguacaucugcggggacuccaccgagugcagcaaccuccugcugcaguacggcuccuucugcacccagcucaaccgcgcgcugacggggaucgccguggagcaggacaagaacacccaggagguguucgcccaggucaagcagaucuacaagacgcccccgaucaaggacuucggcggguucaacuucagccagauccugcccgaccccuccaagcccagcaagcgguccuucaucgaggaccuccuguucaacaaggugacccuggccgacgccggcuucaucaagcaguacggcgacugccucggggacaucgcggcccgcgaccugaucugcgcccagaaguucaacggccugaccgugcucccgccccugcugaccgacgagaugaucgcccaguacaccagcgcccuccuggcggggaccaucacguccggcuggaccuucggggccggcgccgcccugcagauccccuucgcgaugcagauggccuaccgguucaacggcaucggggucacccagaacgugcucuacgagaaccagaagcugaucgccaaccaguucaacagcgccaucggcaagauccaggacucccugagcuccaccgccagcgcgcucgggaagcugcaggacguggucaaccagaacgcccaggcccugaacacgcucgugaagcagcuguccagcaacuucggcgccaucuccagcgugcugaacgacauccucucccgccuggacaaggucgaggccgaggugcagaucgaccggcugaucaccgggcgccuccagagccugcagaccuacgugacccagcagcugauccgggcggccgagauccgcgccagcgccaaccucgccgcgaccaagauguccgagugcguccugggccagagcaagcggguggacuucugcggcaagggguaccaccugauguccuucccccagagcgccccgcacggcguggucuuccuccacgugacguacguccccgcccaggagaagaacuucaccaccgcccccgcgaucugccacgacgggaaggcccacuucccccgcgagggcguguucguguccaacgggacccacugguucgucacgcagcggaacuucuacgagccgcagaucaucaccaccgacaacaccuucgugagcggcaacugcgacguggucaucggcaucgugaacaacacgguguacgacccccugcagcccgagcuggacuccuucaaggaggagcucgacaaguacuucaagaaccacaccagccccgacgucgaccugggggacaucuccggcaucaacgccagcguggugaacauccagaaggagaucgaccgccugaacgaggucgccaagaaccucaacgagucccugaucgaccugcaggagcucgggaaguacgagcaguacaucaaguggccgugguacaucuggcugggcuucaucgccggccugaucgcgaucgugauggugaccaucaugcucugcugcaugaccagcugcugcuccugccugaaggggugcugcagcugcggcuccugcugcaaguucgacgaggacgacagcgagcccguccugaagggggugaagcuccacuacacgugaggacuagucccuguucccagagcccacuuuuuuuucuuuuuuugaaauaaaauagccugucuuucagaucuaaaaaaaaaaaaaaaaaaaaaaaaaaaaaaaaaaaaaaaaaaaaaaaaaaaaaaaaaaaaaaaaaaaaaaaaaaaaaaaaaaaaaaaaaaaaaaaaaaaa

SEQ ID NO: 24956 - RNA, 4167 nt, Artificial Sequence
  SARS-CoV-2/Wuhan/WIV05/2019__EPI_ISL_402128 spike protein mRNA gc (1-1273)(Y453F_D614G)
aggagagggcgcuuggcuugcaaggacccugagcugcggcauugaagcacacccaacccaacucgacugaagucagccucacugaaccggaucugagaaucuucucucucugggcuugccagggcucuccgaaccuagcuagcauccucuucaauuccaacuagaaagcuuaccauguucguguuccugguccuccugccccuggugagcucccagugcgugaaccucaccacccgcacgcagcugccgcccgccuacaccaacagcuucacccggggcgucuacuaccccgacaagguguuccgcuccagcgugcugcacuccacccaggaccucuuccugcccuucuucagcaacgucacgugguuccacgccauccacguguccgggaccaacggcaccaagcgguucgacaacccggugcugcccuucaacgacggggucuacuucgcgagcaccgagaaguccaacaucauccgcggcuggaucuucgggacgacccucgacagcaagacccagucccugcugaucgugaacaacgccaccaacguggucaucaaggugugcgaguuccaguucugcaacgaccccuuccucggcguguacuaccacaagaacaacaagagcuggauggaguccgaguuccgggucuacagcuccgccaacaacugcacguucgaguacgugagccagcccuuccugauggaccuggagggcaagcaggggaacuucaagaaccuccgcgaguucguguucaagaacaucgacggcuacuucaagaucuacuccaagcacaccccgaucaaccugguccgggaccugccccagggguucagcgcccucgagccccugguggaccugcccaucggcaucaacaucacccgcuuccagacccuccuggcccugcaccgguccuaccucacgccgggggacagcagcuccggcuggaccgcgggcgccgccgccuacuacgugggguaccugcagccccgcaccuuccugcucaaguacaacgagaacggcaccaucacggacgcggucgacugcgcccuggacccccugagcgagaccaagugcacccucaaguccuucaccguggagaaggggaucuaccagacgagcaacuuccgggugcagcccaccgaguccaucguccgcuucccgaacaucaccaaccugugccccuucggcgagguguucaacgccacccgguucgccagcgucuacgccuggaaccgcaagcggaucuccaacugcguggcggacuacagcgugcuguacaacuccgccagcuucuccacguucaagugcuacggcgucagccccaccaagcucaacgaccugugcuucaccaacguguacgccgacuccuucgugauccgcggggacgagguccggcagaucgcccccggccagaccgggaagaucgccgacuacaacuacaagcugccggacgacuucacgggcugcgugaucgcguggaacagcaacaaccucgacuccaaggucgggggcaacuacaacuaccuguuccgccuguuccgcaagagcaaccucaagcccuucgagcgggacaucuccaccgagaucuaccaggccggcagcacccccugcaacgggguggagggcuucaacugcuacuucccccugcaguccuacggguuccagccgaccaacggcgugggguaccagcccuaccggguggucgugcugagcuucgagcuccugcacgcccccgccacggugugcggccccaagaaguccaccaaccuggucaagaacaagugcgugaacuucaacuucaacggccucaccgggaccggcgugcugaccgagagcaacaagaaguuccugccguuccagcaguucgggcgcgacaucgccgacacgaccgacgcgguccgcgacccccagacccuggagauccucgacaucacccccugcagcuucggcgggguguccgugaucacgccgggcaccaacaccagcaaccaggucgccgugcuguaccagggcgugaacugcaccgagguccccguggccauccacgccgaccagcugacgcccaccuggcggguguacuccaccggcagcaacgucuuccagacccgcgccgggugccucaucggcgcggagcacgugaacaacuccuacgagugcgacauccccaucggggccggcaucugcgccagcuaccagacgcagaccaacuccccgcggcgcgcccggagcguggcgucccagagcaucaucgccuacaccaugucccugggcgccgagaacagcgucgccuacuccaacaacagcaucgccauccccaccaacuucacgaucuccgugaccaccgagauccugcccgugagcaugaccaagacgagcgucgacugcaccauguacaucugcggggacuccaccgagugcagcaaccuccugcugcaguacggcuccuucugcacccagcucaaccgcgcgcugacggggaucgccguggagcaggacaagaacacccaggagguguucgcccaggucaagcagaucuacaagacgcccccgaucaaggacuucggcggguucaacuucagccagauccugcccgaccccuccaagcccagcaagcgguccuucaucgaggaccuccuguucaacaaggugacccuggccgacgccggcuucaucaagcaguacggcgacugccucggggacaucgcggcccgcgaccugaucugcgcccagaaguucaacggccugaccgugcucccgccccugcugaccgacgagaugaucgcccaguacaccagcgcccuccuggcggggaccaucacguccggcuggaccuucggggccggcgccgcccugcagauccccuucgcgaugcagauggccuaccgguucaacggcaucggggucacccagaacgugcucuacgagaaccagaagcugaucgccaaccaguucaacagcgccaucggcaagauccaggacucccugagcuccaccgccagcgcgcucgggaagcugcaggacguggucaaccagaacgcccaggcccugaacacgcucgugaagcagcuguccagcaacuucggcgccaucuccagcgugcugaacgacauccucucccgccuggacaaggucgaggccgaggugcagaucgaccggcugaucaccgggcgccuccagagccugcagaccuacgugacccagcagcugauccgggcggccgagauccgcgccagcgccaaccucgccgcgaccaagauguccgagugcguccugggccagagcaagcggguggacuucugcggcaagggguaccaccugauguccuucccccagagcgccccgcacggcguggucuuccuccacgugacguacguccccgcccaggagaagaacuucaccaccgcccccgcgaucugccacgacgggaaggcccacuucccccgcgagggcguguucguguccaacgggacccacugguucgucacgcagcggaacuucuacgagccgcagaucaucaccaccgacaacaccuucgugagcggcaacugcgacguggucaucggcaucgugaacaacacgguguacgacccccugcagcccgagcuggacuccuucaaggaggagcucgacaaguacuucaagaaccacaccagccccgacgucgaccugggggacaucuccggcaucaacgccagcguggugaacauccagaaggagaucgaccgccugaacgaggucgccaagaaccucaacgagucccugaucgaccugcaggagcucgggaaguacgagcaguacaucaaguggccgugguacaucuggcugggcuucaucgccggccugaucgcgaucgugauggugaccaucaugcucugcugcaugaccagcugcugcuccugccugaaggggugcugcagcugcggcuccugcugcaaguucgacgaggacgacagcgagcccguccugaagggggugaagcuccacuacacgugaggacuagucccuguucccagagcccacuuuuuuuucuuuuuuugaaauaaaauagccugucuuucagaucuaaaaaaaaaaaaaaaaaaaaaaaaaaaaaaaaaaaaaaaaaaaaaaaaaaaaaaaaaaaaaaaaaaaaaaaaaaaaaaaaaaaaaaaaaaaaaaaaaaaa

SEQ ID NO: 24957 - RNA, 4167 nt, Artificial Sequence
  SARS-CoV-2/Wuhan/WIV05/2019__EPI_ISL_402128 spike protein mRNA gc (1-1273)(D614G_I692V)
aggagagggcgcuuggcuugcaaggacccugagcugcggcauugaagcacacccaacccaacucgacugaagucagccucacugaaccggaucugagaaucuucucucucugggcuugccagggcucuccgaaccuagcuagcauccucuucaauuccaacuagaaagcuuaccauguucguguuccugguccuccugccccuggugagcucccagugcgugaaccucaccacccgcacgcagcugccgcccgccuacaccaacagcuucacccggggcgucuacuaccccgacaagguguuccgcuccagcgugcugcacuccacccaggaccucuuccugcccuucuucagcaacgucacgugguuccacgccauccacguguccgggaccaacggcaccaagcgguucgacaacccggugcugcccuucaacgacggggucuacuucgcgagcaccgagaaguccaacaucauccgcggcuggaucuucgggacgacccucgacagcaagacccagucccugcugaucgugaacaacgccaccaacguggucaucaaggugugcgaguuccaguucugcaacgaccccuuccucggcguguacuaccacaagaacaacaagagcuggauggaguccgaguuccgggucuacagcuccgccaacaacugcacguucgaguacgugagccagcccuuccugauggaccuggagggcaagcaggggaacuucaagaaccuccgcgaguucguguucaagaacaucgacggcuacuucaagaucuacuccaagcacaccccgaucaaccugguccgggaccugccccagggguucagcgcccucgagccccugguggaccugcccaucggcaucaacaucacccgcuuccagacccuccuggcccugcaccgguccuaccucacgccgggggacagcagcuccggcuggaccgcgggcgccgccgccuacuacgugggguaccugcagccccgcaccuuccugcucaaguacaacgagaacggcaccaucacggacgcggucgacugcgcccuggacccccugagcgagaccaagugcacccucaaguccuucaccguggagaaggggaucuaccagacgagcaacuuccgggugcagcccaccgaguccaucguccgcuucccgaacaucaccaaccugugccccuucggcgagguguucaacgccacccgguucgccagcgucuacgccuggaaccgcaagcggaucuccaacugcguggcggacuacagcgugcuguacaacuccgccagcuucuccacguucaagugcuacggcgucagccccaccaagcucaacgaccugugcuucaccaacguguacgccgacuccuucgugauccgcggggacgagguccggcagaucgcccccggccagaccgggaagaucgccgacuacaacuacaagcugccggacgacuucacgggcugcgugaucgcguggaacagcaacaaccucgacuccaaggucgggggcaacuacaacuaccuguaccgccuguuccgcaagagcaaccucaagcccuucgagcgggacaucuccaccgagaucuaccaggccggcagcacccccugcaacgggguggagggcuucaacugcuacuucccccugcaguccuacggguuccagccgaccaacggcgugggguaccagcccuaccggguggucgugcugagcuucgagcuccugcacgcccccgccacggugugcggccccaagaaguccaccaaccuggucaagaacaagugcgugaacuucaacuucaacggccucaccgggaccggcgugcugaccgagagcaacaagaaguuccugccguuccagcaguucgggcgcgacaucgccgacacgaccgacgcgguccgcgacccccagacccuggagauccucgacaucacccccugcagcuucggcgggguguccgugaucacgccgggcaccaacaccagcaaccaggucgccgugcuguaccagggcgugaacugcaccgagguccccguggccauccacgccgaccagcugacgcccaccuggcggguguacuccaccggcagcaacgucuuccagacccgcgccgggugccucaucggcgcggagcacgugaacaacuccuacgagugcgacauccccaucggggccggcaucugcgccagcuaccagacgcagaccaacuccccgcggcgcgcccggagcguggcgucccagagcgucaucgccuacaccaugucccugggcgccgagaacagcgucgccuacuccaacaacagcaucgccauccccaccaacuucacgaucuccgugaccaccgagauccugcccgugagcaugaccaagacgagcgucgacugcaccauguacaucugcggggacuccaccgagugcagcaaccuccugcugcaguacggcuccuucugcacccagcucaaccgcgcgcugacggggaucgccguggagcaggacaagaacacccaggagguguucgcccaggucaagcagaucuacaagacgcccccgaucaaggacuucggcggguucaacuucagccagauccugcccgaccccuccaagcccagcaagcgguccuucaucgaggaccuccuguucaacaaggugacccuggccgacgccggcuucaucaagcaguacggcgacugccucggggacaucgcggcccgcgaccugaucugcgcccagaaguucaacggccugaccgugcucccgccccugcugaccgacgagaugaucgcccaguacaccagcgcccuccuggcggggaccaucacguccggcuggaccuucggggccggcgccgcccugcagauccccuucgcgaugcagauggccuaccgguucaacggcaucggggucacccagaacgugcucuacgagaaccagaagcugaucgccaaccaguucaacagcgccaucggcaagauccaggacucccugagcuccaccgccagcgcgcucgggaagcugcaggacguggucaaccagaacgcccaggcccugaacacgcucgugaagcagcuguccagcaacuucggcgccaucuccagcgugcugaacgacauccucucccgccuggacaaggucgaggccgaggugcagaucgaccggcugaucaccgggcgccuccagagccugcagaccuacgugacccagcagcugauccgggcggccgagauccgcgccagcgccaaccucgccgcgaccaagauguccgagugcguccugggccagagcaagcggguggacuucugcggcaagggguaccaccugauguccuucccccagagcgccccgcacggcguggucuuccuccacgugacguacguccccgcccaggagaagaacuucaccaccgcccccgcgaucugccacgacgggaaggcccacuucccccgcgagggcguguucguguccaacgggacccacugguucgucacgcagcggaacuucuacgagccgcagaucaucaccaccgacaacaccuucgugagcggcaacugcgacguggucaucggcaucgugaacaacacgguguacgacccccugcagcccgagcuggacuccuucaaggaggagcucgacaaguacuucaagaaccacaccagccccgacgucgaccugggggacaucuccggcaucaacgccagcguggugaacauccagaaggagaucgaccgccugaacgaggucgccaagaaccucaacgagucccugaucgaccugcaggagcucgggaaguacgagcaguacaucaaguggccgugguacaucuggcugggcuucaucgccggccugaucgcgaucgugauggugaccaucaugcucugcugcaugaccagcugcugcuccugccugaaggggugcugcagcugcggcuccugcugcaaguucgacgaggacgacagcgagcccguccugaagggggugaagcuccacuacacgugaggacuagucccuguucccagagcccacuuuuuuuucuuuuuuugaaauaaaauagccugucuuucagaucuaaaaaaaaaaaaaaaaaaaaaaaaaaaaaaaaaaaaaaaaaaaaaaaaaaaaaaaaaaaaaaaaaaaaaaaaaaaaaaaaaaaaaaaaaaaaaaaaaaaa

SEQ ID NO: 24958 - RNA, 4167 nt, Artificial Sequence
  SARS-CoV-2/Wuhan/WIV05/2019__EPI_ISL_402128 spike protein mRNA gc (1-1273)(D614G_M1229I)
aggagagggcgcuuggcuugcaaggacccugagcugcggcauugaagcacacccaacccaacucgacugaagucagccucacugaaccggaucugagaaucuucucucucugggcuugccagggcucuccgaaccuagcuagcauccucuucaauuccaacuagaaagcuuaccauguucguguuccugguccuccugccccuggugagcucccagugcgugaaccucaccacccgcacgcagcugccgcccgccuacaccaacagcuucacccggggcgucuacuaccccgacaagguguuccgcuccagcgugcugcacuccacccaggaccucuuccugcccuucuucagcaacgucacgugguuccacgccauccacguguccgggaccaacggcaccaagcgguucgacaacccggugcugcccuucaacgacggggucuacuucgcgagcaccgagaaguccaacaucauccgcggcuggaucuucgggacgacccucgacagcaagacccagucccugcugaucgugaacaacgccaccaacguggucaucaaggugugcgaguuccaguucugcaacgaccccuuccucggcguguacuaccacaagaacaacaagagcuggauggaguccgaguuccgggucuacagcuccgccaacaacugcacguucgaguacgugagccagcccuuccugauggaccuggagggcaagcaggggaacuucaagaaccuccgcgaguucguguucaagaacaucgacggcuacuucaagaucuacuccaagcacaccccgaucaaccugguccgggaccugccccagggguucagcgcccucgagccccugguggaccugcccaucggcaucaacaucacccgcuuccagacccuccuggcccugcaccgguccuaccucacgccgggggacagcagcuccggcuggaccgcgggcgccgccgccuacuacgugggguaccugcagccccgcaccuuccugcucaaguacaacgagaacggcaccaucacggacgcggucgacugcgcccuggacccccugagcgagaccaagugcacccucaaguccuucaccguggagaaggggaucuaccagacgagcaacuuccgggugcagcccaccgaguccaucguccgcuucccgaacaucaccaaccugugccccuucggcgagguguucaacgccacccgguucgccagcgucuacgccuggaaccgcaagcggaucuccaacugcguggcggacuacagcgugcuguacaacuccgccagcuucuccacguucaagugcuacggcgucagccccaccaagcucaacgaccugugcuucaccaacguguacgccgacuccuucgugauccgcggggacgagguccggcagaucgcccccggccagaccgggaagaucgccgacuacaacuacaagcugccggacgacuucacgggcugcgugaucgcguggaacagcaacaaccucgacuccaaggucgggggcaacuacaacuaccuguaccgccuguuccgcaagagcaaccucaagcccuucgagcgggacaucuccaccgagaucuaccaggccggcagcacccccugcaacgggguggagggcuucaacugcuacuucccccugcaguccuacggguuccagccgaccaacggcgugggguaccagcccuaccggguggucgugcugagcuucgagcuccugcacgcccccgccacggugugcggccccaagaaguccaccaaccuggucaagaacaagugcgugaacuucaacuucaacggccucaccgggaccggcgugcugaccgagagcaacaagaaguuccugccguuccagcaguucgggcgcgacaucgccgacacgaccgacgcgguccgcgacccccagacccuggagauccucgacaucacccccugcagcuucggcgggguguccgugaucacgccgggcaccaacaccagcaaccaggucgccgugcuguaccagggcgugaacugcaccgagguccccguggccauccacgccgaccagcugacgcccaccuggcggguguacuccaccggcagcaacgucuuccagacccgcgccgggugccucaucggcgcggagcacgugaacaacuccuacgagugcgacauccccaucggggccggcaucugcgccagcuaccagacgcagaccaacuccccgcggcgcgcccggagcguggcgucccagagcaucaucgccuacaccaugucccugggcgccgagaacagcgucgccuacuccaacaacagcaucgccauccccaccaacuucacgaucuccgugaccaccgagauccugcccgugagcaugaccaagacgagcgucgacugcaccauguacaucugcggggacuccaccgagugcagcaaccuccugcugcaguacggcuccuucugcacccagcucaaccgcgcgcugacggggaucgccguggagcaggacaagaacacccaggagguguucgcccaggucaagcagaucuacaagacgcccccgaucaaggacuucggcggguucaacuucagccagauccugcccgaccccuccaagcccagcaagcgguccuucaucgaggaccuccuguucaacaaggugacccuggccgacgccggcuucaucaagcaguacggcgacugccucggggacaucgcggcccgcgaccugaucugcgcccagaaguucaacggccugaccgugcucccgccccugcugaccgacgagaugaucgcccaguacaccagcgcccuccuggcggggaccaucacguccggcuggaccuucggggccggcgccgcccugcagauccccuucgcgaugcagauggccuaccgguucaacggcaucggggucacccagaacgugcucuacgagaaccagaagcugaucgccaaccaguucaacagcgccaucggcaagauccaggacucccugagcuccaccgccagcgcgcucgggaagcugcaggacguggucaaccagaacgcccaggcccugaacacgcucgugaagcagcuguccagcaacuucggcgccaucuccagcgugcugaacgacauccucucccgccuggacaaggucgaggccgaggugcagaucgaccggcugaucaccgggcgccuccagagccugcagaccuacgugacccagcagcugauccgggcggccgagauccgcgccagcgccaaccucgccgcgaccaagauguccgagugcguccugggccagagcaagcggguggacuucugcggcaagggguaccaccugauguccuucccccagagcgccccgcacggcguggucuuccuccacgugacguacguccccgcccaggagaagaacuucaccaccgcccccgcgaucugccacgacgggaaggcccacuucccccgcgagggcguguucguguccaacgggacccacugguucgucacgcagcggaacuucuacgagccgcagaucaucaccaccgacaacaccuucgugagcggcaacugcgacguggucaucggcaucgugaacaacacgguguacgacccccugcagcccgagcuggacuccuucaaggaggagcucgacaaguacuucaagaaccacaccagccccgacgucgaccugggggacaucuccggcaucaacgccagcguggugaacauccagaaggagaucgaccgccugaacgaggucgccaagaaccucaacgagucccugaucgaccugcaggagcucgggaaguacgagcaguacaucaaguggccgugguacaucuggcugggcuucaucgccggccugaucgcgaucgugaucgugaccaucaugcucugcugcaugaccagcugcugcuccugccugaaggggugcugcagcugcggcuccugcugcaaguucgacgaggacgacagcgagcccguccugaagggggugaagcuccacuacacgugaggacuagucccuguucccagagcccacuuuuuuuucuuuuuuugaaauaaaauagccugucuuucagaucuaaaaaaaaaaaaaaaaaaaaaaaaaaaaaaaaaaaaaaaaaaaaaaaaaaaaaaaaaaaaaaaaaaaaaaaaaaaaaaaaaaaaaaaaaaaaaaaaaaaa

SEQ ID NO: 24959 - RNA, 4161 nt, Artificial Sequence
  SARS-CoV-2/Wuhan/WIV05/2019__EPI_ISL_402128 spike protein mRNA gc (1-1273)(H69del_V70del_A222V_Y453F_S477N_D614G_I692V)
aggagagggcgcuuggcuugcaaggacccugagcugcggcauugaagcacacccaacccaacucgacugaagucagccucacugaaccggaucugagaaucuucucucucugggcuugccagggcucuccgaaccuagcuagcauccucuucaauuccaacuagaaagcuuaccauguucguguuccugguccuccugccccuggugagcucccagugcgugaaccucaccacccgcacgcagcugccgcccgccuacaccaacagcuucacccggggcgucuacuaccccgacaagguguuccgcuccagcgugcugcacuccacccaggaccucuuccugcccuucuucagcaacgucacgugguuccacgccaucuccgggaccaacggcaccaagcgguucgacaacccggugcugcccuucaacgacggggucuacuucgcgagcaccgagaaguccaacaucauccgcggcuggaucuucgggacgacccucgacagcaagacccagucccugcugaucgugaacaacgccaccaacguggucaucaaggugugcgaguuccaguucugcaacgaccccuuccucggcguguacuaccacaagaacaacaagagcuggauggaguccgaguuccgggucuacagcuccgccaacaacugcacguucgaguacgugagccagcccuuccugauggaccuggagggcaagcaggggaacuucaagaaccuccgcgaguucguguucaagaacaucgacggcuacuucaagaucuacuccaagcacaccccgaucaaccugguccgggaccugccccagggguucagcguccucgagccccugguggaccugcccaucggcaucaacaucacccgcuuccagacccuccuggcccugcaccgguccuaccucacgccgggggacagcagcuccggcuggaccgcgggcgccgccgccuacuacgugggguaccugcagccccgcaccuuccugcucaaguacaacgagaacggcaccaucacggacgcggucgacugcgcccuggacccccugagcgagaccaagugcacccucaaguccuucaccguggagaaggggaucuaccagacgagcaacuuccgggugcagcccaccgaguccaucguccgcuucccgaacaucaccaaccugugccccuucggcgagguguucaacgccacccgguucgccagcgucuacgccuggaaccgcaagcggaucuccaacugcguggcggacuacagcgugcuguacaacuccgccagcuucuccacguucaagugcuacggcgucagccccaccaagcucaacgaccugugcuucaccaacguguacgccgacuccuucgugauccgcggggacgagguccggcagaucgcccccggccagaccgggaagaucgccgacuacaacuacaagcugccggacgacuucacgggcugcgugaucgcguggaacagcaacaaccucgacuccaaggucgggggcaacuacaacuaccuguuccgccuguuccgcaagagcaaccucaagcccuucgagcgggacaucuccaccgagaucuaccaggccggcaacacccccugcaacgggguggagggcuucaacugcuacuucccccugcaguccuacggguuccagccgaccaacggcgugggguaccagcccuaccggguggucgugcugagcuucgagcuccugcacgcccccgccacggugugcggccccaagaaguccaccaaccuggucaagaacaagugcgugaacuucaacuucaacggccucaccgggaccggcgugcugaccgagagcaacaagaaguuccugccguuccagcaguucgggcgcgacaucgccgacacgaccgacgcgguccgcgacccccagacccuggagauccucgacaucacccccugcagcuucggcgggguguccgugaucacgccgggcaccaacaccagcaaccaggucgccgugcuguaccagggcgugaacugcaccgagguccccguggccauccacgccgaccagcugacgcccaccuggcggguguacuccaccggcagcaacgucuuccagacccgcgccgggugccucaucggcgcggagcacgugaacaacuccuacgagugcgacauccccaucggggccggcaucugcgccagcuaccagacgcagaccaacuccccgcggcgcgcccggagcguggcgucccagagcgucaucgccuacaccaugucccugggcgccgagaacagcgucgccuacuccaacaacagcaucgccauccccaccaacuucacgaucuccgugaccaccgagauccugcccgugagcaugaccaagacgagcgucgacugcaccauguacaucugcggggacuccaccgagugcagcaaccuccugcugcaguacggcuccuucugcacccagcucaaccgcgcgcugacggggaucgccguggagcaggacaagaacacccaggagguguucgcccaggucaagcagaucuacaagacgcccccgaucaaggacuucggcggguucaacuucagccagauccugcccgaccccuccaagcccagcaagcgguccuucaucgaggaccuccuguucaacaaggugacccuggccgacgccggcuucaucaagcaguacggcgacugccucggggacaucgcggcccgcgaccugaucugcgcccagaaguucaacggccugaccgugcucccgccccugcugaccgacgagaugaucgcccaguacaccagcgcccuccuggcggggaccaucacguccggcuggaccuucggggccggcgccgcccugcagauccccuucgcgaugcagauggccuaccgguucaacggcaucggggucacccagaacgugcucuacgagaaccagaagcugaucgccaaccaguucaacagcgccaucggcaagauccaggacucccugagcuccaccgccagcgcgcucgggaagcugcaggacguggucaaccagaacgcccaggcccugaacacgcucgugaagcagcuguccagcaacuucggcgccaucuccagcgugcugaacgacauccucucccgccuggacaaggucgaggccgaggugcagaucgaccggcugaucaccgggcgccuccagagccugcagaccuacgugacccagcagcugauccgggcggccgagauccgcgccagcgccaaccucgccgcgaccaagauguccgagugcguccugggccagagcaagcggguggacuucugcggcaagggguaccaccugauguccuucccccagagcgccccgcacggcguggucuuccuccacgugacguacguccccgcccaggagaagaacuucaccaccgcccccgcgaucugccacgacgggaaggcccacuucccccgcgagggcguguucguguccaacgggacccacugguucgucacgcagcggaacuucuacgagccgcagaucaucaccaccgacaacaccuucgugagcggcaacugcgacguggucaucggcaucgugaacaacacgguguacgacccccugcagcccgagcuggacuccuucaaggaggagcucgacaaguacuucaagaaccacaccagccccgacgucgaccugggggacaucuccggcaucaacgccagcguggugaacauccagaaggagaucgaccgccugaacgaggucgccaagaaccucaacgagucccugaucgaccugcaggagcucgggaaguacgagcaguacaucaaguggccgugguacaucuggcugggcuucaucgccggccugaucgcgaucgugauggugaccaucaugcucugcugcaugaccagcugcugcuccugccugaaggggugcugcagcugcggcuccugcugcaaguucgacgaggacgacagcgagcccguccugaagggggugaagcuccacuacacgugaggacuagucccuguucccagagcccacuuuuuuuucuuuuuuugaaauaaaauagccugucuuucagaucuaaaaaaaaaaaaaaaaaaaaaaaaaaaaaaaaaaaaaaaaaaaaaaaaaaaaaaaaaaaaaaaaaaaaaaaaaaaaaaaaaaaaaaaaaaaaaaaaaaaa

SEQ ID NO: 24960 - RNA, 4161 nt, Artificial Sequence
  SARS-CoV-2/Wuhan/WIV05/2019__EPI_ISL_402128 spike protein mRNA gc (1-1273)(H69del_V70del_Y453F_D614G_I692V_M1229I)
aggagagggcgcuuggcuugcaaggacccugagcugcggcauugaagcacacccaacccaacucgacugaagucagccucacugaaccggaucugagaaucuucucucucugggcuugccagggcucuccgaaccuagcuagcauccucuucaauuccaacuagaaagcuuaccauguucguguuccugguccuccugccccuggugagcucccagugcgugaaccucaccacccgcacgcagcugccgcccgccuacaccaacagcuucacccggggcgucuacuaccccgacaagguguuccgcuccagcgugcugcacuccacccaggaccucuuccugcccuucuucagcaacgucacgugguuccacgccaucuccgggaccaacggcaccaagcgguucgacaacccggugcugcccuucaacgacggggucuacuucgcgagcaccgagaaguccaacaucauccgcggcuggaucuucgggacgacccucgacagcaagacccagucccugcugaucgugaacaacgccaccaacguggucaucaaggugugcgaguuccaguucugcaacgaccccuuccucggcguguacuaccacaagaacaacaagagcuggauggaguccgaguuccgggucuacagcuccgccaacaacugcacguucgaguacgugagccagcccuuccugauggaccuggagggcaagcaggggaacuucaagaaccuccgcgaguucguguucaagaacaucgacggcuacuucaagaucuacuccaagcacaccccgaucaaccugguccgggaccugccccagggguucagcgcccucgagccccugguggaccugcccaucggcaucaacaucacccgcuuccagacccuccuggcccugcaccgguccuaccucacgccgggggacagcagcuccggcuggaccgcgggcgccgccgccuacuacgugggguaccugcagccccgcaccuuccugcucaaguacaacgagaacggcaccaucacggacgcggucgacugcgcccuggacccccugagcgagaccaagugcacccucaaguccuucaccguggagaaggggaucuaccagacgagcaacuuccgggugcagcccaccgaguccaucguccgcuucccgaacaucaccaaccugugccccuucggcgagguguucaacgccacccgguucgccagcgucuacgccuggaaccgcaagcggaucuccaacugcguggcggacuacagcgugcuguacaacuccgccagcuucuccacguucaagugcuacggcgucagccccaccaagcucaacgaccugugcuucaccaacguguacgccgacuccuucgugauccgcggggacgagguccggcagaucgcccccggccagaccgggaagaucgccgacuacaacuacaagcugccggacgacuucacgggcugcgugaucgcguggaacagcaacaaccucgacuccaaggucgggggcaacuacaacuaccuguuccgccuguuccgcaagagcaaccucaagcccuucgagcgggacaucuccaccgagaucuaccaggccggcagcacccccugcaacgggguggagggcuucaacugcuacuucccccugcaguccuacggguuccagccgaccaacggcgugggguaccagcccuaccggguggucgugcugagcuucgagcuccugcacgcccccgccacggugugcggccccaagaaguccaccaaccuggucaagaacaagugcgugaacuucaacuucaacggccucaccgggaccggcgugcugaccgagagcaacaagaaguuccugccguuccagcaguucgggcgcgacaucgccgacacgaccgacgcgguccgcgacccccagacccuggagauccucgacaucacccccugcagcuucggcgggguguccgugaucacgccgggcaccaacaccagcaaccaggucgccgugcuguaccagggcgugaacugcaccgagguccccguggccauccacgccgaccagcugacgcccaccuggcggguguacuccaccggcagcaacgucuuccagacccgcgccgggugccucaucggcgcggagcacgugaacaacuccuacgagugcgacauccccaucggggccggcaucugcgccagcuaccagacgcagaccaacuccccgcggcgcgcccggagcguggcgucccagagcgugaucgccuacaccaugucccugggcgccgagaacagcgucgccuacuccaacaacagcaucgccauccccaccaacuucacgaucuccgugaccaccgagauccugcccgugagcaugaccaagacgagcgucgacugcaccauguacaucugcggggacuccaccgagugcagcaaccuccugcugcaguacggcuccuucugcacccagcucaaccgcgcgcugacggggaucgccguggagcaggacaagaacacccaggagguguucgcccaggucaagcagaucuacaagacgcccccgaucaaggacuucggcggguucaacuucagccagauccugcccgaccccuccaagcccagcaagcgguccuucaucgaggaccuccuguucaacaaggugacccuggccgacgccggcuucaucaagcaguacggcgacugccucggggacaucgcggcccgcgaccugaucugcgcccagaaguucaacggccugaccgugcucccgccccugcugaccgacgagaugaucgcccaguacaccagcgcccuccuggcggggaccaucacguccggcuggaccuucggggccggcgccgcccugcagauccccuucgcgaugcagauggccuaccgguucaacggcaucggggucacccagaacgugcucuacgagaaccagaagcugaucgccaaccaguucaacagcgccaucggcaagauccaggacucccugagcuccaccgccagcgcgcucgggaagcugcaggacguggucaaccagaacgcccaggcccugaacacgcucgugaagcagcuguccagcaacuucggcgccaucuccagcgugcugaacgacauccucucccgccuggacaaggucgaggccgaggugcagaucgaccggcugaucaccgggcgccuccagagccugcagaccuacgugacccagcagcugauccgggcggccgagauccgcgccagcgccaaccucgccgcgaccaagauguccgagugcguccugggccagagcaagcggguggacuucugcggcaagggguaccaccugauguccuucccccagagcgccccgcacggcguggucuuccuccacgugacguacguccccgcccaggagaagaacuucaccaccgcccccgcgaucugccacgacgggaaggcccacuucccccgcgagggcguguucguguccaacgggacccacugguucgucacgcagcggaacuucuacgagccgcagaucaucaccaccgacaacaccuucgugagcggcaacugcgacguggucaucggcaucgugaacaacacgguguacgacccccugcagcccgagcuggacuccuucaaggaggagcucgacaaguacuucaagaaccacaccagccccgacgucgaccugggggacaucuccggcaucaacgccagcguggugaacauccagaaggagaucgaccgccugaacgaggucgccaagaaccucaacgagucccugaucgaccugcaggagcucgggaaguacgagcaguacaucaaguggccgugguacaucuggcugggcuucaucgccggccugaucgcgaucgugaucgugaccaucaugcucugcugcaugaccagcugcugcuccugccugaaggggugcugcagcugcggcuccugcugcaaguucgacgaggacgacagcgagcccguccugaagggggugaagcuccacuacacgugaggacuagucccuguucccagagcccacuuuuuuuucuuuuuuugaaauaaaauagccugucuuucagaucuaaaaaaaaaaaaaaaaaaaaaaaaaaaaaaaaaaaaaaaaaaaaaaaaaaaaaaaaaaaaaaaaaaaaaaaaaaaaaaaaaaaaaaaaaaaaaaaaaaaa

SEQ ID NO: 24961 - RNA, 4158 nt, Artificial Sequence
  SARS-CoV-2/Wuhan/WIV05/2019__EPI_ISL_402128 spike protein mRNA gc (1-1273)(H69del_V70del_Y144del_N501Y_A570D_D614G_P681H_T716I_S982 A_D1118H)
aggagagggcgcuuggcuugcaaggacccugagcugcggcauugaagcacacccaacccaacucgacugaagucagccucacugaaccggaucugagaaucuucucucucugggcuugccagggcucuccgaaccuagcuagcauccucuucaauuccaacuagaaagcuuaccauguucguguuccugguccuccugccccuggugagcucccagugcgugaaccucaccacccgcacgcagcugccgcccgccuacaccaacagcuucacccggggcgucuacuaccccgacaagguguuccgcuccagcgugcugcacuccacccaggaccucuuccugcccuucuucagcaacgucacgugguuccacgccaucuccgggaccaacggcaccaagcgguucgacaacccggugcugcccuucaacgacggggucuacuucgcgagcaccgagaaguccaacaucauccgcggcuggaucuucgggacgacccucgacagcaagacccagucccugcugaucgugaacaacgccaccaacguggucaucaaggugugcgaguuccaguucugcaacgaccccuuccucggcguguaccacaagaacaacaagagcuggauggaguccgaguuccgggucuacagcuccgccaacaacugcacguucgaguacgugagccagcccuuccugauggaccuggagggcaagcaggggaacuucaagaaccuccgcgaguucguguucaagaacaucgacggcuacuucaagaucuacuccaagcacaccccgaucaaccugguccgggaccugccccagggguucagcgcccucgagccccugguggaccugcccaucggcaucaacaucacccgcuuccagacccuccuggcccugcaccgguccuaccucacgccgggggacagcagcuccggcuggaccgcgggcgccgccgccuacuacgugggguaccugcagccccgcaccuuccugcucaaguacaacgagaacggcaccaucacggacgcggucgacugcgcccuggacccccugagcgagaccaagugcacccucaaguccuucaccguggagaaggggaucuaccagacgagcaacuuccgggugcagcccaccgaguccaucguccgcuucccgaacaucaccaaccugugccccuucggcgagguguucaacgccacccgguucgccagcgucuacgccuggaaccgcaagcggaucuccaacugcguggcggacuacagcgugcuguacaacuccgccagcuucuccacguucaagugcuacggcgucagccccaccaagcucaacgaccugugcuucaccaacguguacgccgacuccuucgugauccgcggggacgagguccggcagaucgcccccggccagaccgggaagaucgccgacuacaacuacaagcugccggacgacuucacgggcugcgugaucgcguggaacagcaacaaccucgacuccaaggucgggggcaacuacaacuaccuguaccgccuguuccgcaagagcaaccucaagcccuucgagcgggacaucuccaccgagaucuaccaggccggcagcacccccugcaacgggguggagggcuucaacugcuacuucccccugcaguccuacggguuccagccgaccuacggcgugggguaccagcccuaccggguggucgugcugagcuucgagcuccugcacgcccccgccacggugugcggccccaagaaguccaccaaccuggucaagaacaagugcgugaacuucaacuucaacggccucaccgggaccggcgugcugaccgagagcaacaagaaguuccugccguuccagcaguucgggcgcgacaucgacgacacgaccgacgcgguccgcgacccccagacccuggagauccucgacaucacccccugcagcuucggcgggguguccgugaucacgccgggcaccaacaccagcaaccaggucgccgugcuguaccagggcgugaacugcaccgagguccccguggccauccacgccgaccagcugacgcccaccuggcggguguacuccaccggcagcaacgucuuccagacccgcgccgggugccucaucggcgcggagcacgugaacaacuccuacgagugcgacauccccaucggggccggcaucugcgccagcuaccagacgcagaccaacucccaccggcgcgcccggagcguggcgucccagagcaucaucgccuacaccaugucccugggcgccgagaacagcgucgccuacuccaacaacagcaucgccauccccaucaacuucacgaucuccgugaccaccgagauccugcccgugagcaugaccaagacgagcgucgacugcaccauguacaucugcggggacuccaccgagugcagcaaccuccugcugcaguacggcuccuucugcacccagcucaaccgcgcgcugacggggaucgccguggagcaggacaagaacacccaggagguguucgcccaggucaagcagaucuacaagacgcccccgaucaaggacuucggcggguucaacuucagccagauccugcccgaccccuccaagcccagcaagcgguccuucaucgaggaccuccuguucaacaaggugacccuggccgacgccggcuucaucaagcaguacggcgacugccucggggacaucgcggcccgcgaccugaucugcgcccagaaguucaacggccugaccgugcucccgccccugcugaccgacgagaugaucgcccaguacaccagcgcccuccuggcggggaccaucacguccggcuggaccuucggggccggcgccgcccugcagauccccuucgcgaugcagauggccuaccgguucaacggcaucggggucacccagaacgugcucuacgagaaccagaagcugaucgccaaccaguucaacagcgccaucggcaagauccaggacucccugagcuccaccgccagcgcgcucgggaagcugcaggacguggucaaccagaacgcccaggcccugaacacgcucgugaagcagcuguccagcaacuucggcgccaucuccagcgugcugaacgacauccucgcccgccuggacaaggucgaggccgaggugcagaucgaccggcugaucaccgggcgccuccagagccugcagaccuacgugacccagcagcugauccgggcggccgagauccgcgccagcgccaaccucgccgcgaccaagauguccgagugcguccugggccagagcaagcggguggacuucugcggcaagggguaccaccugauguccuucccccagagcgccccgcacggcguggucuuccuccacgugacguacguccccgcccaggagaagaacuucaccaccgcccccgcgaucugccacgacgggaaggcccacuucccccgcgagggcguguucguguccaacgggacccacugguucgucacgcagcggaacuucuacgagccgcagaucaucaccacccacaacaccuucgugagcggcaacugcgacguggucaucggcaucgugaacaacacgguguacgacccccugcagcccgagcuggacuccuucaaggaggagcucgacaaguacuucaagaaccacaccagccccgacgucgaccugggggacaucuccggcaucaacgccagcguggugaacauccagaaggagaucgaccgccugaacgaggucgccaagaaccucaacgagucccugaucgaccugcaggagcucgggaaguacgagcaguacaucaaguggccgugguacaucuggcugggcuucaucgccggccugaucgcgaucgugauggugaccaucaugcucugcugcaugaccagcugcugcuccugccugaaggggugcugcagcugcggcuccugcugcaaguucgacgaggacgacagcgagcccguccugaagggggugaagcuccacuacacgugaggacuagucccuguucccagagcccacuuuuuuuucuuuuuuugaaauaaaauagccugucuuucagaucuaaaaaaaaaaaaaaaaaaaaaaaaaaaaaaaaaaaaaaaaaaaaaaaaaaaaaaaaaaaaaaaaaaaaaaaaaaaaaaaaaaaaaaaaaaaaaaaaaaaa

SEQ ID NO: 24962 - RNA, 4167 nt, Artificial Sequence
  SARS-CoV-2/Wuhan/WIV05/2019__EPI_ISL_402128 spike protein mRNA gc (1-1273)(K417N_E484K_N501Y_D614G)
aggagagggcgcuuggcuugcaaggacccugagcugcggcauugaagcacacccaacccaacucgacugaagucagccucacugaaccggaucugagaaucuucucucucugggcuugccagggcucuccgaaccuagcuagcauccucuucaauuccaacuagaaagcuuaccauguucguguuccugguccuccugccccuggugagcucccagugcgugaaccucaccacccgcacgcagcugccgcccgccuacaccaacagcuucacccggggcgucuacuaccccgacaagguguuccgcuccagcgugcugcacuccacccaggaccucuuccugcccuucuucagcaacgucacgugguuccacgccauccacguguccgggaccaacggcaccaagcgguucgacaacccggugcugcccuucaacgacggggucuacuucgcgagcaccgagaaguccaacaucauccgcggcuggaucuucgggacgacccucgacagcaagacccagucccugcugaucgugaacaacgccaccaacguggucaucaaggugugcgaguuccaguucugcaacgaccccuuccucggcguguacuaccacaagaacaacaagagcuggauggaguccgaguuccgggucuacagcuccgccaacaacugcacguucgaguacgugagccagcccuuccugauggaccuggagggcaagcaggggaacuucaagaaccuccgcgaguucguguucaagaacaucgacggcuacuucaagaucuacuccaagcacaccccgaucaaccugguccgggaccugccccagggguucagcgcccucgagccccugguggaccugcccaucggcaucaacaucacccgcuuccagacccuccuggcccugcaccgguccuaccucacgccgggggacagcagcuccggcuggaccgcgggcgccgccgccuacuacgugggguaccugcagccccgcaccuuccugcucaaguacaacgagaacggcaccaucacggacgcggucgacugcgcccuggacccccugagcgagaccaagugcacccucaaguccuucaccguggagaaggggaucuaccagacgagcaacuuccgggugcagcccaccgaguccaucguccgcuucccgaacaucaccaaccugugccccuucggcgagguguucaacgccacccgguucgccagcgucuacgccuggaaccgcaagcggaucuccaacugcguggcggacuacagcgugcuguacaacuccgccagcuucuccacguucaagugcuacggcgucagccccaccaagcucaacgaccugugcuucaccaacguguacgccgacuccuucgugauccgcggggacgagguccggcagaucgcccccggccagaccgggaacaucgccgacuacaacuacaagcugccggacgacuucacgggcugcgugaucgcguggaacagcaacaaccucgacuccaaggucgggggcaacuacaacuaccuguaccgccuguuccgcaagagcaaccucaagcccuucgagcgggacaucuccaccgagaucuaccaggccggcagcacccccugcaacggggugaagggcuucaacugcuacuucccccugcaguccuacggguuccagccgaccuacggcgugggguaccagcccuaccggguggucgugcugagcuucgagcuccugcacgcccccgccacggugugcggccccaagaaguccaccaaccuggucaagaacaagugcgugaacuucaacuucaacggccucaccgggaccggcgugcugaccgagagcaacaagaaguuccugccguuccagcaguucgggcgcgacaucgccgacacgaccgacgcgguccgcgacccccagacccuggagauccucgacaucacccccugcagcuucggcgggguguccgugaucacgccgggcaccaacaccagcaaccaggucgccgugcuguaccagggcgugaacugcaccgagguccccguggccauccacgccgaccagcugacgcccaccuggcggguguacuccaccggcagcaacgucuuccagacccgcgccgggugccucaucggcgcggagcacgugaacaacuccuacgagugcgacauccccaucggggccggcaucugcgccagcuaccagacgcagaccaacuccccgcggcgcgcccggagcguggcgucccagagcaucaucgccuacaccaugucccugggcgccgagaacagcgucgccuacuccaacaacagcaucgccauccccaccaacuucacgaucuccgugaccaccgagauccugcccgugagcaugaccaagacgagcgucgacugcaccauguacaucugcggggacuccaccgagugcagcaaccuccugcugcaguacggcuccuucugcacccagcucaaccgcgcgcugacggggaucgccguggagcaggacaagaacacccaggagguguucgcccaggucaagcagaucuacaagacgcccccgaucaaggacuucggcggguucaacuucagccagauccugcccgaccccuccaagcccagcaagcgguccuucaucgaggaccuccuguucaacaaggugacccuggccgacgccggcuucaucaagcaguacggcgacugccucggggacaucgcggcccgcgaccugaucugcgcccagaaguucaacggccugaccgugcucccgccccugcugaccgacgagaugaucgcccaguacaccagcgcccuccuggcggggaccaucacguccggcuggaccuucggggccggcgccgcccugcagauccccuucgcgaugcagauggccuaccgguucaacggcaucggggucacccagaacgugcucuacgagaaccagaagcugaucgccaaccaguucaacagcgccaucggcaagauccaggacucccugagcuccaccgccagcgcgcucgggaagcugcaggacguggucaaccagaacgcccaggcccugaacacgcucgugaagcagcuguccagcaacuucggcgccaucuccagcgugcugaacgacauccucucccgccuggacaaggucgaggccgaggugcagaucgaccggcugaucaccgggcgccuccagagccugcagaccuacgugacccagcagcugauccgggcggccgagauccgcgccagcgccaaccucgccgcgaccaagauguccgagugcguccugggccagagcaagcggguggacuucugcggcaagggguaccaccugauguccuucccccagagcgccccgcacggcguggucuuccuccacgugacguacguccccgcccaggagaagaacuucaccaccgcccccgcgaucugccacgacgggaaggcccacuucccccgcgagggcguguucguguccaacgggacccacugguucgucacgcagcggaacuucuacgagccgcagaucaucaccaccgacaacaccuucgugagcggcaacugcgacguggucaucggcaucgugaacaacacgguguacgacccccugcagcccgagcuggacuccuucaaggaggagcucgacaaguacuucaagaaccacaccagccccgacgucgaccugggggacaucuccggcaucaacgccagcguggugaacauccagaaggagaucgaccgccugaacgaggucgccaagaaccucaacgagucccugaucgaccugcaggagcucgggaaguacgagcaguacaucaaguggccgugguacaucuggcugggcuucaucgccggccugaucgcgaucgugauggugaccaucaugcucugcugcaugaccagcugcugcuccugccugaaggggugcugcagcugcggcuccugcugcaaguucgacgaggacgacagcgagcccguccugaagggggugaagcuccacuacacgugaggacuagucccuguucccagagcccacuuuuuuuucuuuuuuugaaauaaaauagccugucuuucagaucuaaaaaaaaaaaaaaaaaaaaaaaaaaaaaaaaaaaaaaaaaaaaaaaaaaaaaaaaaaaaaaaaaaaaaaaaaaaaaaaaaaaaaaaaaaaaaaaaaaaa

SEQ ID NO: 24963 - RNA, 4158 nt, Artificial Sequence
  SARS-CoV-2/Wuhan/WIV05/2019__EPI_ISL_402128 spike protein mRNA gc (1-1273)(L18F_D80A_D215G_L242del_A243del_L244del_R246I_K417N_E484 K_N501Y_D614G_A701V)
aggagagggcgcuuggcuugcaaggacccugagcugcggcauugaagcacacccaacccaacucgacugaagucagccucacugaaccggaucugagaaucuucucucucugggcuugccagggcucuccgaaccuagcuagcauccucuucaauuccaacuagaaagcuuaccauguucguguuccugguccuccugccccuggugagcucccagugcgugaacuucaccacccgcacgcagcugccgcccgccuacaccaacagcuucacccggggcgucuacuaccccgacaagguguuccgcuccagcgugcugcacuccacccaggaccucuuccugcccuucuucagcaacgucacgugguuccacgccauccacguguccgggaccaacggcaccaagcgguucgccaacccggugcugcccuucaacgacggggucuacuucgcgagcaccgagaaguccaacaucauccgcggcuggaucuucgggacgacccucgacagcaagacccagucccugcugaucgugaacaacgccaccaacguggucaucaaggugugcgaguuccaguucugcaacgaccccuuccucggcguguacuaccacaagaacaacaagagcuggauggaguccgaguuccgggucuacagcuccgccaacaacugcacguucgaguacgugagccagcccuuccugauggaccuggagggcaagcaggggaacuucaagaaccuccgcgaguucguguucaagaacaucgacggcuacuucaagaucuacuccaagcacaccccgaucaaccugguccggggccugccccagggguucagcgcccucgagccccugguggaccugcccaucggcaucaacaucacccgcuuccagacccuccacaucuccuaccucacgccgggggacagcagcuccggcuggaccgcgggcgccgccgccuacuacgugggguaccugcagccccgcaccuuccugcucaaguacaacgagaacggcaccaucacggacgcggucgacugcgcccuggacccccugagcgagaccaagugcacccucaaguccuucaccguggagaaggggaucuaccagacgagcaacuuccgggugcagcccaccgaguccaucguccgcuucccgaacaucaccaaccugugccccuucggcgagguguucaacgccacccgguucgccagcgucuacgccuggaaccgcaagcggaucuccaacugcguggcggacuacagcgugcuguacaacuccgccagcuucuccacguucaagugcuacggcgucagccccaccaagcucaacgaccugugcuucaccaacguguacgccgacuccuucgugauccgcggggacgagguccggcagaucgcccccggccagaccgggaacaucgccgacuacaacuacaagcugccggacgacuucacgggcugcgugaucgcguggaacagcaacaaccucgacuccaaggucgggggcaacuacaacuaccuguaccgccuguuccgcaagagcaaccucaagcccuucgagcgggacaucuccaccgagaucuaccaggccggcagcacccccugcaacggggugaagggcuucaacugcuacuucccccugcaguccuacggguuccagccgaccuacggcgugggguaccagcccuaccggguggucgugcugagcuucgagcuccugcacgcccccgccacggugugcggccccaagaaguccaccaaccuggucaagaacaagugcgugaacuucaacuucaacggccucaccgggaccggcgugcugaccgagagcaacaagaaguuccugccguuccagcaguucgggcgcgacaucgccgacacgaccgacgcgguccgcgacccccagacccuggagauccucgacaucacccccugcagcuucggcgggguguccgugaucacgccgggcaccaacaccagcaaccaggucgccgugcuguaccagggcgugaacugcaccgagguccccguggccauccacgccgaccagcugacgcccaccuggcggguguacuccaccggcagcaacgucuuccagacccgcgccgggugccucaucggcgcggagcacgugaacaacuccuacgagugcgacauccccaucggggccggcaucugcgccagcuaccagacgcagaccaacuccccgcggcgcgcccggagcguggcgucccagagcaucaucgccuacaccaugucccugggcguggagaacagcgucgccuacuccaacaacagcaucgccauccccaccaacuucacgaucuccgugaccaccgagauccugcccgugagcaugaccaagacgagcgucgacugcaccauguacaucugcggggacuccaccgagugcagcaaccuccugcugcaguacggcuccuucugcacccagcucaaccgcgcgcugacggggaucgccguggagcaggacaagaacacccaggagguguucgcccaggucaagcagaucuacaagacgcccccgaucaaggacuucggcggguucaacuucagccagauccugcccgaccccuccaagcccagcaagcgguccuucaucgaggaccuccuguucaacaaggugacccuggccgacgccggcuucaucaagcaguacggcgacugccucggggacaucgcggcccgcgaccugaucugcgcccagaaguucaacggccugaccgugcucccgccccugcugaccgacgagaugaucgcccaguacaccagcgcccuccuggcggggaccaucacguccggcuggaccuucggggccggcgccgcccugcagauccccuucgcgaugcagauggccuaccgguucaacggcaucggggucacccagaacgugcucuacgagaaccagaagcugaucgccaaccaguucaacagcgccaucggcaagauccaggacucccugagcuccaccgccagcgcgcucgggaagcugcaggacguggucaaccagaacgcccaggcccugaacacgcucgugaagcagcuguccagcaacuucggcgccaucuccagcgugcugaacgacauccucucccgccuggacaaggucgaggccgaggugcagaucgaccggcugaucaccgggcgccuccagagccugcagaccuacgugacccagcagcugauccgggcggccgagauccgcgccagcgccaaccucgccgcgaccaagauguccgagugcguccugggccagagcaagcggguggacuucugcggcaagggguaccaccugauguccuucccccagagcgccccgcacggcguggucuuccuccacgugacguacguccccgcccaggagaagaacuucaccaccgcccccgcgaucugccacgacgggaaggcccacuucccccgcgagggcguguucguguccaacgggacccacugguucgucacgcagcggaacuucuacgagccgcagaucaucaccaccgacaacaccuucgugagcggcaacugcgacguggucaucggcaucgugaacaacacgguguacgacccccugcagcccgagcuggacuccuucaaggaggagcucgacaaguacuucaagaaccacaccagccccgacgucgaccugggggacaucuccggcaucaacgccagcguggugaacauccagaaggagaucgaccgccugaacgaggucgccaagaaccucaacgagucccugaucgaccugcaggagcucgggaaguacgagcaguacaucaaguggccgugguacaucuggcugggcuucaucgccggccugaucgcgaucgugauggugaccaucaugcucugcugcaugaccagcugcugcuccugccugaaggggugcugcagcugcggcuccugcugcaaguucgacgaggacgacagcgagcccguccugaagggggugaagcuccacuacacgugaggacuagucccuguucccagagcccacuuuuuuuucuuuuuuugaaauaaaauagccugucuuucagaucuaaaaaaaaaaaaaaaaaaaaaaaaaaaaaaaaaaaaaaaaaaaaaaaaaaaaaaaaaaaaaaaaaaaaaaaaaaaaaaaaaaaaaaaaaaaaaaaaaaaa

SEQ ID NO: 24964 - RNA, 4167 nt, Artificial Sequence
  SARS-CoV-2/Wuhan/WIV05/2019__EPI_ISL_402128 spike protein mRNA gc (1-1273)(E484K_D614G)
aggagagggcgcuuggcuugcaaggacccugagcugcggcauugaagcacacccaacccaacucgacugaagucagccucacugaaccggaucugagaaucuucucucucugggcuugccagggcucuccgaaccuagcuagcauccucuucaauuccaacuagaaagcuuaccauguucguguuccugguccuccugccccuggugagcucccagugcgugaaccucaccacccgcacgcagcugccgcccgccuacaccaacagcuucacccggggcgucuacuaccccgacaagguguuccgcuccagcgugcugcacuccacccaggaccucuuccugcccuucuucagcaacgucacgugguuccacgccauccacguguccgggaccaacggcaccaagcgguucgacaacccggugcugcccuucaacgacggggucuacuucgcgagcaccgagaaguccaacaucauccgcggcuggaucuucgggacgacccucgacagcaagacccagucccugcugaucgugaacaacgccaccaacguggucaucaaggugugcgaguuccaguucugcaacgaccccuuccucggcguguacuaccacaagaacaacaagagcuggauggaguccgaguuccgggucuacagcuccgccaacaacugcacguucgaguacgugagccagcccuuccugauggaccuggagggcaagcaggggaacuucaagaaccuccgcgaguucguguucaagaacaucgacggcuacuucaagaucuacuccaagcacaccccgaucaaccugguccgggaccugccccagggguucagcgcccucgagccccugguggaccugcccaucggcaucaacaucacccgcuuccagacccuccuggcccugcaccgguccuaccucacgccgggggacagcagcuccggcuggaccgcgggcgccgccgccuacuacgugggguaccugcagccccgcaccuuccugcucaaguacaacgagaacggcaccaucacggacgcggucgacugcgcccuggacccccugagcgagaccaagugcacccucaaguccuucaccguggagaaggggaucuaccagacgagcaacuuccgggugcagcccaccgaguccaucguccgcuucccgaacaucaccaaccugugccccuucggcgagguguucaacgccacccgguucgccagcgucuacgccuggaaccgcaagcggaucuccaacugcguggcggacuacagcgugcuguacaacuccgccagcuucuccacguucaagugcuacggcgucagccccaccaagcucaacgaccugugcuucaccaacguguacgccgacuccuucgugauccgcggggacgagguccggcagaucgcccccggccagaccgggaagaucgccgacuacaacuacaagcugccggacgacuucacgggcugcgugaucgcguggaacagcaacaaccucgacuccaaggucgggggcaacuacaacuaccuguaccgccuguuccgcaagagcaaccucaagcccuucgagcgggacaucuccaccgagaucuaccaggccggcagcacccccugcaacggggugaagggcuucaacugcuacuucccccugcaguccuacggguuccagccgaccaacggcgugggguaccagcccuaccggguggucgugcugagcuucgagcuccugcacgcccccgccacggugugcggccccaagaaguccaccaaccuggucaagaacaagugcgugaacuucaacuucaacggccucaccgggaccggcgugcugaccgagagcaacaagaaguuccugccguuccagcaguucgggcgcgacaucgccgacacgaccgacgcgguccgcgacccccagacccuggagauccucgacaucacccccugcagcuucggcgggguguccgugaucacgccgggcaccaacaccagcaaccaggucgccgugcuguaccagggcgugaacugcaccgagguccccguggccauccacgccgaccagcugacgcccaccuggcggguguacuccaccggcagcaacgucuuccagacccgcgccgggugccucaucggcgcggagcacgugaacaacuccuacgagugcgacauccccaucggggccggcaucugcgccagcuaccagacgcagaccaacuccccgcggcgcgcccggagcguggcgucccagagcaucaucgccuacaccaugucccugggcgccgagaacagcgucgccuacuccaacaacagcaucgccauccccaccaacuucacgaucuccgugaccaccgagauccugcccgugagcaugaccaagacgagcgucgacugcaccauguacaucugcggggacuccaccgagugcagcaaccuccugcugcaguacggcuccuucugcacccagcucaaccgcgcgcugacggggaucgccguggagcaggacaagaacacccaggagguguucgcccaggucaagcagaucuacaagacgcccccgaucaaggacuucggcggguucaacuucagccagauccugcccgaccccuccaagcccagcaagcgguccuucaucgaggaccuccuguucaacaaggugacccuggccgacgccggcuucaucaagcaguacggcgacugccucggggacaucgcggcccgcgaccugaucugcgcccagaaguucaacggccugaccgugcucccgccccugcugaccgacgagaugaucgcccaguacaccagcgcccuccuggcggggaccaucacguccggcuggaccuucggggccggcgccgcccugcagauccccuucgcgaugcagauggccuaccgguucaacggcaucggggucacccagaacgugcucuacgagaaccagaagcugaucgccaaccaguucaacagcgccaucggcaagauccaggacucccugagcuccaccgccagcgcgcucgggaagcugcaggacguggucaaccagaacgcccaggcccugaacacgcucgugaagcagcuguccagcaacuucggcgccaucuccagcgugcugaacgacauccucucccgccuggacaaggucgaggccgaggugcagaucgaccggcugaucaccgggcgccuccagagccugcagaccuacgugacccagcagcugauccgggcggccgagauccgcgccagcgccaaccucgccgcgaccaagauguccgagugcguccugggccagagcaagcggguggacuucugcggcaagggguaccaccugauguccuucccccagagcgccccgcacggcguggucuuccuccacgugacguacguccccgcccaggagaagaacuucaccaccgcccccgcgaucugccacgacgggaaggcccacuucccccgcgagggcguguucguguccaacgggacccacugguucgucacgcagcggaacuucuacgagccgcagaucaucaccaccgacaacaccuucgugagcggcaacugcgacguggucaucggcaucgugaacaacacgguguacgacccccugcagcccgagcuggacuccuucaaggaggagcucgacaaguacuucaagaaccacaccagccccgacgucgaccugggggacaucuccggcaucaacgccagcguggugaacauccagaaggagaucgaccgccugaacgaggucgccaagaaccucaacgagucccugaucgaccugcaggagcucgggaaguacgagcaguacaucaaguggccgugguacaucuggcugggcuucaucgccggccugaucgcgaucgugauggugaccaucaugcucugcugcaugaccagcugcugcuccugccugaaggggugcugcagcugcggcuccugcugcaaguucgacgaggacgacagcgagcccguccugaagggggugaagcuccacuacacgugaggacuagucccuguucccagagcccacuuuuuuuucuuuuuuugaaauaaaauagccugucuuucagaucuaaaaaaaaaaaaaaaaaaaaaaaaaaaaaaaaaaaaaaaaaaaaaaaaaaaaaaaaaaaaaaaaaaaaaaaaaaaaaaaaaaaaaaaaaaaaaaaaaaaa

SEQ ID NO: 24965 - RNA, 4167 nt, Artificial Sequence
  SARS-CoV-2/Wuhan/WIV05/2019__EPI_ISL_402128 spike protein mRNA gc (1-1273)(L18F_T20N_P26S_D138Y_R190S_K417T_E484K_N501Y_D614G_H655Y _T1027I)
aggagagggcgcuuggcuugcaaggacccugagcugcggcauugaagcacacccaacccaacucgacugaagucagccucacugaaccggaucugagaaucuucucucucugggcuugccagggcucuccgaaccuagcuagcauccucuucaauuccaacuagaaagcuuaccauguucguguuccugguccuccugccccuggugagcucccagugcgugaacuucaccaaccgcacgcagcugccgagcgccuacaccaacagcuucacccggggcgucuacuaccccgacaagguguuccgcuccagcgugcugcacuccacccaggaccucuuccugcccuucuucagcaacgucacgugguuccacgccauccacguguccgggaccaacggcaccaagcgguucgacaacccggugcugcccuucaacgacggggucuacuucgcgagcaccgagaaguccaacaucauccgcggcuggaucuucgggacgacccucgacagcaagacccagucccugcugaucgugaacaacgccaccaacguggucaucaaggugugcgaguuccaguucugcaacuaccccuuccucggcguguacuaccacaagaacaacaagagcuggauggaguccgaguuccgggucuacagcuccgccaacaacugcacguucgaguacgugagccagcccuuccugauggaccuggagggcaagcaggggaacuucaagaaccucagcgaguucguguucaagaacaucgacggcuacuucaagaucuacuccaagcacaccccgaucaaccugguccgggaccugccccagggguucagcgcccucgagccccugguggaccugcccaucggcaucaacaucacccgcuuccagacccuccuggcccugcaccgguccuaccucacgccgggggacagcagcuccggcuggaccgcgggcgccgccgccuacuacgugggguaccugcagccccgcaccuuccugcucaaguacaacgagaacggcaccaucacggacgcggucgacugcgcccuggacccccugagcgagaccaagugcacccucaaguccuucaccguggagaaggggaucuaccagacgagcaacuuccgggugcagcccaccgaguccaucguccgcuucccgaacaucaccaaccugugccccuucggcgagguguucaacgccacccgguucgccagcgucuacgccuggaaccgcaagcggaucuccaacugcguggcggacuacagcgugcuguacaacuccgccagcuucuccacguucaagugcuacggcgucagccccaccaagcucaacgaccugugcuucaccaacguguacgccgacuccuucgugauccgcggggacgagguccggcagaucgcccccggccagaccgggaccaucgccgacuacaacuacaagcugccggacgacuucacgggcugcgugaucgcguggaacagcaacaaccucgacuccaaggucgggggcaacuacaacuaccuguaccgccuguuccgcaagagcaaccucaagcccuucgagcgggacaucuccaccgagaucuaccaggccggcagcacccccugcaacggggugaagggcuucaacugcuacuucccccugcaguccuacggguuccagccgaccuacggcgugggguaccagcccuaccggguggucgugcugagcuucgagcuccugcacgcccccgccacggugugcggccccaagaaguccaccaaccuggucaagaacaagugcgugaacuucaacuucaacggccucaccgggaccggcgugcugaccgagagcaacaagaaguuccugccguuccagcaguucgggcgcgacaucgccgacacgaccgacgcgguccgcgacccccagacccuggagauccucgacaucacccccugcagcuucggcgggguguccgugaucacgccgggcaccaacaccagcaaccaggucgccgugcuguaccagggcgugaacugcaccgagguccccguggccauccacgccgaccagcugacgcccaccuggcggguguacuccaccggcagcaacgucuuccagacccgcgccgggugccucaucggcgcggaguacgugaacaacuccuacgagugcgacauccccaucggggccggcaucugcgccagcuaccagacgcagaccaacuccccgcggcgcgcccggagcguggcgucccagagcaucaucgccuacaccaugucccugggcgccgagaacagcgucgccuacuccaacaacagcaucgccauccccaccaacuucacgaucuccgugaccaccgagauccugcccgugagcaugaccaagacgagcgucgacugcaccauguacaucugcggggacuccaccgagugcagcaaccuccugcugcaguacggcuccuucugcacccagcucaaccgcgcgcugacggggaucgccguggagcaggacaagaacacccaggagguguucgcccaggucaagcagaucuacaagacgcccccgaucaaggacuucggcggguucaacuucagccagauccugcccgaccccuccaagcccagcaagcgguccuucaucgaggaccuccuguucaacaaggugacccuggccgacgccggcuucaucaagcaguacggcgacugccucggggacaucgcggcccgcgaccugaucugcgcccagaaguucaacggccugaccgugcucccgccccugcugaccgacgagaugaucgcccaguacaccagcgcccuccuggcggggaccaucacguccggcuggaccuucggggccggcgccgcccugcagauccccuucgcgaugcagauggccuaccgguucaacggcaucggggucacccagaacgugcucuacgagaaccagaagcugaucgccaaccaguucaacagcgccaucggcaagauccaggacucccugagcuccaccgccagcgcgcucgggaagcugcaggacguggucaaccagaacgcccaggcccugaacacgcucgugaagcagcuguccagcaacuucggcgccaucuccagcgugcugaacgacauccucucccgccuggacaaggucgaggccgaggugcagaucgaccggcugaucaccgggcgccuccagagccugcagaccuacgugacccagcagcugauccgggcggccgagauccgcgccagcgccaaccucgccgcgaucaagauguccgagugcguccugggccagagcaagcggguggacuucugcggcaagggguaccaccugauguccuucccccagagcgccccgcacggcguggucuuccuccacgugacguacguccccgcccaggagaagaacuucaccaccgcccccgcgaucugccacgacgggaaggcccacuucccccgcgagggcguguucguguccaacgggacccacugguucgucacgcagcggaacuucuacgagccgcagaucaucaccaccgacaacaccuucgugagcggcaacugcgacguggucaucggcaucgugaacaacacgguguacgacccccugcagcccgagcuggacuccuucaaggaggagcucgacaaguacuucaagaaccacaccagccccgacgucgaccugggggacaucuccggcaucaacgccagcguggugaacauccagaaggagaucgaccgccugaacgaggucgccaagaaccucaacgagucccugaucgaccugcaggagcucgggaaguacgagcaguacaucaaguggccgugguacaucuggcugggcuucaucgccggccugaucgcgaucgugauggugaccaucaugcucugcugcaugaccagcugcugcuccugccugaaggggugcugcagcugcggcuccugcugcaaguucgacgaggacgacagcgagcccguccugaagggggugaagcuccacuacacgugaggacuagucccuguucccagagcccacuuuuuuuucuuuuuuugaaauaaaauagccugucuuucagaucuaaaaaaaaaaaaaaaaaaaaaaaaaaaaaaaaaaaaaaaaaaaaaaaaaaaaaaaaaaaaaaaaaaaaaaaaaaaaaaaaaaaaaaaaaaaaaaaaaaaa

SEQ ID NO: 24966 - RNA, 4167 nt, Artificial Sequence
  SARS-CoV-2/Wuhan/WIV05/2019__EPI_ISL_402128 spike protein mRNA gc (1-1273)(S13I_W152C_L452R_D614G)
aggagagggcgcuuggcuugcaaggacccugagcugcggcauugaagcacacccaacccaacucgacugaagucagccucacugaaccggaucugagaaucuucucucucugggcuugccagggcucuccgaaccuagcuagcauccucuucaauuccaacuagaaagcuuaccauguucguguuccugguccuccugccccuggugagcauccagugcgugaaccucaccacccgcacgcagcugccgcccgccuacaccaacagcuucacccggggcgucuacuaccccgacaagguguuccgcuccagcgugcugcacuccacccaggaccucuuccugcccuucuucagcaacgucacgugguuccacgccauccacguguccgggaccaacggcaccaagcgguucgacaacccggugcugcccuucaacgacggggucuacuucgcgagcaccgagaaguccaacaucauccgcggcuggaucuucgggacgacccucgacagcaagacccagucccugcugaucgugaacaacgccaccaacguggucaucaaggugugcgaguuccaguucugcaacgaccccuuccucggcguguacuaccacaagaacaacaagagcugcauggaguccgaguuccgggucuacagcuccgccaacaacugcacguucgaguacgugagccagcccuuccugauggaccuggagggcaagcaggggaacuucaagaaccuccgcgaguucguguucaagaacaucgacggcuacuucaagaucuacuccaagcacaccccgaucaaccugguccgggaccugccccagggguucagcgcccucgagccccugguggaccugcccaucggcaucaacaucacccgcuuccagacccuccuggcccugcaccgguccuaccucacgccgggggacagcagcuccggcuggaccgcgggcgccgccgccuacuacgugggguaccugcagccccgcaccuuccugcucaaguacaacgagaacggcaccaucacggacgcggucgacugcgcccuggacccccugagcgagaccaagugcacccucaaguccuucaccguggagaaggggaucuaccagacgagcaacuuccgggugcagcccaccgaguccaucguccgcuucccgaacaucaccaaccugugccccuucggcgagguguucaacgccacccgguucgccagcgucuacgccuggaaccgcaagcggaucuccaacugcguggcggacuacagcgugcuguacaacuccgccagcuucuccacguucaagugcuacggcgucagccccaccaagcucaacgaccugugcuucaccaacguguacgccgacuccuucgugauccgcggggacgagguccggcagaucgcccccggccagaccgggaagaucgccgacuacaacuacaagcugccggacgacuucacgggcugcgugaucgcguggaacagcaacaaccucgacuccaaggucgggggcaacuacaacuaccgcuaccgccuguuccgcaagagcaaccucaagcccuucgagcgggacaucuccaccgagaucuaccaggccggcagcacccccugcaacgggguggagggcuucaacugcuacuucccccugcaguccuacggguuccagccgaccaacggcgugggguaccagcccuaccggguggucgugcugagcuucgagcuccugcacgcccccgccacggugugcggccccaagaaguccaccaaccuggucaagaacaagugcgugaacuucaacuucaacggccucaccgggaccggcgugcugaccgagagcaacaagaaguuccugccguuccagcaguucgggcgcgacaucgccgacacgaccgacgcgguccgcgacccccagacccuggagauccucgacaucacccccugcagcuucggcgggguguccgugaucacgccgggcaccaacaccagcaaccaggucgccgugcuguaccagggcgugaacugcaccgagguccccguggccauccacgccgaccagcugacgcccaccuggcggguguacuccaccggcagcaacgucuuccagacccgcgccgggugccucaucggcgcggagcacgugaacaacuccuacgagugcgacauccccaucggggccggcaucugcgccagcuaccagacgcagaccaacuccccgcggcgcgcccggagcguggcgucccagagcaucaucgccuacaccaugucccugggcgccgagaacagcgucgccuacuccaacaacagcaucgccauccccaccaacuucacgaucuccgugaccaccgagauccugcccgugagcaugaccaagacgagcgucgacugcaccauguacaucugcggggacuccaccgagugcagcaaccuccugcugcaguacggcuccuucugcacccagcucaaccgcgcgcugacggggaucgccguggagcaggacaagaacacccaggagguguucgcccaggucaagcagaucuacaagacgcccccgaucaaggacuucggcggguucaacuucagccagauccugcccgaccccuccaagcccagcaagcgguccuucaucgaggaccuccuguucaacaaggugacccuggccgacgccggcuucaucaagcaguacggcgacugccucggggacaucgcggcccgcgaccugaucugcgcccagaaguucaacggccugaccgugcucccgccccugcugaccgacgagaugaucgcccaguacaccagcgcccuccuggcggggaccaucacguccggcuggaccuucggggccggcgccgcccugcagauccccuucgcgaugcagauggccuaccgguucaacggcaucggggucacccagaacgugcucuacgagaaccagaagcugaucgccaaccaguucaacagcgccaucggcaagauccaggacucccugagcuccaccgccagcgcgcucgggaagcugcaggacguggucaaccagaacgcccaggcccugaacacgcucgugaagcagcuguccagcaacuucggcgccaucuccagcgugcugaacgacauccucucccgccuggacaaggucgaggccgaggugcagaucgaccggcugaucaccgggcgccuccagagccugcagaccuacgugacccagcagcugauccgggcggccgagauccgcgccagcgccaaccucgccgcgaccaagauguccgagugcguccugggccagagcaagcggguggacuucugcggcaagggguaccaccugauguccuucccccagagcgccccgcacggcguggucuuccuccacgugacguacguccccgcccaggagaagaacuucaccaccgcccccgcgaucugccacgacgggaaggcccacuucccccgcgagggcguguucguguccaacgggacccacugguucgucacgcagcggaacuucuacgagccgcagaucaucaccaccgacaacaccuucgugagcggcaacugcgacguggucaucggcaucgugaacaacacgguguacgacccccugcagcccgagcuggacuccuucaaggaggagcucgacaaguacuucaagaaccacaccagccccgacgucgaccugggggacaucuccggcaucaacgccagcguggugaacauccagaaggagaucgaccgccugaacgaggucgccaagaaccucaacgagucccugaucgaccugcaggagcucgggaaguacgagcaguacaucaaguggccgugguacaucuggcugggcuucaucgccggccugaucgcgaucgugauggugaccaucaugcucugcugcaugaccagcugcugcuccugccugaaggggugcugcagcugcggcuccugcugcaaguucgacgaggacgacagcgagcccguccugaagggggugaagcuccacuacacgugaggacuagucccuguucccagagcccacuuuuuuuucuuuuuuugaaauaaaauagccugucuuucagaucuaaaaaaaaaaaaaaaaaaaaaaaaaaaaaaaaaaaaaaaaaaaaaaaaaaaaaaaaaaaaaaaaaaaaaaaaaaaaaaaaaaaaaaaaaaaaaaaaaaaa

SEQ ID NO: 24967 - RNA, 4167 nt, Artificial Sequence; identical to SEQ ID NO: 24949
  SARS-CoV-2/Wuhan/WIV05/2019__EPI_ISL_402128 spike protein mRNA gc (1-1273)

SEQ ID NO: 24968 - RNA, 4167 nt, Artificial Sequence
  SARS-CoV-2/Wuhan/WIV05/2019__EPI_ISL_402128 spike protein mRNA gc (1-1273)(D614G)
aggagagggcgcuuggcuugcaaggacccugagcugcggcauugaagcacacccaacccaacucgacugaagucagccucacugaaccggaucugagaaucuucucucucugggcuugccagggcucuccgaaccuagcuagcauccucuucaauuccaacuagaaagcuuaccauguucguguuccugguccuccugccccuggugagcucccagugcgugaaccucaccacccgcacgcagcugccgcccgccuacaccaacagcuucacccggggcgucuacuaccccgacaagguguuccgcuccagcgugcugcacuccacccaggaccucuuccugcccuucuucagcaacgucacgugguuccacgccauccacguguccgggaccaacggcaccaagcgguucgacaacccggugcugcccuucaacgacggggucuacuucgcgagcaccgagaaguccaacaucauccgcggcuggaucuucgggacgacccucgacagcaagacccagucccugcugaucgugaacaacgccaccaacguggucaucaaggugugcgaguuccaguucugcaacgaccccuuccucggcguguacuaccacaagaacaacaagagcuggauggaguccgaguuccgggucuacagcuccgccaacaacugcacguucgaguacgugagccagcccuuccugauggaccuggagggcaagcaggggaacuucaagaaccuccgcgaguucguguucaagaacaucgacggcuacuucaagaucuacuccaagcacaccccgaucaaccugguccgggaccugccccagggguucagcgcccucgagccccugguggaccugcccaucggcaucaacaucacccgcuuccagacccuccuggcccugcaccgguccuaccucacgccgggggacagcagcuccggcuggaccgcgggcgccgccgccuacuacgugggguaccugcagccccgcaccuuccugcucaaguacaacgagaacggcaccaucacggacgcggucgacugcgcccuggacccccugagcgagaccaagugcacccucaaguccuucaccguggagaaggggaucuaccagacgagcaacuuccgggugcagcccaccgaguccaucguccgcuucccgaacaucaccaaccugugccccuucggcgagguguucaacgccacccgguucgccagcgucuacgccuggaaccgcaagcggaucuccaacugcguggcggacuacagcgugcuguacaacuccgccagcuucuccacguucaagugcuacggcgucagccccaccaagcucaacgaccugugcuucaccaacguguacgccgacuccuucgugauccgcggggacgagguccggcagaucgcccccggccagaccgggaagaucgccgacuacaacuacaagcugccggacgacuucacgggcugcgugaucgcguggaacagcaacaaccucgacuccaaggucgggggcaacuacaacuaccuguaccgccuguuccgcaagagcaaccucaagcccuucgagcgggacaucuccaccgagaucuaccaggccggcagcacccccugcaacgggguggagggcuucaacugcuacuucccccugcaguccuacggguuccagccgaccaacggcgugggguaccagcccuaccggguggucgugcugagcuucgagcuccugcacgcccccgccacggugugcggccccaagaaguccaccaaccuggucaagaacaagugcgugaacuucaacuucaacggccucaccgggaccggcgugcugaccgagagcaacaagaaguuccugccguuccagcaguucgggcgcgacaucgccgacacgaccgacgcgguccgcgacccccagacccuggagauccucgacaucacccccugcagcuucggcgggguguccgugaucacgccgggcaccaacaccagcaaccaggucgccgugcuguaccagggcgugaacugcaccgagguccccguggccauccacgccgaccagcugacgcccaccuggcggguguacuccaccgggagcaacgucuuccagacccgcgccggcugccucaucggggcggagcacgugaacaacuccuacgagugcgacauccccaucggcgccggcaucugcgccagcuaccagacgcagaccaacuccccgcggcgcgcccggagcguggcgucccagagcaucaucgccuacaccaugucccugggggccgagaacagcgucgccuacuccaacaacagcaucgccauccccaccaacuucacgaucuccgugaccaccgagauccugcccgugagcaugaccaagacgagcgucgacugcaccauguacaucugcggcgacuccaccgagugcagcaaccuccugcugcaguacggguccuucugcacccagcucaaccgcgcgcugacgggcaucgccguggagcaggacaagaacacccaggagguguucgcccaggucaagcagaucuacaagacgcccccgaucaaggacuucgggggcuucaacuucagccagauccugcccgaccccuccaagcccagcaagcgguccuucaucgaggaccuccuguucaacaaggugacccuggccgacgccggcuucaucaagcaguacggggacugccucggcgacaucgcggcccgcgaccugaucugcgcccagaaguucaacgggcugaccgugcucccgccccugcugaccgacgagaugaucgcccaguacaccagcgcccuccuggcgggcaccaucacguccggguggaccuucggcgccggcgccgcccugcagauccccuucgcgaugcagauggccuaccgguucaacgggaucggcgucacccagaacgugcucuacgagaaccagaagcugaucgccaaccaguucaacagcgccaucgggaagauccaggacucccugagcuccaccgccagcgcgcucggcaagcugcaggacguggucaaccagaacgcccaggcccugaacacgcucgugaagcagcuguccagcaacuucggggccaucuccagcgugcugaacgacauccucucccgccuggacaaggucgaggccgaggugcagaucgaccggcugaucaccggccgccuccagagccugcagaccuacgugacccagcagcugauccgggcggccgagauccgcgccagcgccaaccucgccgcgaccaagauguccgagugcguccugggccagagcaagcggguggacuucugcgggaagggcuaccaccugauguccuucccccagagcgccccgcacgggguggucuuccuccacgugacguacguccccgcccaggagaagaacuucaccaccgcccccgcgaucugccacgacggcaaggcccacuucccccgcgaggggguguucguguccaacggcacccacugguucgucacgcagcggaacuucuacgagccgcagaucaucaccaccgacaacaccuucgugagcggcaacugcgacguggucaucgggaucgugaacaacacgguguacgacccccugcagcccgagcuggacuccuucaaggaggagcucgacaaguacuucaagaaccacaccagccccgacgucgaccugggcgacaucuccgggaucaacgccagcguggugaacauccagaaggagaucgaccgccugaacgaggucgccaagaaccucaacgagucccugaucgaccugcaggagcucggcaaguacgagcaguacaucaaguggccgugguacaucuggcugggcuucaucgccgggcugaucgcgaucgugauggugaccaucaugcucugcugcaugaccagcugcugcuccugccugaagggcugcugcagcugcggguccugcugcaaguucgacgaggacgacagcgagcccguccugaagggcgugaagcuccacuacacgugaggacuagucccuguucccagagcccacuuuuuuuucuuuuuuugaaauaaaauagccugucuuucagaucuaaaaaaaaaaaaaaaaaaaaaaaaaaaaaaaaaaaaaaaaaaaaaaaaaaaaaaaaaaaaaaaaaaaaaaaaaaaaaaaaaaaaaaaaaaaaaaaaaaaa

SEQ ID NO: 24969 - RNA, 4167 nt, Artificial Sequence
  SARS-CoV-2/Wuhan/WIV05/2019__EPI_ISL_402128 spike protein mRNA gc (1-1273)(A222V_D614G)
aggagagggcgcuuggcuugcaaggacccugagcugcggcauugaagcacacccaacccaacucgacugaagucagccucacugaaccggaucugagaaucuucucucucugggcuugccagggcucuccgaaccuagcuagcauccucuucaauuccaacuagaaagcuuaccauguucguguuccugguccuccugccccuggugagcucccagugcgugaaccucaccacccgcacgcagcugccgcccgccuacaccaacagcuucacccggggcgucuacuaccccgacaagguguuccgcuccagcgugcugcacuccacccaggaccucuuccugcccuucuucagcaacgucacgugguuccacgccauccacguguccgggaccaacggcaccaagcgguucgacaacccggugcugcccuucaacgacggggucuacuucgcgagcaccgagaaguccaacaucauccgcggcuggaucuucgggacgacccucgacagcaagacccagucccugcugaucgugaacaacgccaccaacguggucaucaaggugugcgaguuccaguucugcaacgaccccuuccucggcguguacuaccacaagaacaacaagagcuggauggaguccgaguuccgggucuacagcuccgccaacaacugcacguucgaguacgugagccagcccuuccugauggaccuggagggcaagcaggggaacuucaagaaccuccgcgaguucguguucaagaacaucgacggcuacuucaagaucuacuccaagcacaccccgaucaaccugguccgggaccugccccagggguucagcgugcucgagccccugguggaccugcccaucggcaucaacaucacccgcuuccagacccuccuggcccugcaccgguccuaccucacgccgggggacagcagcuccggcuggaccgccggcgcggccgccuacuacgucggguaccugcagccccgcaccuuccugcucaaguacaacgagaacggcaccaucacggacgccguggacugcgcgcuggacccccugagcgagaccaagugcacccucaaguccuucaccguggagaaggggaucuaccagacgagcaacuuccggguccagcccaccgaguccaucgugcgcuucccgaacaucaccaaccugugccccuucggcgaggucuucaacgccacccgguucgccagcguguacgccuggaaccgcaagcggaucuccaacugcguggccgacuacagcguccuguacaacuccgcgagcuucuccacguucaagugcuacggcgugagccccaccaagcucaacgaccugugcuucaccaacguguacgccgacuccuucgucauccgcggggacgaggugcggcagaucgcccccggccagaccgggaagaucgccgacuacaacuacaagcugccggacgacuucacgggcugcgugaucgccuggaacagcaacaaccucgacuccaaggucgggggcaacuacaacuaccuguaccgccuguuccgcaagagcaaccucaagcccuucgagcgggacaucuccaccgagaucuaccaggcgggcagcacccccugcaacgggguggagggcuucaacugcuacuucccccugcaguccuacggguuccagccgaccaacggcgugggguaccagcccuaccgggucguggugcugagcuucgagcuccugcacgcccccgccacggucugcggccccaagaaguccaccaaccuggugaagaacaagugcgugaacuucaacuucaacggccucaccgggaccggcguccugaccgagagcaacaagaaguuccugccguuccagcaguucgggcgcgacaucgccgacacgaccgacgccgugcgcgacccccagacccuggagauccucgacaucacccccugcagcuucggcgggguguccgucaucacgccgggcaccaacaccagcaaccagguggcggugcuguaccagggcgucaacugcaccgaggugcccguggccauccacgccgaccagcugacgcccaccuggcgggucuacuccaccgggagcaacguguuccagacccgcgccggcugccucaucggggccgagcacgugaacaacuccuacgagugcgacauccccaucggcgcgggcaucugcgccagcuaccagacgcagaccaacuccccgcggcgcgcccggagcgucgccucccagagcaucaucgcguacaccaugucccugggggccgagaacagcguggccuacuccaacaacagcaucgccauccccaccaacuucacgaucuccgugaccaccgagauccugcccgucagcaugaccaagacgagcguggacugcaccauguacaucugcggcgacuccaccgagugcagcaaccuccugcugcaguacggguccuucugcacccagcucaaccgcgcccugacgggcaucgcgguggagcaggacaagaacacccaggaggucuucgcccaggugaagcagaucuacaagacgcccccgaucaaggacuucgggggcuucaacuucagccagauccugcccgaccccuccaagcccagcaagcgguccuucaucgaggaccuccuguucaacaaggugacccuggccgacgccggcuucaucaagcaguacggggacugccucggcgacaucgccgcgcgcgaccugaucugcgcccagaaguucaacgggcugaccguccucccgccccugcugaccgacgagaugaucgcccaguacaccagcgcccuccuggccggcaccaucacguccggguggaccuucggcgcgggcgccgcccugcagauccccuucgccaugcagauggcguaccgguucaacgggaucggcgugacccagaacgugcucuacgagaaccagaagcugaucgccaaccaguucaacagcgccaucgggaagauccaggacucccugagcuccaccgccagcgcccucggcaagcugcaggacgucgugaaccagaacgcgcaggcccugaacacgcucgugaagcagcuguccagcaacuucggggccaucuccagcguccugaacgacauccucucccgccuggacaagguggaggccgaggugcagaucgaccggcugaucaccggccgccuccagagccugcagaccuacgucacccagcagcugauccgggccgcggagauccgcgccagcgccaaccucgccgccaccaagauguccgagugcgugcugggccagagcaagcggguggacuucugcgggaagggcuaccaccugauguccuucccccagagcgcgccgcacggggucguguuccuccacgucacguacgugcccgcccaggagaagaacuucaccaccgcccccgccaucugccacgacggcaaggcgcacuucccccgcgaggggguguucgucuccaacggcacccacugguucgugacgcagcggaacuucuacgagccgcagaucaucaccaccgacaacaccuucgugagcggcaacugcgacgucgugaucgggaucgugaacaacacggucuacgacccccugcagcccgagcuggacuccuucaaggaggagcucgacaaguacuucaagaaccacaccagccccgacguggaccugggcgacaucuccgggaucaacgccagcguggucaacauccagaaggagaucgaccgccugaacgagguggccaagaaccucaacgagucccugaucgaccugcaggagcucggcaaguacgagcaguacaucaaguggccgugguacaucuggcugggcuucaucgccgggcugaucgccaucgugauggucaccaucaugcucugcugcaugaccagcugcugcuccugccugaagggcugcugcagcugcggguccugcugcaaguucgacgaggacgacagcgagcccgugcugaagggcgugaagcuccacuacacgugaggacuagucccuguucccagagcccacuuuuuuuucuuuuuuugaaauaaaauagccugucuuucagaucuaaaaaaaaaaaaaaaaaaaaaaaaaaaaaaaaaaaaaaaaaaaaaaaaaaaaaaaaaaaaaaaaaaaaaaaaaaaaaaaaaaaaaaaaaaaaaaaaaaaa

SEQ ID NO: 24970 - RNA, 4167 nt, Artificial Sequence
  SARS-CoV-2/Wuhan/WIV05/2019__EPI_ISL_402128 spike protein mRNA gc (1-1273)(N439K_D614G)
aggagagggcgcuuggcuugcaaggacccugagcugcggcauugaagcacacccaacccaacucgacugaagucagccucacugaaccggaucugagaaucuucucucucugggcuugccagggcucuccgaaccuagcuagcauccucuucaauuccaacuagaaagcuuaccauguucguguuccugguccuccugccccuggugagcucccagugcgugaaccucaccacccgcacgcagcugccgcccgccuacaccaacagcuucacccggggcgucuacuaccccgacaagguguuccgcuccagcgugcugcacuccacccaggaccucuuccugcccuucuucagcaacgucacgugguuccacgccauccacguguccgggaccaacggcaccaagcgguucgacaacccggugcugcccuucaacgacggggucuacuucgcgagcaccgagaaguccaacaucauccgcggcuggaucuucgggacgacccucgacagcaagacccagucccugcugaucgugaacaacgccaccaacguggucaucaaggugugcgaguuccaguucugcaacgaccccuuccucggcguguacuaccacaagaacaacaagagcuggauggaguccgaguuccgggucuacagcuccgccaacaacugcacguucgaguacgugagccagcccuuccugauggaccuggagggcaagcaggggaacuucaagaaccuccgcgaguucguguucaagaacaucgacggcuacuucaagaucuacuccaagcacaccccgaucaaccugguccgggaccugccccagggguucagcgcccucgagccccugguggaccugcccaucggcaucaacaucacccgcuuccagacccuccuggcccugcaccgguccuaccucacgccgggggacagcagcuccggcuggaccgcgggcgccgccgccuacuacgugggguaccugcagccccgcaccuuccugcucaaguacaacgagaacggcaccaucacggacgcggucgacugcgcccuggacccccugagcgagaccaagugcacccucaaguccuucaccguggagaaggggaucuaccagacgagcaacuuccgggugcagcccaccgaguccaucguccgcuucccgaacaucaccaaccugugccccuucggcgagguguucaacgccacccgguucgccagcgucuacgccuggaaccgcaagcggaucuccaacugcguggcggacuacagcgugcuguacaacuccgccagcuucuccacguucaagugcuacggcgucagccccaccaagcucaacgaccugugcuucaccaacguguacgccgacuccuucgugauccgcggggacgagguccggcagaucgcccccggccagaccgggaagaucgccgacuacaacuacaagcugccggacgacuucacgggcugcgugaucgcguggaacagcaagaaccucgacuccaaggucgggggcaacuacaacuaccuguaccgccuguuccgcaagagcaaccucaagcccuucgagcgggacaucuccaccgagaucuaccaggccggcagcacccccugcaacgggguggagggcuucaacugcuacuucccccugcaguccuacggguuccagccgaccaacggcgugggguaccagcccuaccggguggucgugcugagcuucgagcuccugcacgcccccgccacggugugcggccccaagaaguccaccaaccuggucaagaacaagugcgugaacuucaacuucaacggccucaccgggaccggcgugcugaccgagagcaacaagaaguuccugccguuccagcaguucgggcgcgacaucgccgacacgaccgacgcgguccgcgacccccagacccuggagauccucgacaucacccccugcagcuucggcgggguguccgugaucacgccgggcaccaacaccagcaaccaggucgccgugcuguaccagggcgugaacugcaccgagguccccguggccauccacgccgaccagcugacgcccaccuggcggguguacuccaccgggagcaacgucuuccagacccgcgccggcugccucaucggggcggagcacgugaacaacuccuacgagugcgacauccccaucggcgccggcaucugcgccagcuaccagacgcagaccaacuccccgcggcgcgcccggagcguggcgucccagagcaucaucgccuacaccaugucccugggggccgagaacagcgucgccuacuccaacaacagcaucgccauccccaccaacuucacgaucuccgugaccaccgagauccugcccgugagcaugaccaagacgagcgucgacugcaccauguacaucugcggcgacuccaccgagugcagcaaccuccugcugcaguacggguccuucugcacccagcucaaccgcgcgcugacgggcaucgccguggagcaggacaagaacacccaggagguguucgcccaggucaagcagaucuacaagacgcccccgaucaaggacuucgggggcuucaacuucagccagauccugcccgaccccuccaagcccagcaagcgguccuucaucgaggaccuccuguucaacaaggugacccuggccgacgccggcuucaucaagcaguacggggacugccucggcgacaucgcggcccgcgaccugaucugcgcccagaaguucaacgggcugaccgugcucccgccccugcugaccgacgagaugaucgcccaguacaccagcgcccuccuggcgggcaccaucacguccggguggaccuucggcgccggcgccgcccugcagauccccuucgcgaugcagauggccuaccgguucaacgggaucggcgucacccagaacgugcucuacgagaaccagaagcugaucgccaaccaguucaacagcgccaucgggaagauccaggacucccugagcuccaccgccagcgcgcucggcaagcugcaggacguggucaaccagaacgcccaggcccugaacacgcucgugaagcagcuguccagcaacuucggggccaucuccagcgugcugaacgacauccucucccgccuggacaaggucgaggccgaggugcagaucgaccggcugaucaccggccgccuccagagccugcagaccuacgugacccagcagcugauccgggcggccgagauccgcgccagcgccaaccucgccgcgaccaagauguccgagugcguccugggccagagcaagcggguggacuucugcgggaagggcuaccaccugauguccuucccccagagcgccccgcacgggguggucuuccuccacgugacguacguccccgcccaggagaagaacuucaccaccgcccccgcgaucugccacgacggcaaggcccacuucccccgcgaggggguguucguguccaacggcacccacugguucgucacgcagcggaacuucuacgagccgcagaucaucaccaccgacaacaccuucgugagcggcaacugcgacguggucaucgggaucgugaacaacacgguguacgacccccugcagcccgagcuggacuccuucaaggaggagcucgacaaguacuucaagaaccacaccagccccgacgucgaccugggcgacaucuccgggaucaacgccagcguggugaacauccagaaggagaucgaccgccugaacgaggucgccaagaaccucaacgagucccugaucgaccugcaggagcucggcaaguacgagcaguacaucaaguggccgugguacaucuggcugggcuucaucgccgggcugaucgcgaucgugauggugaccaucaugcucugcugcaugaccagcugcugcuccugccugaagggcugcugcagcugcggguccugcugcaaguucgacgaggacgacagcgagcccguccugaagggcgugaagcuccacuacacgugaggacuagucccuguucccagagcccacuuuuuuuucuuuuuuugaaauaaaauagccugucuuucagaucuaaaaaaaaaaaaaaaaaaaaaaaaaaaaaaaaaaaaaaaaaaaaaaaaaaaaaaaaaaaaaaaaaaaaaaaaaaaaaaaaaaaaaaaaaaaaaaaaaaaa

SEQ ID NO: 24971 - RNA, 4167 nt, Artificial Sequence
  SARS-CoV-2/Wuhan/WIV05/2019__EPI_ISL_402128 spike protein mRNA gc (1-1273)(S477N_D614G)
aggagagggcgcuuggcuugcaaggacccugagcugcggcauugaagcacacccaacccaacucgacugaagucagccucacugaaccggaucugagaaucuucucucucugggcuugccagggcucuccgaaccuagcuagcauccucuucaauuccaacuagaaagcuuaccauguucguguuccugguccuccugccccuggugagcucccagugcgugaaccucaccacccgcacgcagcugccgcccgccuacaccaacagcuucacccggggcgucuacuaccccgacaagguguuccgcuccagcgugcugcacuccacccaggaccucuuccugcccuucuucagcaacgucacgugguuccacgccauccacguguccgggaccaacggcaccaagcgguucgacaacccggugcugcccuucaacgacggggucuacuucgcgagcaccgagaaguccaacaucauccgcggcuggaucuucgggacgacccucgacagcaagacccagucccugcugaucgugaacaacgccaccaacguggucaucaaggugugcgaguuccaguucugcaacgaccccuuccucggcguguacuaccacaagaacaacaagagcuggauggaguccgaguuccgggucuacagcuccgccaacaacugcacguucgaguacgugagccagcccuuccugauggaccuggagggcaagcaggggaacuucaagaaccuccgcgaguucguguucaagaacaucgacggcuacuucaagaucuacuccaagcacaccccgaucaaccugguccgggaccugccccagggguucagcgcccucgagccccugguggaccugcccaucggcaucaacaucacccgcuuccagacccuccuggcccugcaccgguccuaccucacgccgggggacagcagcuccggcuggaccgcgggcgccgccgccuacuacgugggguaccugcagccccgcaccuuccugcucaaguacaacgagaacggcaccaucacggacgcggucgacugcgcccuggacccccugagcgagaccaagugcacccucaaguccuucaccguggagaaggggaucuaccagacgagcaacuuccgggugcagcccaccgaguccaucguccgcuucccgaacaucaccaaccugugccccuucggcgagguguucaacgccacccgguucgccagcgucuacgccuggaaccgcaagcggaucuccaacugcguggcggacuacagcgugcuguacaacuccgccagcuucuccacguucaagugcuacggcgucagccccaccaagcucaacgaccugugcuucaccaacguguacgccgacuccuucgugauccgcggggacgagguccggcagaucgcccccggccagaccgggaagaucgccgacuacaacuacaagcugccggacgacuucacgggcugcgugaucgcguggaacagcaacaaccucgacuccaaggucgggggcaacuacaacuaccuguaccgccuguuccgcaagagcaaccucaagcccuucgagcgggacaucuccaccgagaucuaccaggccggcaacacccccugcaacgggguggagggcuucaacugcuacuucccccugcagagcuacggguuccagccgaccaacggcgugggguaccagcccuaccggguggucgugcuguccuucgagcuccugcacgcccccgccacggugugcggccccaagaaguccaccaaccuggucaagaacaagugcgugaacuucaacuucaacggccucaccgggaccggcgugcugaccgagagcaacaagaaguuccugccguuccagcaguucgggcgcgacaucgccgacacgaccgacgcgguccgcgacccccagacccuggagauccucgacaucacccccugcagcuucggcggggugagcgugaucacgccgggcaccaacaccuccaaccaggucgccgugcuguaccagggcgugaacugcaccgagguccccguggccauccacgccgaccagcugacgcccaccuggcggguguacagcaccggguccaacgucuuccagacccgcgccggcugccucaucggggcggagcacgugaacaacagcuacgagugcgacauccccaucggcgccggcaucugcgccuccuaccagacgcagaccaacagcccgcggcgcgcccgguccguggcgagccaguccaucaucgccuacaccaugagccugggggccgagaacuccgucgccuacagcaacaacuccaucgccauccccaccaacuucacgaucagcgugaccaccgagauccugcccguguccaugaccaagacgagcgucgacugcaccauguacaucugcggcgacagcaccgagugcuccaaccuccugcugcaguacgggagcuucugcacccagcucaaccgcgcgcugacgggcaucgccguggagcaggacaagaacacccaggagguguucgcccaggucaagcagaucuacaagacgcccccgaucaaggacuucgggggcuucaacuucucccagauccugcccgaccccagcaagcccuccaagcggagcuucaucgaggaccuccuguucaacaaggugacccuggccgacgccggcuucaucaagcaguacggggacugccucggcgacaucgcggcccgcgaccugaucugcgcccagaaguucaacgggcugaccgugcucccgccccugcugaccgacgagaugaucgcccaguacaccuccgcccuccuggcgggcaccaucacgagcggguggaccuucggcgccggcgccgcccugcagauccccuucgcgaugcagauggccuaccgguucaacgggaucggcgucacccagaacgugcucuacgagaaccagaagcugaucgccaaccaguucaacuccgccaucgggaagauccaggacagccuguccagcaccgccuccgcgcucggcaagcugcaggacguggucaaccagaacgcccaggcccugaacacgcucgugaagcagcugagcuccaacuucggggccaucagcuccgugcugaacgacauccucagccgccuggacaaggucgaggccgaggugcagaucgaccggcugaucaccggccgccuccagucccugcagaccuacgugacccagcagcugauccgggcggccgagauccgcgccagcgccaaccucgccgcgaccaagaugagcgagugcguccugggccaguccaagcggguggacuucugcgggaagggcuaccaccugaugagcuucccccaguccgccccgcacgggguggucuuccuccacgugacguacguccccgcccaggagaagaacuucaccaccgcccccgcgaucugccacgacggcaaggcccacuucccccgcgaggggguguucgugagcaacggcacccacugguucgucacgcagcggaacuucuacgagccgcagaucaucaccaccgacaacaccuucguguccggcaacugcgacguggucaucgggaucgugaacaacacgguguacgacccccugcagcccgagcuggacagcuucaaggaggagcucgacaaguacuucaagaaccacaccucccccgacgucgaccugggcgacaucagcgggaucaacgccuccguggugaacauccagaaggagaucgaccgccugaacgaggucgccaagaaccucaacgagagccugaucgaccugcaggagcucggcaaguacgagcaguacaucaaguggccgugguacaucuggcugggcuucaucgccgggcugaucgcgaucgugauggugaccaucaugcucugcugcaugaccuccugcugcagcugccugaagggcugcugcuccugcgggagcugcugcaaguucgacgaggacgacuccgagcccguccugaagggcgugaagcuccacuacacgugaggacuagucccuguucccagagcccacuuuuuuuucuuuuuuugaaauaaaauagccugucuuucagaucuaaaaaaaaaaaaaaaaaaaaaaaaaaaaaaaaaaaaaaaaaaaaaaaaaaaaaaaaaaaaaaaaaaaaaaaaaaaaaaaaaaaaaaaaaaaaaaaaaaaa

SEQ ID NO: 24972 - RNA, 4167 nt, Artificial Sequence
  SARS-CoV-2/Wuhan/WIV05/2019__EPI_ISL_402128 spike protein mRNA gc (1-1273)(N501Y_D614G)
aggagagggcgcuuggcuugcaaggacccugagcugcggcauugaagcacacccaacccaacucgacugaagucagccucacugaaccggaucugagaaucuucucucucugggcuugccagggcucuccgaaccuagcuagcauccucuucaauuccaacuagaaagcuuaccauguucguguuccugguccuccugccccuggugagcucccagugcgugaaccucaccacccgcacgcagcugccgcccgccuacaccaacagcuucacccggggcgucuacuaccccgacaagguguuccgcuccagcgugcugcacuccacccaggaccucuuccugcccuucuucagcaacgucacgugguuccacgccauccacguguccgggaccaacggcaccaagcgguucgacaacccggugcugcccuucaacgacggggucuacuucgcgagcaccgagaaguccaacaucauccgcggcuggaucuucgggacgacccucgacagcaagacccagucccugcugaucgugaacaacgccaccaacguggucaucaaggugugcgaguuccaguucugcaacgaccccuuccucggcguguacuaccacaagaacaacaagagcuggauggaguccgaguuccgggucuacagcuccgccaacaacugcacguucgaguacgugagccagcccuuccugauggaccuggagggcaagcaggggaacuucaagaaccuccgcgaguucguguucaagaacaucgacggcuacuucaagaucuacuccaagcacaccccgaucaaccugguccgggaccugccccagggguucagcgcccucgagccccugguggaccugcccaucggcaucaacaucacccgcuuccagacccuccuggcccugcaccgguccuaccucacgccgggggacagcagcuccggcuggaccgcgggcgccgccgccuacuacgugggguaccugcagccccgcaccuuccugcucaaguacaacgagaacggcaccaucacggacgcggucgacugcgcccuggacccccugagcgagaccaagugcacccucaaguccuucaccguggagaaggggaucuaccagacgagcaacuuccgggugcagcccaccgaguccaucguccgcuucccgaacaucaccaaccugugccccuucggcgagguguucaacgccacccgguucgccagcgucuacgccuggaaccgcaagcggaucuccaacugcguggcggacuacagcgugcuguacaacuccgccagcuucuccacguucaagugcuacggcgucagccccaccaagcucaacgaccugugcuucaccaacguguacgccgacuccuucgugauccgcggggacgagguccggcagaucgcccccggccagaccgggaagaucgccgacuacaacuacaagcugccggacgacuucacgggcugcgugaucgcguggaacagcaacaaccucgacuccaaggucgggggcaacuacaacuaccuguaccgccuguuccgcaagagcaaccucaagcccuucgagcgggacaucuccaccgagaucuaccaggccggcagcacccccugcaacgggguggagggcuucaacugcuacuucccccugcaguccuacggguuccagccgaccuacggcgugggguaccagcccuaccggguggucgugcugagcuucgagcuccugcacgcccccgccacggugugcggccccaagaaguccaccaaccuggucaagaacaagugcgugaacuucaacuucaacggccucaccgggaccggcgugcugaccgagagcaacaagaaguuccugccguuccagcaguucgggcgcgacaucgccgacacgaccgacgcgguccgcgacccccagacccuggagauccucgacaucacccccugcagcuucggcgggguguccgugaucacgccgggcaccaacaccagcaaccaggucgccgugcuguaccagggcgugaacugcaccgagguccccguggccauccacgccgaccagcugacgcccaccuggcggguguacuccaccgggagcaacgucuuccagacccgcgccggcugccucaucggggcggagcacgugaacaacuccuacgagugcgacauccccaucggcgccggcaucugcgccagcuaccagacgcagaccaacuccccgcggcgcgcccggagcguggcgucccagagcaucaucgccuacaccaugucccugggggccgagaacagcgucgccuacuccaacaacagcaucgccauccccaccaacuucacgaucuccgugaccaccgagauccugcccgugagcaugaccaagacgagcgucgacugcaccauguacaucugcggcgacuccaccgagugcagcaaccuccugcugcaguacggguccuucugcacccagcucaaccgcgcgcugacgggcaucgccguggagcaggacaagaacacccaggagguguucgcccaggucaagcagaucuacaagacgcccccgaucaaggacuucgggggcuucaacuucagccagauccugcccgaccccuccaagcccagcaagcgguccuucaucgaggaccuccuguucaacaaggugacccuggccgacgccggcuucaucaagcaguacggggacugccucggcgacaucgcggcccgcgaccugaucugcgcccagaaguucaacgggcugaccgugcucccgccccugcugaccgacgagaugaucgcccaguacaccagcgcccuccuggcgggcaccaucacguccggguggaccuucggcgccggcgccgcccugcagauccccuucgcgaugcagauggccuaccgguucaacgggaucggcgucacccagaacgugcucuacgagaaccagaagcugaucgccaaccaguucaacagcgccaucgggaagauccaggacucccugagcuccaccgccagcgcgcucggcaagcugcaggacguggucaaccagaacgcccaggcccugaacacgcucgugaagcagcuguccagcaacuucggggccaucuccagcgugcugaacgacauccucucccgccuggacaaggucgaggccgaggugcagaucgaccggcugaucaccggccgccuccagagccugcagaccuacgugacccagcagcugauccgggcggccgagauccgcgccagcgccaaccucgccgcgaccaagauguccgagugcguccugggccagagcaagcggguggacuucugcgggaagggcuaccaccugauguccuucccccagagcgccccgcacgggguggucuuccuccacgugacguacguccccgcccaggagaagaacuucaccaccgcccccgcgaucugccacgacggcaaggcccacuucccccgcgaggggguguucguguccaacggcacccacugguucgucacgcagcggaacuucuacgagccgcagaucaucaccaccgacaacaccuucgugagcggcaacugcgacguggucaucgggaucgugaacaacacgguguacgacccccugcagcccgagcuggacuccuucaaggaggagcucgacaaguacuucaagaaccacaccagccccgacgucgaccugggcgacaucuccgggaucaacgccagcguggugaacauccagaaggagaucgaccgccugaacgaggucgccaagaaccucaacgagucccugaucgaccugcaggagcucggcaaguacgagcaguacaucaaguggccgugguacaucuggcugggcuucaucgccgggcugaucgcgaucgugauggugaccaucaugcucugcugcaugaccagcugcugcuccugccugaagggcugcugcagcugcggguccugcugcaaguucgacgaggacgacagcgagcccguccugaagggcgugaagcuccacuacacgugaggacuagucccuguucccagagcccacuuuuuuuucuuuuuuugaaauaaaauagccugucuuucagaucuaaaaaaaaaaaaaaaaaaaaaaaaaaaaaaaaaaaaaaaaaaaaaaaaaaaaaaaaaaaaaaaaaaaaaaaaaaaaaaaaaaaaaaaaaaaaaaaaaaaa

SEQ ID NO: 24973 - RNA, 4161 nt, Artificial Sequence
  SARS-CoV-2/Wuhan/WIV05/2019__EPI_ISL_402128 spike protein mRNA gc (1-1273)(H69del_V70del_D614G)
aggagagggcgcuuggcuugcaaggacccugagcugcggcauugaagcacacccaacccaacucgacugaagucagccucacugaaccggaucugagaaucuucucucucugggcuugccagggcucuccgaaccuagcuagcauccucuucaauuccaacuagaaagcuuaccauguucguguuccugguccuccugccccuggugagcucccagugcgugaaccucaccacccgcacgcagcugccgcccgccuacaccaacagcuucacccggggcgucuacuaccccgacaagguguuccgcuccagcgugcugcacuccacccaggaccucuuccugcccuucuucagcaacgucacgugguuccacgccaucuccgggaccaacggcaccaagcgguucgacaacccggugcugcccuucaacgacgggguguacuucgcgagcaccgagaaguccaacaucauccgcggcuggaucuucgggacgacccucgacagcaagacccagucccugcugaucgucaacaacgccaccaacguggugaucaaggucugcgaguuccaguucugcaacgaccccuuccucggcguguacuaccacaagaacaacaagagcuggauggaguccgaguuccggguguacagcuccgccaacaacugcacguucgaguacgucagccagcccuuccugauggaccuggagggcaagcaggggaacuucaagaaccuccgcgaguucguguucaagaacaucgacggcuacuucaagaucuacuccaagcacaccccgaucaaccuggugcgggaccugccccagggguucagcgcccucgagccccuggucgaccugcccaucggcaucaacaucacccgcuuccagacccuccuggcccugcaccgguccuaccucacgccgggggacagcagcuccggcuggaccgcgggcgccgccgccuacuacgugggguaccugcagccccgcaccuuccugcucaaguacaacgagaacggcaccaucacggacgcgguggacugcgcccuggacccccugagcgagaccaagugcacccucaaguccuucaccgucgagaaggggaucuaccagacgagcaacuuccgggugcagcccaccgaguccaucgugcgcuucccgaacaucaccaaccugugccccuucggcgaggucuucaacgccacccgguucgccagcguguacgccuggaaccgcaagcggaucuccaacugcgucgcggacuacagcgugcuguacaacuccgccagcuucuccacguucaagugcuacggcgugagccccaccaagcucaacgaccugugcuucaccaacgucuacgccgacuccuucgugauccgcggggacgaggugcggcagaucgcccccggccagaccgggaagaucgccgacuacaacuacaagcugccggacgacuucacgggcugcgucaucgcguggaacagcaacaaccucgacuccaaggucgggggcaacuacaacuaccuguaccgccuguuccgcaagagcaaccucaagcccuucgagcgggacaucuccaccgagaucuaccaggccggcagcacccccugcaacgggguggagggcuucaacugcuacuucccccugcaguccuacggguuccagccgaccaacggcgugggguaccagcccuaccggguggugguccugagcuucgagcuccugcacgcccccgccacggugugcggccccaagaaguccaccaaccuggugaagaacaagugcgucaacuucaacuucaacggccucaccgggaccggcgugcugaccgagagcaacaagaaguuccugccguuccagcaguucgggcgcgacaucgccgacacgaccgacgcggugcgcgacccccagacccuggagauccucgacaucacccccugcagcuucggcggggucuccgugaucacgccgggcaccaacaccagcaaccagguggccguccuguaccagggcgugaacugcaccgaggugcccgucgccauccacgccgaccagcugacgcccaccuggcggguguacuccaccgggagcaacguguuccagacccgcgccggcugccucaucggggcggagcacgucaacaacuccuacgagugcgacauccccaucggcgccggcaucugcgccagcuaccagacgcagaccaacuccccgcggcgcgcccggagcguggcgucccagagcaucaucgccuacaccaugucccugggggccgagaacagcguggccuacuccaacaacagcaucgccauccccaccaacuucacgaucuccgucaccaccgagauccugcccgugagcaugaccaagacgagcguggacugcaccauguacaucugcggcgacuccaccgagugcagcaaccuccugcugcaguacggguccuucugcacccagcucaaccgcgcgcugacgggcaucgccgucgagcaggacaagaacacccaggagguguucgcccaggugaagcagaucuacaagacgcccccgaucaaggacuucgggggcuucaacuucagccagauccugcccgaccccuccaagcccagcaagcgguccuucaucgaggaccuccuguucaacaaggucacccuggccgacgccggcuucaucaagcaguacggggacugccucggcgacaucgcggcccgcgaccugaucugcgcccagaaguucaacgggcugaccgugcucccgccccugcugaccgacgagaugaucgcccaguacaccagcgcccuccuggcgggcaccaucacguccggguggaccuucggcgccggcgccgcccugcagauccccuucgcgaugcagauggccuaccgguucaacgggaucggcgugacccagaacguccucuacgagaaccagaagcugaucgccaaccaguucaacagcgccaucgggaagauccaggacucccugagcuccaccgccagcgcgcucggcaagcugcaggacguggugaaccagaacgcccaggcccugaacacgcucgucaagcagcuguccagcaacuucggggccaucuccagcgugcugaacgacauccucucccgccuggacaagguggaggccgagguccagaucgaccggcugaucaccggccgccuccagagccugcagaccuacgugacccagcagcugauccgggcggccgagauccgcgccagcgccaaccucgccgcgaccaagauguccgagugcgugcugggccagagcaagcgggucgacuucugcgggaagggcuaccaccugauguccuucccccagagcgccccgcacggggugguguuccuccacgucacguacgugcccgcccaggagaagaacuucaccaccgcccccgcgaucugccacgacggcaaggcccacuucccccgcgagggggucuucguguccaacggcacccacugguucgugacgcagcggaacuucuacgagccgcagaucaucaccaccgacaacaccuucgucagcggcaacugcgacguggugaucgggaucgucaacaacacgguguacgacccccugcagcccgagcuggacuccuucaaggaggagcucgacaaguacuucaagaaccacaccagccccgacguggaccugggcgacaucuccgggaucaacgccagcgucgugaacauccagaaggagaucgaccgccugaacgagguggccaagaaccucaacgagucccugaucgaccugcaggagcucggcaaguacgagcaguacaucaaguggccgugguacaucuggcugggcuucaucgccgggcugaucgcgaucgucauggugaccaucaugcucugcugcaugaccagcugcugcuccugccugaagggcugcugcagcugcggguccugcugcaaguucgacgaggacgacagcgagcccgugcugaagggcgucaagcuccacuacacgugaggacuagucccuguucccagagcccacuuuuuuuucuuuuuuugaaauaaaauagccugucuuucagaucuaaaaaaaaaaaaaaaaaaaaaaaaaaaaaaaaaaaaaaaaaaaaaaaaaaaaaaaaaaaaaaaaaaaaaaaaaaaaaaaaaaaaaaaaaaaaaaaaaaaa

SEQ ID NO: 24974 - RNA, 4167 nt, Artificial Sequence
  SARS-CoV-2/Wuhan/WIV05/2019__EPI_ISL_402128 spike protein mRNA gc (1-1273)(Y453F_D614G)
aggagagggcgcuuggcuugcaaggacccugagcugcggcauugaagcacacccaacccaacucgacugaagucagccucacugaaccggaucugagaaucuucucucucugggcuugccagggcucuccgaaccuagcuagcauccucuucaauuccaacuagaaagcuuaccauguucguguuccugguccuccugccccuggugagcucccagugcgugaaccucaccacccgcacgcagcugccgcccgccuacaccaacagcuucacccggggcgucuacuaccccgacaagguguuccgcuccagcgugcugcacuccacccaggaccucuuccugcccuucuucagcaacgucacgugguuccacgccauccacguguccgggaccaacggcaccaagcgguucgacaacccggugcugcccuucaacgacggggucuacuucgcgagcaccgagaaguccaacaucauccgcggcuggaucuucgggacgacccucgacagcaagacccagucccugcugaucgugaacaacgccaccaacguggucaucaaggugugcgaguuccaguucugcaacgaccccuuccucggcguguacuaccacaagaacaacaagagcuggauggaguccgaguuccgggucuacagcuccgccaacaacugcacguucgaguacgugagccagcccuuccugauggaccuggagggcaagcaggggaacuucaagaaccuccgcgaguucguguucaagaacaucgacggcuacuucaagaucuacuccaagcacaccccgaucaaccugguccgggaccugccccagggguucagcgcccucgagccccugguggaccugcccaucggcaucaacaucacccgcuuccagacccuccuggcccugcaccgguccuaccucacgccgggggacagcagcuccggcuggaccgcgggcgccgccgccuacuacgugggguaccugcagccccgcaccuuccugcucaaguacaacgagaacggcaccaucacggacgcggucgacugcgcccuggacccccugagcgagaccaagugcacccucaaguccuucaccguggagaaggggaucuaccagacgagcaacuuccgggugcagcccaccgaguccaucguccgcuucccgaacaucaccaaccugugccccuucggcgagguguucaacgccacccgguucgccagcgucuacgccuggaaccgcaagcggaucuccaacugcguggcggacuacagcgugcuguacaacuccgccagcuucuccacguucaagugcuacggcgucagccccaccaagcucaacgaccugugcuucaccaacguguacgccgacuccuucgugauccgcggggacgagguccggcagaucgcccccggccagaccgggaagaucgccgacuacaacuacaagcugccggacgacuucacgggcugcgugaucgcguggaacagcaacaaccucgacuccaaggucgggggcaacuacaacuaccuguuccgccuguuccgcaagagcaaccucaagcccuucgagcgggacaucuccaccgagaucuaccaggccggcagcacccccugcaacgggguggagggcuucaacugcuacuucccccugcaguccuacggguuccagccgaccaacggcgugggguaccagcccuaccggguggucgugcugagcuucgagcuccugcacgcccccgccacggugugcggccccaagaaguccaccaaccuggucaagaacaagugcgugaacuucaacuucaacggccucaccgggaccggcgugcugaccgagagcaacaagaaguuccugccguuccagcaguucgggcgcgacaucgccgacacgaccgacgcgguccgcgacccccagacccuggagauccucgacaucacccccugcagcuucggcgggguguccgugaucacgccgggcaccaacaccagcaaccaggucgccgugcuguaccagggcgugaacugcaccgagguccccguggccauccacgccgaccagcugacgcccaccuggcggguguacuccaccgggagcaacgucuuccagacccgcgccggcugccucaucggggcggagcacgugaacaacuccuacgagugcgacauccccaucggcgccggcaucugcgccagcuaccagacgcagaccaacuccccgcggcgcgcccggagcguggcgucccagagcaucaucgccuacaccaugucccugggggccgagaacagcgucgccuacuccaacaacagcaucgccauccccaccaacuucacgaucuccgugaccaccgagauccugcccgugagcaugaccaagacgagcgucgacugcaccauguacaucugcggcgacuccaccgagugcagcaaccuccugcugcaguacggguccuucugcacccagcucaaccgcgcgcugacgggcaucgccguggagcaggacaagaacacccaggagguguucgcccaggucaagcagaucuacaagacgcccccgaucaaggacuucgggggcuucaacuucagccagauccugcccgaccccuccaagcccagcaagcgguccuucaucgaggaccuccuguucaacaaggugacccuggccgacgccggcuucaucaagcaguacggggacugccucggcgacaucgcggcccgcgaccugaucugcgcccagaaguucaacgggcugaccgugcucccgccccugcugaccgacgagaugaucgcccaguacaccagcgcccuccuggcgggcaccaucacguccggguggaccuucggcgccggcgccgcccugcagauccccuucgcgaugcagauggccuaccgguucaacgggaucggcgucacccagaacgugcucuacgagaaccagaagcugaucgccaaccaguucaacagcgccaucgggaagauccaggacucccugagcuccaccgccagcgcgcucggcaagcugcaggacguggucaaccagaacgcccaggcccugaacacgcucgugaagcagcuguccagcaacuucggggccaucuccagcgugcugaacgacauccucucccgccuggacaaggucgaggccgaggugcagaucgaccggcugaucaccggccgccuccagagccugcagaccuacgugacccagcagcugauccgggcggccgagauccgcgccagcgccaaccucgccgcgaccaagauguccgagugcguccugggccagagcaagcggguggacuucugcgggaagggcuaccaccugauguccuucccccagagcgccccgcacgggguggucuuccuccacgugacguacguccccgcccaggagaagaacuucaccaccgcccccgcgaucugccacgacggcaaggcccacuucccccgcgaggggguguucguguccaacggcacccacugguucgucacgcagcggaacuucuacgagccgcagaucaucaccaccgacaacaccuucgugagcggcaacugcgacguggucaucgggaucgugaacaacacgguguacgacccccugcagcccgagcuggacuccuucaaggaggagcucgacaaguacuucaagaaccacaccagccccgacgucgaccugggcgacaucuccgggaucaacgccagcguggugaacauccagaaggagaucgaccgccugaacgaggucgccaagaaccucaacgagucccugaucgaccugcaggagcucggcaaguacgagcaguacaucaaguggccgugguacaucuggcugggcuucaucgccgggcugaucgcgaucgugauggugaccaucaugcucugcugcaugaccagcugcugcuccugccugaagggcugcugcagcugcggguccugcugcaaguucgacgaggacgacagcgagcccguccugaagggcgugaagcuccacuacacgugaggacuagucccuguucccagagcccacuuuuuuuucuuuuuuugaaauaaaauagccugucuuucagaucuaaaaaaaaaaaaaaaaaaaaaaaaaaaaaaaaaaaaaaaaaaaaaaaaaaaaaaaaaaaaaaaaaaaaaaaaaaaaaaaaaaaaaaaaaaaaaaaaaaaa

SEQ ID NO: 24975 - RNA, 4167 nt, Artificial Sequence
  SARS-CoV-2/Wuhan/WIV05/2019__EPI_ISL_402128 spike protein mRNA gc (1-1273)(D614G_I692V)
aggagagggcgcuuggcuugcaaggacccugagcugcggcauugaagcacacccaacccaacucgacugaagucagccucacugaaccggaucugagaaucuucucucucugggcuugccagggcucuccgaaccuagcuagcauccucuucaauuccaacuagaaagcuuaccauguucguguuccugguccuccugccccuggugagcucccagugcgugaaccucaccacccgcacgcagcugccgcccgccuacaccaacagcuucacccggggcgucuacuaccccgacaagguguuccgcuccagcgugcugcacuccacccaggaccucuuccugcccuucuucagcaacgucacgugguuccacgccauccacguguccgggaccaacggcaccaagcgguucgacaacccggugcugcccuucaacgacggggucuacuucgcgagcaccgagaaguccaacaucauccgcggcuggaucuucgggacgacccucgacagcaagacccagucccugcugaucgugaacaacgccaccaacguggucaucaaggugugcgaguuccaguucugcaacgaccccuuccucggcguguacuaccacaagaacaacaagagcuggauggaguccgaguuccgggucuacagcuccgccaacaacugcacguucgaguacgugagccagcccuuccugauggaccuggagggcaagcaggggaacuucaagaaccuccgcgaguucguguucaagaacaucgacggcuacuucaagaucuacuccaagcacaccccgaucaaccugguccgggaccugccccagggguucagcgcccucgagccccugguggaccugcccaucggcaucaacaucacccgcuuccagacccuccuggcccugcaccgguccuaccucacgccgggggacagcagcuccggcuggaccgcgggcgccgccgccuacuacgugggguaccugcagccccgcaccuuccugcucaaguacaacgagaacggcaccaucacggacgcggucgacugcgcccuggacccccugagcgagaccaagugcacccucaaguccuucaccguggagaaggggaucuaccagacgagcaacuuccgggugcagcccaccgaguccaucguccgcuucccgaacaucaccaaccugugccccuucggcgagguguucaacgccacccgguucgccagcgucuacgccuggaaccgcaagcggaucuccaacugcguggcggacuacagcgugcuguacaacuccgccagcuucuccacguucaagugcuacggcgucagccccaccaagcucaacgaccugugcuucaccaacguguacgccgacuccuucgugauccgcggggacgagguccggcagaucgcccccggccagaccgggaagaucgccgacuacaacuacaagcugccggacgacuucacgggcugcgugaucgcguggaacagcaacaaccucgacuccaaggucgggggcaacuacaacuaccuguaccgccuguuccgcaagagcaaccucaagcccuucgagcgggacaucuccaccgagaucuaccaggccggcagcacccccugcaacgggguggagggcuucaacugcuacuucccccugcaguccuacggguuccagccgaccaacggcgugggguaccagcccuaccggguggucgugcugagcuucgagcuccugcacgcccccgccacggugugcggccccaagaaguccaccaaccuggucaagaacaagugcgugaacuucaacuucaacggccucaccgggaccggcgugcugaccgagagcaacaagaaguuccugccguuccagcaguucgggcgcgacaucgccgacacgaccgacgcgguccgcgacccccagacccuggagauccucgacaucacccccugcagcuucggcgggguguccgugaucacgccgggcaccaacaccagcaaccaggucgccgugcuguaccagggcgugaacugcaccgagguccccguggccauccacgccgaccagcugacgcccaccuggcggguguacuccaccgggagcaacgucuuccagacccgcgccggcugccucaucggggcggagcacgugaacaacuccuacgagugcgacauccccaucggcgccggcaucugcgccagcuaccagacgcagaccaacuccccgcggcgcgcccggagcguggcgucccagagcgucaucgccuacaccaugucccugggggccgagaacagcguggccuacuccaacaacagcaucgccauccccaccaacuucacgaucuccgugaccaccgagauccugcccgucagcaugaccaagacgagcguggacugcaccauguacaucugcggcgacuccaccgagugcagcaaccuccugcugcaguacggguccuucugcacccagcucaaccgcgcgcugacgggcaucgccguggagcaggacaagaacacccaggaggucuucgcccaggugaagcagaucuacaagacgcccccgaucaaggacuucgggggcuucaacuucagccagauccugcccgaccccuccaagcccagcaagcgguccuucaucgaggaccuccuguucaacaaggugacccuggccgacgccggcuucaucaagcaguacggggacugccucggcgacaucgcggcccgcgaccugaucugcgcccagaaguucaacgggcugaccguccucccgccccugcugaccgacgagaugaucgcccaguacaccagcgcccuccuggcgggcaccaucacguccggguggaccuucggcgccggcgccgcccugcagauccccuucgcgaugcagauggccuaccgguucaacgggaucggcgugacccagaacgugcucuacgagaaccagaagcugaucgccaaccaguucaacagcgccaucgggaagauccaggacucccugagcuccaccgccagcgcgcucggcaagcugcaggacgucgugaaccagaacgcccaggcccugaacacgcucgugaagcagcuguccagcaacuucggggccaucuccagcguccugaacgacauccucucccgccuggacaagguggaggccgaggugcagaucgaccggcugaucaccggccgccuccagagccugcagaccuacgucacccagcagcugauccgggcggccgagauccgcgccagcgccaaccucgccgcgaccaagauguccgagugcgugcugggccagagcaagcggguggacuucugcgggaagggcuaccaccugauguccuucccccagagcgccccgcacggggucguguuccuccacgucacguacgugcccgcccaggagaagaacuucaccaccgcccccgcgaucugccacgacggcaaggcccacuucccccgcgaggggguguucgucuccaacggcacccacugguucgugacgcagcggaacuucuacgagccgcagaucaucaccaccgacaacaccuucgugagcggcaacugcgacgucgugaucgggaucgugaacaacacggucuacgacccccugcagcccgagcuggacuccuucaaggaggagcucgacaaguacuucaagaaccacaccagccccgacguggaccugggcgacaucuccgggaucaacgccagcguggucaacauccagaaggagaucgaccgccugaacgagguggccaagaaccucaacgagucccugaucgaccugcaggagcucggcaaguacgagcaguacaucaaguggccgugguacaucuggcugggcuucaucgccgggcugaucgcgaucgugauggucaccaucaugcucugcugcaugaccagcugcugcuccugccugaagggcugcugcagcugcggguccugcugcaaguucgacgaggacgacagcgagcccgugcugaagggcgugaagcuccacuacacgugaggacuagucccuguucccagagcccacuuuuuuuucuuuuuuugaaauaaaauagccugucuuucagaucuaaaaaaaaaaaaaaaaaaaaaaaaaaaaaaaaaaaaaaaaaaaaaaaaaaaaaaaaaaaaaaaaaaaaaaaaaaaaaaaaaaaaaaaaaaaaaaaaaaaa

SEQ ID NO: 24976 - RNA, 4167 nt, Artificial Sequence
  SARS-CoV-2/Wuhan/WIV05/2019__EPI_ISL_402128 spike protein mRNA gc (1-1273)(D614G_M1229I)
aggagagggcgcuuggcuugcaaggacccugagcugcggcauugaagcacacccaacccaacucgacugaagucagccucacugaaccggaucugagaaucuucucucucugggcuugccagggcucuccgaaccuagcuagcauccucuucaauuccaacuagaaagcuuaccauguucguguuccugguccuccugccccuggugagcucccagugcgugaaccucaccacccgcacgcagcugccgcccgccuacaccaacagcuucacccggggcgucuacuaccccgacaagguguuccgcuccagcgugcugcacuccacccaggaccucuuccugcccuucuucagcaacgucacgugguuccacgccauccacguguccgggaccaacggcaccaagcgguucgacaacccggugcugcccuucaacgacggggucuacuucgcgagcaccgagaaguccaacaucauccgcggcuggaucuucgggacgacccucgacagcaagacccagucccugcugaucgugaacaacgccaccaacguggucaucaaggugugcgaguuccaguucugcaacgaccccuuccucggcguguacuaccacaagaacaacaagagcuggauggaguccgaguuccgggucuacagcuccgccaacaacugcacguucgaguacgugagccagcccuuccugauggaccuggagggcaagcaggggaacuucaagaaccuccgcgaguucguguucaagaacaucgacggcuacuucaagaucuacuccaagcacaccccgaucaaccugguccgggaccugccccagggguucagcgcccucgagccccugguggaccugcccaucggcaucaacaucacccgcuuccagacccuccuggcccugcaccgguccuaccucacgccgggggacagcagcuccggcuggaccgcgggcgccgccgccuacuacgugggguaccugcagccccgcaccuuccugcucaaguacaacgagaacggcaccaucacggacgcggucgacugcgcccuggacccccugagcgagaccaagugcacccucaaguccuucaccguggagaaggggaucuaccagacgagcaacuuccgggugcagcccaccgaguccaucguccgcuucccgaacaucaccaaccugugccccuucggcgagguguucaacgccacccgguucgccagcgucuacgccuggaaccgcaagcggaucuccaacugcguggcggacuacagcgugcuguacaacuccgccagcuucuccacguucaagugcuacggcgucagccccaccaagcucaacgaccugugcuucaccaacguguacgccgacuccuucgugauccgcggggacgagguccggcagaucgcccccggccagaccgggaagaucgccgacuacaacuacaagcugccggacgacuucacgggcugcgugaucgcguggaacagcaacaaccucgacuccaaggucgggggcaacuacaacuaccuguaccgccuguuccgcaagagcaaccucaagcccuucgagcgggacaucuccaccgagaucuaccaggccggcagcacccccugcaacgggguggagggcuucaacugcuacuucccccugcaguccuacggguuccagccgaccaacggcgugggguaccagcccuaccggguggucgugcugagcuucgagcuccugcacgcccccgccacggugugcggccccaagaaguccaccaaccuggucaagaacaagugcgugaacuucaacuucaacggccucaccgggaccggcgugcugaccgagagcaacaagaaguuccugccguuccagcaguucgggcgcgacaucgccgacacgaccgacgcgguccgcgacccccagacccuggagauccucgacaucacccccugcagcuucggcgggguguccgugaucacgccgggcaccaacaccagcaaccaggucgccgugcuguaccagggcgugaacugcaccgagguccccguggccauccacgccgaccagcugacgcccaccuggcggguguacuccaccgggagcaacgucuuccagacccgcgccggcugccucaucggggcggagcacgugaacaacuccuacgagugcgacauccccaucggcgccggcaucugcgccagcuaccagacgcagaccaacuccccgcggcgcgcccggagcguggcgucccagagcaucaucgccuacaccaugucccugggggccgagaacagcgucgccuacuccaacaacagcaucgccauccccaccaacuucacgaucuccgugaccaccgagauccugcccgugagcaugaccaagacgagcgucgacugcaccauguacaucugcggcgacuccaccgagugcagcaaccuccugcugcaguacggguccuucugcacccagcucaaccgcgcgcugacgggcaucgccguggagcaggacaagaacacccaggagguguucgcccaggucaagcagaucuacaagacgcccccgaucaaggacuucgggggcuucaacuucagccagauccugcccgaccccuccaagcccagcaagcgguccuucaucgaggaccuccuguucaacaaggugacccuggccgacgccggcuucaucaagcaguacggggacugccucggcgacaucgcggcccgcgaccugaucugcgcccagaaguucaacgggcugaccgugcucccgccccugcugaccgacgagaugaucgcccaguacaccagcgcccuccuggcgggcaccaucacguccggguggaccuucggcgccggcgccgcccugcagauccccuucgcgaugcagauggccuaccgguucaacgggaucggcgucacccagaacgugcucuacgagaaccagaagcugaucgccaaccaguucaacagcgccaucgggaagauccaggacucccugagcuccaccgccagcgcgcucggcaagcugcaggacguggucaaccagaacgcccaggcccugaacacgcucgugaagcagcuguccagcaacuucggggccaucuccagcgugcugaacgacauccucucccgccuggacaaggucgaggccgaggugcagaucgaccggcugaucaccggccgccuccagagccugcagaccuacgugacccagcagcugauccgggcggccgagauccgcgccagcgccaaccucgccgcgaccaagauguccgagugcguccugggccagagcaagcggguggacuucugcgggaagggcuaccaccugauguccuucccccagagcgccccgcacgggguggucuuccuccacgugacguacguccccgcccaggagaagaacuucaccaccgcccccgcgaucugccacgacggcaaggcccacuucccccgcgaggggguguucguguccaacggcacccacugguucgucacgcagcggaacuucuacgagccgcagaucaucaccaccgacaacaccuucgugagcggcaacugcgacguggucaucgggaucgugaacaacacgguguacgacccccugcagcccgagcuggacuccuucaaggaggagcucgacaaguacuucaagaaccacaccagccccgacgucgaccugggcgacaucuccgggaucaacgccagcguggugaacauccagaaggagaucgaccgccugaacgaggucgccaagaaccucaacgagucccugaucgaccugcaggagcucggcaaguacgagcaguacaucaaguggccgugguacaucuggcugggcuucaucgccgggcugaucgcgaucgugaucgugaccaucaugcucugcugcaugaccagcugcugcuccugccugaagggcugcugcagcugcggguccugcugcaaguucgacgaggacgacagcgagcccguccugaagggcgugaagcuccacuacacgugaggacuagucccuguucccagagcccacuuuuuuuucuuuuuuugaaauaaaauagccugucuuucagaucuaaaaaaaaaaaaaaaaaaaaaaaaaaaaaaaaaaaaaaaaaaaaaaaaaaaaaaaaaaaaaaaaaaaaaaaaaaaaaaaaaaaaaaaaaaaaaaaaaaaa

SEQ ID NO: 24977 - RNA, 4161 nt, Artificial Sequence
  SARS-CoV-2/Wuhan/WIV05/2019__EPI_ISL_402128 spike protein mRNA gc (1-1273)(H69del_V70del_A222V_Y453F_S477N_D614G_I692V)
aggagagggcgcuuggcuugcaaggacccugagcugcggcauugaagcacacccaacccaacucgacugaagucagccucacugaaccggaucugagaaucuucucucucugggcuugccagggcucuccgaaccuagcuagcauccucuucaauuccaacuagaaagcuuaccauguucguguuccugguccuccugccccuggugagcucccagugcgugaaccucaccacccgcacgcagcugccgcccgccuacaccaacagcuucacccggggcgucuacuaccccgacaagguguuccgcuccagcgugcugcacuccacccaggaccucuuccugcccuucuucagcaacgucacgugguuccacgccaucuccgggaccaacggcaccaagcgguucgacaacccggugcugcccuucaacgacgggguguacuucgcgagcaccgagaaguccaacaucauccgcggcuggaucuucgggacgacccucgacagcaagacccagucccugcugaucgucaacaacgccaccaacguggugaucaaggucugcgaguuccaguucugcaacgaccccuuccucggcguguacuaccacaagaacaacaagagcuggauggaguccgaguuccggguguacagcuccgccaacaacugcacguucgaguacgucagccagcccuuccugauggaccuggagggcaagcaggggaacuucaagaaccuccgcgaguucguguucaagaacaucgacggcuacuucaagaucuacuccaagcacaccccgaucaaccuggugcgggaccugccccagggguucagcguccucgagccccugguggaccugcccaucggcaucaacaucacccgcuuccagacccuccuggcccugcaccgguccuaccucacgccgggggacagcagcuccggcuggaccgccggcgcggccgccuacuacgugggguaccugcagccccgcaccuuccugcucaaguacaacgagaacggcaccaucacggacgccgucgacugcgcgcuggacccccugagcgagaccaagugcacccucaaguccuucaccguggagaaggggaucuaccagacgagcaacuuccgggugcagcccaccgaguccaucguccgcuucccgaacaucaccaaccugugccccuucggcgagguguucaacgccacccgguucgccagcgucuacgccuggaaccgcaagcggaucuccaacugcguggccgacuacagcgugcuguacaacuccgcgagcuucuccacguucaagugcuacggcgucagccccaccaagcucaacgaccugugcuucaccaacguguacgccgacuccuucgugauccgcggggacgagguccggcagaucgcccccggccagaccgggaagaucgccgacuacaacuacaagcugccggacgacuucacgggcugcgugaucgccuggaacagcaacaaccucgacuccaaggucgggggcaacuacaacuaccuguuccgccuguuccgcaagagcaaccucaagcccuucgagcgggacaucuccaccgagaucuaccaggcgggcaacacccccugcaacgggguggagggcuucaacugcuacuucccccugcagagcuacggguuccagccgaccaacggcgugggguaccagcccuaccggguggucgugcuguccuucgagcuccugcacgcccccgccacggugugcggccccaagaaguccaccaaccuggucaagaacaagugcgugaacuucaacuucaacggccucaccgggaccggcgugcugaccgagagcaacaagaaguuccugccguuccagcaguucgggcgcgacaucgccgacacgaccgacgccguccgcgacccccagacccuggagauccucgacaucacccccugcagcuucggcggggugagcgugaucacgccgggcaccaacaccuccaaccaggucgcggugcuguaccagggcgugaacugcaccgagguccccguggccauccacgccgaccagcugacgcccaccuggcggguguacagcaccggguccaacgucuuccagacccgcgccggcugccucaucggggccgagcacgugaacaacagcuacgagugcgacauccccaucggcgcgggcaucugcgccuccuaccagacgcagaccaacagcccgcggcgcgcccgguccguggccagccaguccgucaucgcguacaccaugagccugggggccgagaacuccguggccuacagcaacaacuccaucgccauccccaccaacuucacgaucagcgugaccaccgagauccugcccgucuccaugaccaagacgagcguggacugcaccauguacaucugcggcgacagcaccgagugcuccaaccuccugcugcaguacgggagcuucugcacccagcucaaccgcgcccugacgggcaucgcgguggagcaggacaagaacacccaggaggucuucgcccaggugaagcagaucuacaagacgcccccgaucaaggacuucgggggcuucaacuucucccagauccugcccgaccccagcaagcccuccaagcggagcuucaucgaggaccuccuguucaacaaggugacccuggccgacgccggcuucaucaagcaguacggggacugccucggcgacaucgccgcgcgcgaccugaucugcgcccagaaguucaacgggcugaccguccucccgccccugcugaccgacgagaugaucgcccaguacaccuccgcccuccuggccggcaccaucacgagcggguggaccuucggcgcgggcgccgcccugcagauccccuucgccaugcagauggcguaccgguucaacgggaucggcgugacccagaacgugcucuacgagaaccagaagcugaucgccaaccaguucaacuccgccaucgggaagauccaggacagccuguccagcaccgccuccgcccucggcaagcugcaggacgucgugaaccagaacgcgcaggcccugaacacgcucgugaagcagcugagcuccaacuucggggccaucagcuccguccugaacgacauccucagccgccuggacaagguggaggccgaggugcagaucgaccggcugaucaccggccgccuccagucccugcagaccuacgucacccagcagcugauccgggccgcggagauccgcgccagcgccaaccucgccgccaccaagaugagcgagugcgugcugggccaguccaagcggguggacuucugcgggaagggcuaccaccugaugagcuucccccaguccgcgccgcacggggucguguuccuccacgucacguacgugcccgcccaggagaagaacuucaccaccgcccccgccaucugccacgacggcaaggcgcacuucccccgcgaggggguguucgucagcaacggcacccacugguucgugacgcagcggaacuucuacgagccgcagaucaucaccaccgacaacaccuucguguccggcaacugcgacgucgugaucgggaucgugaacaacacggucuacgacccccugcagcccgagcuggacagcuucaaggaggagcucgacaaguacuucaagaaccacaccucccccgacguggaccugggcgacaucagcgggaucaacgccuccguggucaacauccagaaggagaucgaccgccugaacgagguggccaagaaccucaacgagagccugaucgaccugcaggagcucggcaaguacgagcaguacaucaaguggccgugguacaucuggcugggcuucaucgccgggcugaucgccaucgugauggucaccaucaugcucugcugcaugaccuccugcugcagcugccugaagggcugcugcuccugcgggagcugcugcaaguucgacgaggacgacuccgagcccgugcugaagggcgugaagcuccacuacacgugaggacuagucccuguucccagagcccacuuuuuuuucuuuuuuugaaauaaaauagccugucuuucagaucuaaaaaaaaaaaaaaaaaaaaaaaaaaaaaaaaaaaaaaaaaaaaaaaaaaaaaaaaaaaaaaaaaaaaaaaaaaaaaaaaaaaaaaaaaaaaaaaaaaaa

SEQ ID NO: 24978 - RNA, 4161 nt, Artificial Sequence
  SARS-CoV-2/Wuhan/WIV05/2019__EPI_ISL_402128 spike protein mRNA gc (1-1273)(H69del_V70del_Y453F_D614G_I692V_M1229I)
aggagagggcgcuuggcuugcaaggacccugagcugcggcauugaagcacacccaacccaacucgacugaagucagccucacugaaccggaucugagaaucuucucucucugggcuugccagggcucuccgaaccuagcuagcauccucuucaauuccaacuagaaagcuuaccauguucguguuccugguccuccugccccuggugagcucccagugcgugaaccucaccacccgcacgcagcugccgcccgccuacaccaacagcuucacccggggcgucuacuaccccgacaagguguuccgcuccagcgugcugcacuccacccaggaccucuuccugcccuucuucagcaacgucacgugguuccacgccaucuccgggaccaacggcaccaagcgguucgacaacccggugcugcccuucaacgacgggguguacuucgcgagcaccgagaaguccaacaucauccgcggcuggaucuucgggacgacccucgacagcaagacccagucccugcugaucgucaacaacgccaccaacguggugaucaaggucugcgaguuccaguucugcaacgaccccuuccucggcguguacuaccacaagaacaacaagagcuggauggaguccgaguuccggguguacagcuccgccaacaacugcacguucgaguacgucagccagcccuuccugauggaccuggagggcaagcaggggaacuucaagaaccuccgcgaguucguguucaagaacaucgacggcuacuucaagaucuacuccaagcacaccccgaucaaccuggugcgggaccugccccagggguucagcgcccucgagccccuggucgaccugcccaucggcaucaacaucacccgcuuccagacccuccuggcccugcaccgguccuaccucacgccgggggacagcagcuccggcuggaccgcgggcgccgccgccuacuacgugggguaccugcagccccgcaccuuccugcucaaguacaacgagaacggcaccaucacggacgcgguggacugcgcccuggacccccugagcgagaccaagugcacccucaaguccuucaccgucgagaaggggaucuaccagacgagcaacuuccgggugcagcccaccgaguccaucgugcgcuucccgaacaucaccaaccugugccccuucggcgaggucuucaacgccacccgguucgccagcguguacgccuggaaccgcaagcggaucuccaacugcgucgcggacuacagcgugcuguacaacuccgccagcuucuccacguucaagugcuacggcgugagccccaccaagcucaacgaccugugcuucaccaacgucuacgccgacuccuucgugauccgcggggacgaggugcggcagaucgcccccggccagaccgggaagaucgccgacuacaacuacaagcugccggacgacuucacgggcugcgucaucgcguggaacagcaacaaccucgacuccaaggucgggggcaacuacaacuaccuguuccgccuguuccgcaagagcaaccucaagcccuucgagcgggacaucuccaccgagaucuaccaggccggcagcacccccugcaacgggguggagggcuucaacugcuacuucccccugcaguccuacggguuccagccgaccaacggcgugggguaccagcccuaccggguggugguccugagcuucgagcuccugcacgcccccgccacggugugcggccccaagaaguccaccaaccuggugaagaacaagugcgucaacuucaacuucaacggccucaccgggaccggcgugcugaccgagagcaacaagaaguuccugccguuccagcaguucgggcgcgacaucgccgacacgaccgacgcggugcgcgacccccagacccuggagauccucgacaucacccccugcagcuucggcggggucuccgugaucacgccgggcaccaacaccagcaaccagguggccguccuguaccagggcgugaacugcaccgaggugcccgucgccauccacgccgaccagcugacgcccaccuggcggguguacuccaccgggagcaacguguuccagacccgcgccggcugccucaucggggcggagcacgucaacaacuccuacgagugcgacauccccaucggcgccggcaucugcgccagcuaccagacgcagaccaacuccccgcggcgcgcccggagcguggcgucccagagcgugaucgccuacaccaugucccugggggccgagaacagcgucgccuacuccaacaacagcaucgccauccccaccaacuucacgaucuccgugaccaccgagauccugcccgugagcaugaccaagacgagcgucgacugcaccauguacaucugcggcgacuccaccgagugcagcaaccuccugcugcaguacggguccuucugcacccagcucaaccgcgcgcugacgggcaucgccguggagcaggacaagaacacccaggagguguucgcccaggucaagcagaucuacaagacgcccccgaucaaggacuucgggggcuucaacuucagccagauccugcccgaccccuccaagcccagcaagcgguccuucaucgaggaccuccuguucaacaaggugacccuggccgacgccggcuucaucaagcaguacggggacugccucggcgacaucgcggcccgcgaccugaucugcgcccagaaguucaacgggcugaccgugcucccgccccugcugaccgacgagaugaucgcccaguacaccagcgcccuccuggcgggcaccaucacguccggguggaccuucggcgccggcgccgcccugcagauccccuucgcgaugcagauggccuaccgguucaacgggaucggcgucacccagaacgugcucuacgagaaccagaagcugaucgccaaccaguucaacagcgccaucgggaagauccaggacucccugagcuccaccgccagcgcgcucggcaagcugcaggacguggucaaccagaacgcccaggcccugaacacgcucgugaagcagcuguccagcaacuucggggccaucuccagcgugcugaacgacauccucucccgccuggacaaggucgaggccgaggugcagaucgaccggcugaucaccggccgccuccagagccugcagaccuacgugacccagcagcugauccgggcggccgagauccgcgccagcgccaaccucgccgcgaccaagauguccgagugcguccugggccagagcaagcggguggacuucugcgggaagggcuaccaccugauguccuucccccagagcgccccgcacgggguggucuuccuccacgugacguacguccccgcccaggagaagaacuucaccaccgcccccgcgaucugccacgacggcaaggcccacuucccccgcgaggggguguucguguccaacggcacccacugguucgucacgcagcggaacuucuacgagccgcagaucaucaccaccgacaacaccuucgugagcggcaacugcgacguggucaucgggaucgugaacaacacgguguacgacccccugcagcccgagcuggacuccuucaaggaggagcucgacaaguacuucaagaaccacaccagccccgacgucgaccugggcgacaucuccgggaucaacgccagcguggugaacauccagaaggagaucgaccgccugaacgaggucgccaagaaccucaacgagucccugaucgaccugcaggagcucggcaaguacgagcaguacaucaaguggccgugguacaucuggcugggcuucaucgccgggcugaucgcgaucgugaucgugaccaucaugcucugcugcaugaccagcugcugcuccugccugaagggcugcugcagcugcggguccugcugcaaguucgacgaggacgacagcgagcccguccugaagggcgugaagcuccacuacacgugaggacuagucccuguucccagagcccacuuuuuuuucuuuuuuugaaauaaaauagccugucuuucagaucuaaaaaaaaaaaaaaaaaaaaaaaaaaaaaaaaaaaaaaaaaaaaaaaaaaaaaaaaaaaaaaaaaaaaaaaaaaaaaaaaaaaaaaaaaaaaaaaaaaaa

SEQ ID NO: 24979 - RNA, 4158 nt, Artificial Sequence
  SARS-CoV-2/Wuhan/WIV05/2019__EPI_ISL_402128 spike protein mRNA gc (1-1273)(H69del_V70del_Y144del_N501Y_A570D_D614G_P681H_T716I_S982 A_D1118H)
aggagagggcgcuuggcuugcaaggacccugagcugcggcauugaagcacacccaacccaacucgacugaagucagccucacugaaccggaucugagaaucuucucucucugggcuugccagggcucuccgaaccuagcuagcauccucuucaauuccaacuagaaagcuuaccauguucguguuccugguccuccugccccuggugagcucccagugcgugaaccucaccacccgcacgcagcugccgcccgccuacaccaacagcuucacccggggcgucuacuaccccgacaagguguuccgcuccagcgugcugcacuccacccaggaccucuuccugcccuucuucagcaacgucacgugguuccacgccaucuccgggaccaacggcaccaagcgguucgacaacccggugcugcccuucaacgacgggguguacuucgcgagcaccgagaaguccaacaucauccgcggcuggaucuucgggacgacccucgacagcaagacccagucccugcugaucgucaacaacgccaccaacguggugaucaaggucugcgaguuccaguucugcaacgaccccuuccucggcguguaccacaagaacaacaagagcuggauggaguccgaguuccggguguacagcuccgccaacaacugcacguucgaguacgucagccagcccuuccugauggaccuggagggcaagcaggggaacuucaagaaccuccgcgaguucguguucaagaacaucgacggcuacuucaagaucuacuccaagcacaccccgaucaaccuggugcgggaccugccccagggguucagcgcccucgagccccuggucgaccugcccaucggcaucaacaucacccgcuuccagacccuccuggcccugcaccgguccuaccucacgccgggggacagcagcuccggcuggaccgcgggcgccgccgccuacuacgugggguaccugcagccccgcaccuuccugcucaaguacaacgagaacggcaccaucacggacgcgguggacugcgcccuggacccccugagcgagaccaagugcacccucaaguccuucaccgucgagaaggggaucuaccagacgagcaacuuccgggugcagcccaccgaguccaucgugcgcuucccgaacaucaccaaccugugccccuucggcgaggucuucaacgccacccgguucgccagcguguacgccuggaaccgcaagcggaucuccaacugcgucgcggacuacagcgugcuguacaacuccgccagcuucuccacguucaagugcuacggcgugagccccaccaagcucaacgaccugugcuucaccaacgucuacgccgacuccuucgugauccgcggggacgaggugcggcagaucgcccccggccagaccgggaagaucgccgacuacaacuacaagcugccggacgacuucacgggcugcgucaucgcguggaacagcaacaaccucgacuccaaggucgggggcaacuacaacuaccuguaccgccuguuccgcaagagcaaccucaagcccuucgagcgggacaucuccaccgagaucuaccaggccggcagcacccccugcaacgggguggagggcuucaacugcuacuucccccugcaguccuacggguuccagccgaccuacggcgugggguaccagcccuaccggguggugguccugagcuucgagcuccugcacgcccccgccacggugugcggccccaagaaguccaccaaccuggugaagaacaagugcgucaacuucaacuucaacggccucaccgggaccggcgugcugaccgagagcaacaagaaguuccugccguuccagcaguucgggcgcgacaucgacgacacgaccgacgccgugcgcgacccccagacccuggagauccucgacaucacccccugcagcuucggcggggucuccgugaucacgccgggcaccaacaccagcaaccagguggcgguccuguaccagggcgugaacugcaccgaggugcccgucgccauccacgccgaccagcugacgcccaccuggcggguguacuccaccgggagcaacguguuccagacccgcgccggcugccucaucggggccgagcacgucaacaacuccuacgagugcgacauccccaucggcgcgggcaucugcgccagcuaccagacgcagaccaacucccaccggcgcgcccggagcguggccucccagagcaucaucgcguacaccaugucccugggggccgagaacagcguggccuacuccaacaacagcaucgccaucccgaucaacuucaccaucuccgucacgaccgagauccugcccgugagcaugaccaagaccagcguggacugcacgauguacaucugcggcgacuccaccgagugcagcaaccuccugcugcaguacggguccuucugcacccagcucaaccgcgcccugaccggcaucgcggucgagcaggacaagaacacgcaggagguguucgcccaggugaagcagaucuacaagaccccgcccaucaaggacuucgggggcuucaacuucagccagauccugcccgaccccuccaagcccagcaagcgguccuucaucgaggaccuccuguucaacaaggucacccuggccgacgccggcuucaucaagcaguacggggacugccucggcgacaucgccgcgcgcgaccugaucugcgcccagaaguucaacgggcugaccgugcugcccccgcuccugacggacgagaugaucgcccaguacaccagcgcccuccuggccggcaccaucaccuccggguggacguucggcgcgggcgccgcccugcagauccccuucgccaugcagauggcguaccgguucaacgggaucggcgugacccagaacguccucuacgagaaccagaagcugaucgccaaccaguucaacagcgccaucgggaagauccaggacucccugagcuccaccgccagcgcccucggcaagcugcaggacguggugaaccagaacgcgcaggcccugaacacccucgucaagcagcuguccagcaacuucggggccaucuccagcgugcugaacgacauccucgcccgccuggacaagguggaggccgagguccagaucgaccggcugaucacgggccgccuccagucccugcagaccuacgugacccagcagcugauccgggcggccgagauccgcgccagcgccaaccucgccgcgaccaagaugagcgagugcgugcugggccaguccaagcgggucgacuucugcgggaagggcuaccaccugaugagcuucccccaguccgcgccccacggggugguguuccuccacgucaccuacgugccggcccaggagaagaacuucacgaccgcccccgccaucugccacgacggcaaggcccacuucccccgcgagggggucuucgugagcaacggcacccacugguucgugacccagcggaacuucuacgagccccagaucaucacgacccacaacaccuucgucuccggcaacugcgacguggugaucgggaucgucaacaacaccguguacgacccgcugcagcccgagcuggacagcuucaaggaggagcucgacaaguacuucaagaaccacacgucccccgacguggaccugggcgacaucagcgggaucaacgccuccgucgugaacauccagaaggagaucgaccgccugaacgagguggccaagaaccucaacgagagccugaucgaccugcaggagcucggcaaguacgagcaguacaucaaguggcccugguacaucuggcugggcuucaucgccgggcugaucgcgaucgucauggugaccaucaugcucugcugcaugaccuccugcugcagcugccugaagggcugcugcuccugcgggagcugcugcaaguucgacgaggacgacuccgagccggugcugaagggcgucaagcuccacuacaccugaggacuagucccuguucccagagcccacuuuuuuuucuuuuuuugaaauaaaauagccugucuuucagaucuaaaaaaaaaaaaaaaaaaaaaaaaaaaaaaaaaaaaaaaaaaaaaaaaaaaaaaaaaaaaaaaaaaaaaaaaaaaaaaaaaaaaaaaaaaaaaaaaaaaa

SEQ ID NO: 24980 - RNA, 4167 nt, Artificial Sequence
  SARS-CoV-2/Wuhan/WIV05/2019__EPI_ISL_402128 spike protein mRNA gc (1-1273)(K417N_E484K_N501Y_D614G)
aggagagggcgcuuggcuugcaaggacccugagcugcggcauugaagcacacccaacccaacucgacugaagucagccucacugaaccggaucugagaaucuucucucucugggcuugccagggcucuccgaaccuagcuagcauccucuucaauuccaacuagaaagcuuaccauguucguguuccugguccuccugccccuggugagcucccagugcgugaaccucaccacccgcacgcagcugccgcccgccuacaccaacagcuucacccggggcgucuacuaccccgacaagguguuccgcuccagcgugcugcacuccacccaggaccucuuccugcccuucuucagcaacgucacgugguuccacgccauccacguguccgggaccaacggcaccaagcgguucgacaacccggugcugcccuucaacgacggggucuacuucgcgagcaccgagaaguccaacaucauccgcggcuggaucuucgggacgacccucgacagcaagacccagucccugcugaucgugaacaacgccaccaacguggucaucaaggugugcgaguuccaguucugcaacgaccccuuccucggcguguacuaccacaagaacaacaagagcuggauggaguccgaguuccgggucuacagcuccgccaacaacugcacguucgaguacgugagccagcccuuccugauggaccuggagggcaagcaggggaacuucaagaaccuccgcgaguucguguucaagaacaucgacggcuacuucaagaucuacuccaagcacaccccgaucaaccugguccgggaccugccccagggguucagcgcccucgagccccugguggaccugcccaucggcaucaacaucacccgcuuccagacccuccuggcccugcaccgguccuaccucacgccgggggacagcagcuccggcuggaccgcgggcgccgccgccuacuacgugggguaccugcagccccgcaccuuccugcucaaguacaacgagaacggcaccaucacggacgcggucgacugcgcccuggacccccugagcgagaccaagugcacccucaaguccuucaccguggagaaggggaucuaccagacgagcaacuuccgggugcagcccaccgaguccaucguccgcuucccgaacaucaccaaccugugccccuucggcgagguguucaacgccacccgguucgccagcgucuacgccuggaaccgcaagcggaucuccaacugcguggcggacuacagcgugcuguacaacuccgccagcuucuccacguucaagugcuacggcgucagccccaccaagcucaacgaccugugcuucaccaacguguacgccgacuccuucgugauccgcggggacgagguccggcagaucgcccccggccagaccgggaacaucgccgacuacaacuacaagcugccggacgacuucacgggcugcgugaucgcguggaacagcaacaaccucgacuccaaggucgggggcaacuacaacuaccuguaccgccuguuccgcaagagcaaccucaagcccuucgagcgggacaucuccaccgagaucuaccaggccggcagcacccccugcaacggggugaagggcuucaacugcuacuucccccugcaguccuacggguuccagccgaccuacggcgugggguaccagcccuaccggguggucgugcugagcuucgagcuccugcacgcccccgccacggugugcggccccaagaaguccaccaaccuggucaagaacaagugcgugaacuucaacuucaacggccucaccgggaccggcgugcugaccgagagcaacaagaaguuccugccguuccagcaguucgggcgcgacaucgccgacacgaccgacgcgguccgcgacccccagacccuggagauccucgacaucacccccugcagcuucggcgggguguccgugaucacgccgggcaccaacaccagcaaccaggucgccgugcuguaccagggcgugaacugcaccgagguccccguggccauccacgccgaccagcugacgcccaccuggcggguguacuccaccgggagcaacgucuuccagacccgcgccggcugccucaucggggcggagcacgugaacaacuccuacgagugcgacauccccaucggcgccggcaucugcgccagcuaccagacgcagaccaacuccccgcggcgcgcccggagcguggcgucccagagcaucaucgccuacaccaugucccugggggccgagaacagcgucgccuacuccaacaacagcaucgccauccccaccaacuucacgaucuccgugaccaccgagauccugcccgugagcaugaccaagacgagcgucgacugcaccauguacaucugcggcgacuccaccgagugcagcaaccuccugcugcaguacggguccuucugcacccagcucaaccgcgcgcugacgggcaucgccguggagcaggacaagaacacccaggagguguucgcccaggucaagcagaucuacaagacgcccccgaucaaggacuucgggggcuucaacuucagccagauccugcccgaccccuccaagcccagcaagcgguccuucaucgaggaccuccuguucaacaaggugacccuggccgacgccggcuucaucaagcaguacggggacugccucggcgacaucgcggcccgcgaccugaucugcgcccagaaguucaacgggcugaccgugcucccgccccugcugaccgacgagaugaucgcccaguacaccagcgcccuccuggcgggcaccaucacguccggguggaccuucggcgccggcgccgcccugcagauccccuucgcgaugcagauggccuaccgguucaacgggaucggcgucacccagaacgugcucuacgagaaccagaagcugaucgccaaccaguucaacagcgccaucgggaagauccaggacucccugagcuccaccgccagcgcgcucggcaagcugcaggacguggucaaccagaacgcccaggcccugaacacgcucgugaagcagcuguccagcaacuucggggccaucuccagcgugcugaacgacauccucucccgccuggacaaggucgaggccgaggugcagaucgaccggcugaucaccggccgccuccagagccugcagaccuacgugacccagcagcugauccgggcggccgagauccgcgccagcgccaaccucgccgcgaccaagauguccgagugcguccugggccagagcaagcggguggacuucugcgggaagggcuaccaccugauguccuucccccagagcgccccgcacgggguggucuuccuccacgugacguacguccccgcccaggagaagaacuucaccaccgcccccgcgaucugccacgacggcaaggcccacuucccccgcgaggggguguucguguccaacggcacccacugguucgucacgcagcggaacuucuacgagccgcagaucaucaccaccgacaacaccuucgugagcggcaacugcgacguggucaucgggaucgugaacaacacgguguacgacccccugcagcccgagcuggacuccuucaaggaggagcucgacaaguacuucaagaaccacaccagccccgacgucgaccugggcgacaucuccgggaucaacgccagcguggugaacauccagaaggagaucgaccgccugaacgaggucgccaagaaccucaacgagucccugaucgaccugcaggagcucggcaaguacgagcaguacaucaaguggccgugguacaucuggcugggcuucaucgccgggcugaucgcgaucgugauggugaccaucaugcucugcugcaugaccagcugcugcuccugccugaagggcugcugcagcugcggguccugcugcaaguucgacgaggacgacagcgagcccguccugaagggcgugaagcuccacuacacgugaggacuagucccuguucccagagcccacuuuuuuuucuuuuuuugaaauaaaauagccugucuuucagaucuaaaaaaaaaaaaaaaaaaaaaaaaaaaaaaaaaaaaaaaaaaaaaaaaaaaaaaaaaaaaaaaaaaaaaaaaaaaaaaaaaaaaaaaaaaaaaaaaaaaa

SEQ ID NO: 24981 - RNA, 4158 nt, Artificial Sequence
  SARS-CoV-2/Wuhan/WIV05/2019__EPI_ISL_402128 spike protein mRNA gc (1-1273)(L18F_D80A_D215G_L242del_A243del_L244del_R246I_K417N_E484 K_N501Y_D614G_A701V)
aggagagggcgcuuggcuugcaaggacccugagcugcggcauugaagcacacccaacccaacucgacugaagucagccucacugaaccggaucugagaaucuucucucucugggcuugccagggcucuccgaaccuagcuagcauccucuucaauuccaacuagaaagcuuaccauguucguguuccugguccuccugccccuggugagcucccagugcgugaacuucaccacccgcacgcagcucccgcccgccuacaccaacagcuucacccggggcgucuacuaccccgacaagguguuccgcuccagcgugcugcacuccacccaggaccuguuccuccccuucuucagcaacgucacgugguuccacgccauccacguguccgggaccaacggcaccaagcgguucgcgaacccggugcugcccuucaacgacggggucuacuucgccagcaccgagaaguccaacaucauccgcggcuggaucuucgggacgacccuggacagcaagacccagucccuccugaucgugaacaacgccaccaacguggucaucaaggugugcgaguuccaguucugcaacgaccccuuccugggcguguacuaccacaagaacaacaagagcuggauggaguccgaguuccgggucuacagcuccgccaacaacugcacguucgaguacgugagccagcccuuccucauggaccuggagggcaagcaggggaacuucaagaaccugcgcgaguucguguucaagaacaucgacggcuacuucaagaucuacuccaagcacaccccgaucaaccucguccgggggcugccccagggcuucagcgcccuggagccccucguggaccugcccaucgggaucaacaucacccgcuuccagacccugcacaucuccuaccucacgccgggcgacagcagcuccggcuggaccgcgggggccgccgccuacuacgugggcuaccugcagccccggaccuuccugcucaaguacaacgagaacgggaccaucacggacgcggucgacugcgcccuggacccccugagcgagaccaagugcacccucaaguccuucaccguggagaagggcaucuaccagacgagcaacuuccgcgugcagcccaccgaguccaucguccgguucccgaacaucaccaaccugugccccuucggcgagguguucaacgccacccgcuucgccagcgucuacgccuggaaccggaagcgcaucuccaacugcguggcggacuacagcgugcuguacaacuccgccagcuucuccacguucaagugcuacggggucagccccaccaagcucaacgaccugugcuucaccaacguguacgccgacuccuucgugauccggggcgacgagguccgccagaucgcccccgggcagaccggcaacaucgccgacuacaacuacaagcugccggacgacuucacggggugcgugaucgcguggaacagcaacaaccucgacuccaaggugggcggcaacuacaacuaccuguaccggcuguuccgcaagagcaaccucaagcccuucgagcgggacaucuccaccgagaucuaccaggccgggagcacccccugcaacggcgucaagggguucaacugcuacuucccccugcaguccuacggcuuccagccgaccuacggggugggcuaccagcccuaccgcguggucgugcugagcuucgagcuccugcacgcccccgccacggugugcggccccaagaaguccaccaaccuggucaagaacaagugcgugaacuucaacuucaacgggcucaccggcaccggggugcugaccgagagcaacaagaaguuccugccguuccagcaguucggccgggacaucgccgacacgaccgacgcgguccgcgacccccagacccucgagauccuggacaucacccccugcagcuucgggggcguguccgugaucacgccgggcaccaacaccagcaaccaggucgccgugcuguaccagggggugaacugcaccgagguccccguggccauccacgccgaccagcugacgcccaccuggcgcguguacuccaccggcagcaacgucuuccagacccgggccgggugccucaucggcgcggagcacgugaacaacuccuacgagugcgacauccccaucggcgccgggaucugcgccagcuaccagacgcagaccaacuccccgcgccgggcccgcagcguggcgucccagagcaucaucgccuacaccaugucccugggcgucgagaacagcguggccuacuccaacaacagcaucgccauccccaccaacuucacgaucuccgugaccaccgagauccugcccgucagcaugaccaagacgagcguggacugcaccauguacaucugcggggacuccaccgagugcagcaaccuccugcugcaguacggcuccuucugcacccagcucaaccgggcccugacggggaucgcgguggagcaggacaagaacacccaggaggucuucgcccaggugaagcagaucuacaagacgcccccgaucaaggacuucggcggcuucaacuucagccagauccugcccgaccccuccaagcccagcaagcgcuccuucaucgaggaccuccuguucaacaaggugacccuggccgacgccggguucaucaagcaguacggcgacugccucggggacaucgccgcgcgggaccugaucugcgcccagaaguucaacggccugaccguccucccgccccugcugaccgacgagaugaucgcccaguacaccagcgcccuccuggccgggaccaucacguccggcuggaccuucggcgcgggggccgcccugcagauccccuucgccaugcagauggcguaccgcuucaacggcaucggggugacccagaacgugcucuacgagaaccagaagcugaucgccaaccaguucaacagcgccaucggcaagauccaggacucccugagcuccaccgccagcgcccucgggaagcugcaggacgucgugaaccagaacgcgcaggcccugaacacgcucgugaagcagcuguccagcaacuucggcgccaucuccagcguccugaacgacauccucucccggcuggacaagguggaggccgaggugcagaucgaccgccugaucaccggccggcuccagagccugcagaccuacgucacccagcagcugauccgcgccgcggagauccgggccagcgccaaccucgccgccaccaagauguccgagugcgugcuggggcagagcaagcgcguggacuucugcggcaagggguaccaccugauguccuucccccagagcgcgccgcacggcgucguguuccuccacgucacguacgugcccgcccaggagaagaacuucaccaccgcccccgccaucugccacgacgggaaggcgcacuucccccgggagggcguguucgucuccaacggcacccacugguucgugacgcagcgcaacuucuacgagccgcagaucaucaccaccgacaacaccuucgugagcgggaacugcgacgucgugaucggcaucgugaacaacacggucuacgacccccugcagcccgagcuggacuccuucaaggaggagcucgacaaguacuucaagaaccacaccagccccgacguggaccugggggacaucuccggcaucaacgccagcguggucaacauccagaaggagaucgaccggcugaacgagguggccaagaaccucaacgagucccugaucgaccugcaggagcucggcaaguacgagcaguacaucaaguggccgugguacaucuggcugggguucaucgccggccugaucgccaucgugauggucaccaucaugcucugcugcaugaccagcugcugcuccugccugaaggggugcugcagcugcggcuccugcugcaaguucgacgaggacgacagcgagcccgugcugaagggggugaagcuccacuacacgugaggacuagucccuguucccagagcccacuuuuuuuucuuuuuuugaaauaaaauagccugucuuucagaucuaaaaaaaaaaaaaaaaaaaaaaaaaaaaaaaaaaaaaaaaaaaaaaaaaaaaaaaaaaaaaaaaaaaaaaaaaaaaaaaaaaaaaaaaaaaaaaaaaaaa

SEQ ID NO: 24982 - RNA, 4167 nt, Artificial Sequence
  SARS-CoV-2/Wuhan/WIV05/2019__EPI_ISL_402128 spike protein mRNA gc (1-1273)(E484K_D614G)
aggagagggcgcuuggcuugcaaggacccugagcugcggcauugaagcacacccaacccaacucgacugaagucagccucacugaaccggaucugagaaucuucucucucugggcuugccagggcucuccgaaccuagcuagcauccucuucaauuccaacuagaaagcuuaccauguucguguuccugguccuccugccccuggugagcucccagugcgugaaccucaccacccgcacgcagcugccgcccgccuacaccaacagcuucacccggggcgucuacuaccccgacaagguguuccgcuccagcgugcugcacuccacccaggaccucuuccugcccuucuucagcaacgucacgugguuccacgccauccacguguccgggaccaacggcaccaagcgguucgacaacccggugcugcccuucaacgacggggucuacuucgcgagcaccgagaaguccaacaucauccgcggcuggaucuucgggacgacccucgacagcaagacccagucccugcugaucgugaacaacgccaccaacguggucaucaaggugugcgaguuccaguucugcaacgaccccuuccucggcguguacuaccacaagaacaacaagagcuggauggaguccgaguuccgggucuacagcuccgccaacaacugcacguucgaguacgugagccagcccuuccugauggaccuggagggcaagcaggggaacuucaagaaccuccgcgaguucguguucaagaacaucgacggcuacuucaagaucuacuccaagcacaccccgaucaaccugguccgggaccugccccagggguucagcgcccucgagccccugguggaccugcccaucggcaucaacaucacccgcuuccagacccuccuggcccugcaccgguccuaccucacgccgggggacagcagcuccggcuggaccgcgggcgccgccgccuacuacgugggguaccugcagccccgcaccuuccugcucaaguacaacgagaacggcaccaucacggacgcggucgacugcgcccuggacccccugagcgagaccaagugcacccucaaguccuucaccguggagaaggggaucuaccagacgagcaacuuccgggugcagcccaccgaguccaucguccgcuucccgaacaucaccaaccugugccccuucggcgagguguucaacgccacccgguucgccagcgucuacgccuggaaccgcaagcggaucuccaacugcguggcggacuacagcgugcuguacaacuccgccagcuucuccacguucaagugcuacggcgucagccccaccaagcucaacgaccugugcuucaccaacguguacgccgacuccuucgugauccgcggggacgagguccggcagaucgcccccggccagaccgggaagaucgccgacuacaacuacaagcugccggacgacuucacgggcugcgugaucgcguggaacagcaacaaccucgacuccaaggucgggggcaacuacaacuaccuguaccgccuguuccgcaagagcaaccucaagcccuucgagcgggacaucuccaccgagaucuaccaggccggcagcacccccugcaacggggugaagggcuucaacugcuacuucccccugcaguccuacggguuccagccgaccaacggcgugggguaccagcccuaccggguggucgugcugagcuucgagcuccugcacgcccccgccacggugugcggccccaagaaguccaccaaccuggucaagaacaagugcgugaacuucaacuucaacggccucaccgggaccggcgugcugaccgagagcaacaagaaguuccugccguuccagcaguucgggcgcgacaucgccgacacgaccgacgcgguccgcgacccccagacccuggagauccucgacaucacccccugcagcuucggcgggguguccgugaucacgccgggcaccaacaccagcaaccaggucgccgugcuguaccagggcgugaacugcaccgagguccccguggccauccacgccgaccagcugacgcccaccuggcggguguacuccaccgggagcaacgucuuccagacccgcgccggcugccucaucggggcggagcacgugaacaacuccuacgagugcgacauccccaucggcgccggcaucugcgccagcuaccagacgcagaccaacuccccgcggcgcgcccggagcguggcgucccagagcaucaucgccuacaccaugucccugggggccgagaacagcgucgccuacuccaacaacagcaucgccauccccaccaacuucacgaucuccgugaccaccgagauccugcccgugagcaugaccaagacgagcgucgacugcaccauguacaucugcggcgacuccaccgagugcagcaaccuccugcugcaguacggguccuucugcacccagcucaaccgcgcgcugacgggcaucgccguggagcaggacaagaacacccaggagguguucgcccaggucaagcagaucuacaagacgcccccgaucaaggacuucgggggcuucaacuucagccagauccugcccgaccccuccaagcccagcaagcgguccuucaucgaggaccuccuguucaacaaggugacccuggccgacgccggcuucaucaagcaguacggggacugccucggcgacaucgcggcccgcgaccugaucugcgcccagaaguucaacgggcugaccgugcucccgccccugcugaccgacgagaugaucgcccaguacaccagcgcccuccuggcgggcaccaucacguccggguggaccuucggcgccggcgccgcccugcagauccccuucgcgaugcagauggccuaccgguucaacgggaucggcgucacccagaacgugcucuacgagaaccagaagcugaucgccaaccaguucaacagcgccaucgggaagauccaggacucccugagcuccaccgccagcgcgcucggcaagcugcaggacguggucaaccagaacgcccaggcccugaacacgcucgugaagcagcuguccagcaacuucggggccaucuccagcgugcugaacgacauccucucccgccuggacaaggucgaggccgaggugcagaucgaccggcugaucaccggccgccuccagagccugcagaccuacgugacccagcagcugauccgggcggccgagauccgcgccagcgccaaccucgccgcgaccaagauguccgagugcguccugggccagagcaagcggguggacuucugcgggaagggcuaccaccugauguccuucccccagagcgccccgcacgggguggucuuccuccacgugacguacguccccgcccaggagaagaacuucaccaccgcccccgcgaucugccacgacggcaaggcccacuucccccgcgaggggguguucguguccaacggcacccacugguucgucacgcagcggaacuucuacgagccgcagaucaucaccaccgacaacaccuucgugagcggcaacugcgacguggucaucgggaucgugaacaacacgguguacgacccccugcagcccgagcuggacuccuucaaggaggagcucgacaaguacuucaagaaccacaccagccccgacgucgaccugggcgacaucuccgggaucaacgccagcguggugaacauccagaaggagaucgaccgccugaacgaggucgccaagaaccucaacgagucccugaucgaccugcaggagcucggcaaguacgagcaguacaucaaguggccgugguacaucuggcugggcuucaucgccgggcugaucgcgaucgugauggugaccaucaugcucugcugcaugaccagcugcugcuccugccugaagggcugcugcagcugcggguccugcugcaaguucgacgaggacgacagcgagcccguccugaagggcgugaagcuccacuacacgugaggacuagucccuguucccagagcccacuuuuuuuucuuuuuuugaaauaaaauagccugucuuucagaucuaaaaaaaaaaaaaaaaaaaaaaaaaaaaaaaaaaaaaaaaaaaaaaaaaaaaaaaaaaaaaaaaaaaaaaaaaaaaaaaaaaaaaaaaaaaaaaaaaaaa

SEQ ID NO: 24983 - RNA, 4167 nt, Artificial Sequence
  SARS-CoV-2/Wuhan/WIV05/2019__EPI_ISL_402128 spike protein mRNA gc (1-1273)(L18F_T20N_P26S_D138Y_R190S_K417T_E484K_N501Y_D614G_H655Y _T1027I)
aggagagggcgcuuggcuugcaaggacccugagcugcggcauugaagcacacccaacccaacucgacugaagucagccucacugaaccggaucugagaaucuucucucucugggcuugccagggcucuccgaaccuagcuagcauccucuucaauuccaacuagaaagcuuaccauguucguguuccugguccuccugccccuggugagcucccagugcgugaacuucaccaaccgcacccagcucccgagcgccuacacgaacuccuucacccggggcgucuacuaccccgacaagguguuccgcagcuccgugcugcacagcacccaggaccuguuccuccccuucuucuccaacgucaccugguuccacgccauccacgugagcgggacgaacggcaccaagcgguucgacaaccccgugcugccguucaacgacggggucuacuucgcguccaccgagaaguccaacaucauccgcggcuggaucuucgggaccacgcuggacuccaagacccagagccuccugaucgugaacaacgccaccaacguggucaucaaggugugcgaguuccaguucugcaacuaccccuuccugggcguguacuaccacaagaacaacaaguccuggauggagagcgaguuccgggucuacuccagcgccaacaacugcaccuucgaguacgugucccagcccuuccucauggaccuggagggcaagcaggggaacuucaagaaccugagcgaguucguguucaagaacaucgacggcuacuucaagaucuacuccaagcacacgcccaucaaccucguccgcgaccugccgcagggguucagcgcccuggagccccucguggaccugcccaucggcaucaacaucacccgguuccagacccugcucgcccugcaccgcagcuaccugacccccggggacuccagcuccggcuggacggcgggcgccgccgccuacuacgugggguaccuccagccgcggaccuuccugcugaaguacaacgagaacggcaccaucaccgacgcggucgacugcgcccucgacccccugagcgagacgaagugcacccugaaguccuucaccguggagaaggggaucuaccagaccagcaacuuccgcgugcagcccacggaguccaucguccgguuccccaacaucaccaaccucugcccguucggcgagguguucaacgccacccgcuucgccagcgucuacgccuggaaccggaagcgcaucuccaacugcguggcggacuacagcgugcuguacaacuccgccagcuucuccaccuucaagugcuacggcgucagccccacgaagcugaacgaccucugcuucaccaacguguacgccgacuccuucgugauccgcggggacgagguccggcagaucgcccccggccagaccgggaccaucgccgacuacaacuacaagcugcccgacgacuucacgggcugcgugaucgcguggaacagcaacaaccuggacuccaaggucgggggcaacuacaacuaccucuaccggcuguuccgcaagagcaaccugaagccguucgagcgggacaucuccaccgagaucuaccaggccggcagcacccccugcaacggggugaagggcuucaacugcuacuucccccuccagagcuacggguuccagcccaccuacggcgugggguaccagccguaccgcguggucgugcuguccuucgagcugcuccacgcccccgccacggugugcggccccaagaaguccaccaaccuggucaagaacaagugcgugaacuucaacuucaacggccugaccgggaccggcgugcucaccgagagcaacaagaaguuccugcccuuccagcaguucgggcgggacaucgccgacacgaccgacgcgguccgcgacccgcagacccuggagauccuggacaucacccccugcagcuucggcgggguguccgugaucacgcccggcaccaacaccagcaaccaggucgccgugcucuaccagggcgugaacugcaccgaggucccgguggccauccacgccgaccagcugacgcccaccuggcgcguguacuccaccgggagcaacgucuuccagacccgggccggcugccugaucggggcggaguacgugaacaacuccuacgagugcgacauccccaucggcgccggcaucugcgccagcuaccagacgcagaccaacagcccccgccgggcccgcagcguggcgucccagagcaucaucgccuacaccaugucccucggggccgagaacagcgucgccuacuccaacaacagcaucgccaucccgaccaacuucacgaucagcgugaccaccgagauccugcccguguccaugaccaagacgagcgucgacugcaccauguacaucugcggcgacuccaccgagugcagcaaccugcuccugcaguacggguccuucugcacccagcugaaccgggcgcucacgggcaucgccguggagcaggacaagaacacccaggagguguucgcccaggucaagcagaucuacaagaccccgcccaucaaggacuucgggggcuucaacuucagccagauccugcccgaccccuccaagcccagcaagcgcuccuucaucgaggaccuccuguucaacaaggugacccuggccgacgccggcuucaucaagcaguacggggacugccugggcgacaucgcggcccgggaccucaucugcgcccagaaguucaacgggcugacggugcugcccccgcuccugaccgacgagaugaucgcccaguacaccagcgcccugcucgcgggcaccaucacguccggguggaccuucggcgccggcgccgcccugcagauccccuucgcgaugcagauggccuaccgcuucaacgggaucggcgucacccagaacgugcuguacgagaaccagaagcucaucgccaaccaguucaacagcgccaucgggaagauccaggacucccugagcuccaccgccagcgcgcugggcaagcuccaggacguggucaaccagaacgcccaggcccugaacacgcuggugaagcagcucuccagcaacuucggggccaucuccagcgugcugaacgacauccugagccggcucgacaaggucgaggccgaggugcagaucgaccgccugaucaccggccggcugcagucccuccagaccuacgugacccagcagcugauccgcgcggccgagauccgggccagcgccaaccuggccgcgaucaagauguccgagugcguccucggccagagcaagcgcguggacuucugcgggaagggcuaccaccugauguccuucccccagagcgcgccccacgggguggucuuccugcacgugaccuacgucccggcccaggagaagaacuucacgaccgcccccgccaucugccacgacggcaaggcccacuucccccgggaggggguguucguguccaacggcacccacugguucgucacccagcgcaacuucuacgagccccagaucaucacgaccgacaacaccuucgugagcggcaacugcgacguggucaucgggaucgugaacaacaccguguacgacccgcuccagcccgagcuggacuccuucaaggaggagcuggacaaguacuucaagaaccacacgagccccgacgucgaccucggcgacaucuccgggaucaacgccagcguggugaacauccagaaggagaucgaccggcugaacgaggucgccaagaaccugaacgagucccucaucgaccugcaggagcugggcaaguacgagcaguacaucaaguggcccugguacaucuggcucggcuucaucgccgggcugaucgcgaucgugauggugaccaucaugcugugcugcaugaccagcugcugcuccugccucaagggcugcugcagcugcggguccugcugcaaguucgacgaggacgacagcgagccgguccugaagggcgugaagcugcacuacaccugaggacuagucccuguucccagagcccacuuuuuuuucuuuuuuugaaauaaaauagccugucuuucagaucuaaaaaaaaaaaaaaaaaaaaaaaaaaaaaaaaaaaaaaaaaaaaaaaaaaaaaaaaaaaaaaaaaaaaaaaaaaaaaaaaaaaaaaaaaaaaaaaaaaaa

SEQ ID NO: 24984 - RNA, 4167 nt, Artificial Sequence
  SARS-CoV-2/Wuhan/WIV05/2019__EPI_ISL_402128 spike protein mRNA gc (1-1273)(S13I_W152C_L452R_D614G)
aggagagggcgcuuggcuugcaaggacccugagcugcggcauugaagcacacccaacccaacucgacugaagucagccucacugaaccggaucugagaaucuucucucucugggcuugccagggcucuccgaaccuagcuagcauccucuucaauuccaacuagaaagcuuaccauguucguguuccugguccuccugccccuggugagcauccagugcgugaaccucaccacccgcacgcagcugccgcccgccuacaccaacuccuucacccggggcgucuacuaccccgacaagguguuccgcagcuccgugcugcacagcacccaggaccucuuccugcccuucuucuccaacgucacgugguuccacgccauccacgugagcgggaccaacggcaccaagcgguucgacaacccggugcugcccuucaacgacggggucuacuucgcguccaccgagaaguccaacaucauccgcggcuggaucuucgggacgacccucgacagcaagacccagagccugcugaucgugaacaacgccaccaacguggucaucaaggugugcgaguuccaguucugcaacgaccccuuccucggcguguacuaccacaagaacaacaaguccugcauggagagcgaguuccgggucuacuccagcgccaacaacugcacguucgaguacgugucccagcccuuccugauggaccuggagggcaagcaggggaacuucaagaaccuccgcgaguucguguucaagaacaucgacggcuacuucaagaucuacagcaagcacaccccgaucaaccugguccgggaccugccccagggguucuccgcccucgagccccugguggaccugcccaucggcaucaacaucacccgcuuccagacccuccuggcccugcaccggagcuaccucacgccgggggacuccagcagcggcuggaccgcgggcgccgccgccuacuacgugggguaccugcagccccgcaccuuccugcucaaguacaacgagaacggcaccaucacggacgcggucgacugcgcccuggacccccuguccgagaccaagugcacccucaagagcuucaccguggagaaggggaucuaccagacguccaacuuccgggugcagcccaccgagagcaucguccgcuucccgaacaucaccaaccugugccccuucggcgagguguucaacgccacccgguucgccuccgucuacgccuggaaccgcaagcggaucagcaacugcguggcggacuacuccgugcuguacaacagcgccuccuucagcacguucaagugcuacggcgucucccccaccaagcucaacgaccugugcuucaccaacguguacgccgacagcuucgugauccgcggggacgagguccggcagaucgcccccggccagaccgggaagaucgccgacuacaacuacaagcugccggacgacuucacgggcugcgugaucgcguggaacuccaacaaccucgacagcaaggucgggggcaacuacaacuaccgcuaccggcuguuccgcaaguccaaccugaagcccuucgagcgggacaucagcaccgagaucuaccaggccggcuccacccccugcaacgggguggagggcuucaacugcuacuucccccuccagagcuacggguuccagccgaccaacggcgugggguaccagcccuaccgcguggucgugcuguccuucgagcugcuccacgcccccgccacggugugcggccccaagaaguccaccaaccuggucaagaacaagugcgugaacuucaacuucaacggccugaccgggaccggcgugcucaccgagagcaacaagaaguuccugccguuccagcaguucgggcgcgacaucgccgacacgaccgacgcgguccgggacccccagacccuggagauccuggacaucacccccugcagcuucggcggggugagcgugaucacgccgggcaccaacaccuccaaccaggucgccgugcucuaccagggcgugaacugcaccgagguccccguggccauccacgccgaccagcugacgcccaccuggcgcguguacagcaccggguccaacgucuuccagacccgggccggcugccugaucggggcggagcacgugaacaacagcuacgagugcgacauccccaucggcgccggcaucugcgccuccuaccagacgcagaccaacagcccgcgccgggcccgcuccguggcgagccaguccaucaucgccuacaccaugagccucggggccgagaacuccgucgccuacagcaacaacuccaucgccauccccaccaacuucacgaucagcgugaccaccgagauccugcccguguccaugaccaagacgagcgucgacugcaccauguacaucugcggcgacagcaccgagugcuccaaccugcuccugcaguacgggagcuucugcacccagcugaaccgggcgcucacgggcaucgccguggagcaggacaagaacacccaggagguguucgcccaggucaagcagaucuacaagacgcccccgaucaaggacuucgggggcuucaacuucucccagauccugcccgaccccagcaagcccuccaagcgcagcuucaucgaggaccuccuguucaacaaggugacccuggccgacgccggcuucaucaagcaguacggggacugccugggcgacaucgcggcccgggaccucaucugcgcccagaaguucaacgggcugaccgugcugccgccccuccugaccgacgagaugaucgcccaguacaccuccgcccugcucgcgggcaccaucacgagcggguggaccuucggcgccggcgccgcccugcagauccccuucgcgaugcagauggccuaccgcuucaacgggaucggcgucacccagaacgugcuguacgagaaccagaagcucaucgccaaccaguucaacuccgccaucgggaagauccaggacagccuguccagcaccgccuccgcgcugggcaagcuccaggacguggucaaccagaacgcccaggcccugaacacgcuggugaagcagcucagcuccaacuucggggccaucagcuccgugcugaacgacauccugagccggcucgacaaggucgaggccgaggugcagaucgaccgccugaucaccggccggcugcagucccuccagaccuacgugacccagcagcugauccgcgcggccgagauccgggccagcgccaaccuggccgcgaccaagaugagcgagugcguccucggccaguccaagcgcguggacuucugcgggaagggcuaccaccugaugagcuucccccaguccgccccgcacgggguggucuuccugcacgugacguacguccccgcccaggagaagaacuucaccaccgcccccgcgaucugccacgacggcaaggcccacuucccccgggaggggguguucgugagcaacggcacccacugguucgucacgcagcgcaacuucuacgagccgcagaucaucaccaccgacaacaccuucguguccggcaacugcgacguggucaucgggaucgugaacaacacgguguacgacccccuccagcccgagcuggacagcuucaaggaggagcuggacaaguacuucaagaaccacaccucccccgacgucgaccucggcgacaucagcgggaucaacgccuccguggugaacauccagaaggagaucgaccggcugaacgaggucgccaagaaccugaacgagagccucaucgaccugcaggagcugggcaaguacgagcaguacaucaaguggccgugguacaucuggcucggcuucaucgccgggcugaucgcgaucgugauggugaccaucaugcugugcugcaugaccuccugcugcagcugccucaagggcugcugcuccugcgggagcugcugcaaguucgacgaggacgacuccgagcccguccugaagggcgugaagcugcacuacacgugaggacuagucccuguucccagagcccacuuuuuuuucuuuuuuugaaauaaaauagccugucuuucagaucuaaaaaaaaaaaaaaaaaaaaaaaaaaaaaaaaaaaaaaaaaaaaaaaaaaaaaaaaaaaaaaaaaaaaaaaaaaaaaaaaaaaaaaaaaaaaaaaaaaaa

SEQ ID NO: 24985 - RNA, 4167 nt, Artificial Sequence
  SARS-CoV-2/Wuhan/WIV05/2019__EPI_ISL_402128 spike protein mRNA gc (1-1273)
aggagagggcgcuuggcuugcaaggacccugagcugcggcauugaagcacacccaacccaacucgacugaagucagccucacugaaccggaucugagaaucuucucucucugggcuugccagggcucuccgaaccuagcuagcauccucuucaauuccaacuagaaagcuuaccauguucguguuccuggugcugcugccccuggugagcagccagugcgugaaccugaccacccggacccagcugccaccagccuacaccaacagcuucacccggggcgucuacuaccccgacaagguguuccggagcagcguccugcacagcacccaggaccuguuccugcccuucuucagcaacgugaccugguuccacgccauccacgugagcggcaccaacggcaccaagcgguucgacaaccccgugcugcccuucaacgacggcguguacuucgccagcaccgagaagagcaacaucauccggggcuggaucuucggcaccacccuggacagcaagacccagagccugcugaucgugaauaacgccaccaacguggugaucaaggugugcgaguuccaguucugcaacgaccccuuccugggcguguacuaccacaagaacaacaagagcuggauggagagcgaguuccggguguacagcagcgccaacaacugcaccuucgaguacgugagccagcccuuccugauggaccuggagggcaagcagggcaacuucaagaaccugcgggaguucguguucaagaacaucgacggcuacuucaagaucuacagcaagcacaccccaaucaaccuggugcgggaucugccccagggcuucucagcccuggagccccugguggaccugcccaucggcaucaacaucacccgguuccagacccugcuggcccugcaccggagcuaccugaccccaggcgacagcagcagcggguggacagcaggcgcggcugcuuacuacgugggcuaccugcagccccggaccuuccugcugaaguacaacgagaacggcaccaucaccgacgccguggacugcgcccuggacccucugagcgagaccaagugcacccugaagagcuucaccguggagaagggcaucuaccagaccagcaacuuccgggugcagcccaccgagagcaucgugcgguuccccaacaucaccaaccugugccccuucggcgagguguucaacgccacccgguucgccagcguguacgccuggaaccggaagcggaucagcaacugcguggccgacuacagcgugcuguacaacagcgccagcuucagcaccuucaagugcuacggcgugagccccaccaagcugaacgaccugugcuucaccaacguguacgccgacagcuucgugauccguggcgacgaggugcggcagaucgcacccggccagacaggcaagaucgccgacuacaacuacaagcugcccgacgacuucaccggcugcgugaucgccuggaacagcaacaaccucgacagcaaggugggcggcaacuacaacuaccuguaccggcuguuccggaagagcaaccugaagcccuucgagcgggacaucagcaccgagaucuaccaagccggcuccaccccuugcaacggcguggagggcuucaacugcuacuucccucugcagagcuacggcuuccagcccaccaacggcgugggcuaccagcccuaccgggugguggugcugagcuucgagcugcugcacgccccagccaccguguguggccccaagaagagcaccaaccuggugaagaacaagugcgugaacuucaacuucaacggccuuaccggcaccggcgugcugaccgagagcaacaagaaauuccugcccuuucagcaguucggccgggacaucgccgacaccaccgacgcugugcgggauccccagacccuggagauccuggacaucaccccuugcagcuucggcggcgugagcgugaucaccccaggcaccaacaccagcaaccagguggccgugcuguaccaggacgugaacugcaccgaggugcccguggccauccacgccgaccagcugacacccaccuggcgggucuacagcaccggcagcaacguguuccagacccgggccgguugccugaucggcgccgagcacgugaacaacagcuacgagugcgacauccccaucggcgccggcaucugugccagcuaccagacccagaccaauucaccccggagggcaaggagcguggccagccagagcaucaucgccuacaccaugagccugggcgccgagaacagcguggccuacagcaacaacagcaucgccauccccaccaacuucaccaucagcgugaccaccgagauucugcccgugagcaugaccaagaccagcguggacugcaccauguacaucugcggcgacagcaccgagugcagcaaccugcugcugcaguacggcagcuucugcacccagcugaaccgggcccugaccggcaucgccguggagcaggacaagaacacccaggagguguucgcccaggugaagcagaucuacaagaccccucccaucaaggacuucggcggcuucaacuucagccagauccugcccgaccccagcaagcccagcaagcggagcuucaucgaggaccugcuguucaacaaggugacccuagccgacgccggcuucaucaagcaguacggcgacugccucggcgacauagccgcccgggaccugaucugcgcccagaaguucaacggccugaccgugcugccuccccugcugaccgacgagaugaucgcccaguacaccagcgcccuguuagccggaaccaucaccagcggcuggacuuucggcgcuggagccgcucugcagauccccuucgccaugcagauggccuaccgguucaacggcaucggcgugacccagaacgugcuguacgagaaccagaagcugaucgccaaccaguucaacagcgccaucggcaagauccaggacagccugagcagcaccgcuagcgcccugggcaagcugcaggacguggugaaccagaacgcccaggcccugaacacccuggugaagcagcugagcagcaacuucggcgccaucagcagcgugcugaacgacauccugagccggcuggacaaggucgaggccgaggugcagaucgaccggcugaucacuggccggcugcagagccugcagaccuacgugacccagcagcugauccgggccgccgagauucgggccagcgccaaccuggccgccaccaagaugagcgagugcgugcugggccagagcaagcggguggacuucugcggcaagggcuaccaccugaugagcuuuccccagagcgcaccccacggagugguguuccugcacgugaccuacgugcccgcccaggagaagaacuucaccaccgccccagccaucugccacgacggcaaggcccacuuuccccgggagggcguguucgugagcaacggcacccacugguucgugacccagcggaacuucuacgagccccagaucaucaccaccgacaacaccuucgugagcggcaacugcgacguggugaucggcaucgugaacaacaccguguacgauccccugcagcccgagcuggacagcuucaaggaggagcuggacaaguacuucaagaaucacaccagccccgacguggaccugggcgacaucagcggcaucaacgccagcguggugaacauccagaaggagaucgaucggcugaacgagguggccaagaaccugaacgagagccugaucgaccugcaggagcugggcaaguacgagcaguacaucaaguggcccugguacaucuggcugggcuucaucgccggccugaucgccaucgugauggugaccaucaugcugugcugcaugaccagcugcugcagcugccugaagggcuguugcagcugcggcagcugcugcaaguucgacgaggacgacagcgagcccgugcugaagggcgugaagcugcacuacaccugaggacuagucccuguucccagagcccacuuuuuuuucuuuuuuugaaauaaaauagccugucuuucagaucuaaaaaaaaaaaaaaaaaaaaaaaaaaaaaaaaaaaaaaaaaaaaaaaaaaaaaaaaaaaaaaaaaaaaaaaaaaaaaaaaaaaaaaaaaaaaaaaaaaaa

SEQ ID NO: 24986 - RNA, 4167 nt, Artificial Sequence
  SARS-CoV-2/Wuhan/WIV05/2019__EPI_ISL_402128 spike protein mRNA gc (1-1273)(D614G)
aggagagggcgcuuggcuugcaaggacccugagcugcggcauugaagcacacccaacccaacucgacugaagucagccucacugaaccggaucugagaaucuucucucucugggcuugccagggcucuccgaaccuagcuagcauccucuucaauuccaacuagaaagcuuaccauguucguguuccuggugcugcugccccuggugagcagccagugcgugaaccugaccacccggacccagcugccaccagccuacaccaacagcuucacccggggcgucuacuaccccgacaagguguuccggagcagcguccugcacagcacccaggaccuguuccugcccuucuucagcaacgugaccugguuccacgccauccacgugagcggcaccaacggcaccaagcgguucgacaaccccgugcugcccuucaacgacggcguguacuucgccagcaccgagaagagcaacaucauccggggcuggaucuucggcaccacccuggacagcaagacccagagccugcugaucgugaauaacgccaccaacguggugaucaaggugugcgaguuccaguucugcaacgaccccuuccugggcguguacuaccacaagaacaacaagagcuggauggagagcgaguuccggguguacagcagcgccaacaacugcaccuucgaguacgugagccagcccuuccugauggaccuggagggcaagcagggcaacuucaagaaccugcgggaguucguguucaagaacaucgacggcuacuucaagaucuacagcaagcacaccccaaucaaccuggugcgggaucugccccagggcuucucagcccuggagccccugguggaccugcccaucggcaucaacaucacccgguuccagacccugcuggcccugcaccggagcuaccugaccccaggcgacagcagcagcggguggacagcaggcgcggcugcuuacuacgugggcuaccugcagccccggaccuuccugcugaaguacaacgagaacggcaccaucaccgacgccguggacugcgcccuggacccucugagcgagaccaagugcacccugaagagcuucaccguggagaagggcaucuaccagaccagcaacuuccgggugcagcccaccgagagcaucgugcgguuccccaacaucaccaaccugugccccuucggcgagguguucaacgccacccgguucgccagcguguacgccuggaaccggaagcggaucagcaacugcguggccgacuacagcgugcuguacaacagcgccagcuucagcaccuucaagugcuacggcgugagccccaccaagcugaacgaccugugcuucaccaacguguacgccgacagcuucgugauccguggcgacgaggugcggcagaucgcacccggccagacaggcaagaucgccgacuacaacuacaagcugcccgacgacuucaccggcugcgugaucgccuggaacagcaacaaccucgacagcaaggugggcggcaacuacaacuaccuguaccggcuguuccggaagagcaaccugaagcccuucgagcgggacaucagcaccgagaucuaccaagccggcuccaccccuugcaacggcguggagggcuucaacugcuacuucccucugcagagcuacggcuuccagcccaccaacggcgugggcuaccagcccuaccgggugguggugcugagcuucgagcugcugcacgccccagccaccguguguggccccaagaagagcaccaaccuggugaagaacaagugcgugaacuucaacuucaacggccuuaccggcaccggcgugcugaccgagagcaacaagaaauuccugcccuuucagcaguucggccgggacaucgccgacaccaccgacgcugugcgggauccccagacccuggagauccuggacaucaccccuugcagcuucggcggcgugagcgugaucaccccaggcaccaacaccagcaaccagguggccgugcuguaccagggcgugaacugcaccgaggugcccguggccauccacgccgaccagcugacacccaccuggcgggucuacagcaccggcagcaacguguuccagacccgggccgguugccugaucggcgccgagcacgugaacaacagcuacgagugcgacauccccaucggcgccggcaucugugccagcuaccagacccagaccaauucaccccggagggcaaggagcguggccagccagagcaucaucgccuacaccaugagccugggcgccgagaacagcguggccuacagcaacaacagcaucgccauccccaccaacuucaccaucagcgugaccaccgagauucugcccgugagcaugaccaagaccagcguggacugcaccauguacaucugcggcgacagcaccgagugcagcaaccugcugcugcaguacggcagcuucugcacccagcugaaccgggcccugaccggcaucgccguggagcaggacaagaacacccaggagguguucgcccaggugaagcagaucuacaagaccccucccaucaaggacuucggcggcuucaacuucagccagauccugcccgaccccagcaagcccagcaagcggagcuucaucgaggaccugcuguucaacaaggugacccuagccgacgccggcuucaucaagcaguacggcgacugccucggcgacauagccgcccgggaccugaucugcgcccagaaguucaacggccugaccgugcugccuccccugcugaccgacgagaugaucgcccaguacaccagcgcccuguuagccggaaccaucaccagcggcuggacuuucggcgcuggagccgcucugcagauccccuucgccaugcagauggccuaccgguucaacggcaucggcgugacccagaacgugcuguacgagaaccagaagcugaucgccaaccaguucaacagcgccaucggcaagauccaggacagccugagcagcaccgcuagcgcccugggcaagcugcaggacguggugaaccagaacgcccaggcccugaacacccuggugaagcagcugagcagcaacuucggcgccaucagcagcgugcugaacgacauccugagccggcuggacaaggucgaggccgaggugcagaucgaccggcugaucacuggccggcugcagagccugcagaccuacgugacccagcagcugauccgggccgccgagauucgggccagcgccaaccuggccgccaccaagaugagcgagugcgugcugggccagagcaagcggguggacuucugcggcaagggcuaccaccugaugagcuuuccccagagcgcaccccacggagugguguuccugcacgugaccuacgugcccgcccaggagaagaacuucaccaccgccccagccaucugccacgacggcaaggcccacuuuccccgggagggcguguucgugagcaacggcacccacugguucgugacccagcggaacuucuacgagccccagaucaucaccaccgacaacaccuucgugagcggcaacugcgacguggugaucggcaucgugaacaacaccguguacgauccccugcagcccgagcuggacagcuucaaggaggagcuggacaaguacuucaagaaucacaccagccccgacguggaccugggcgacaucagcggcaucaacgccagcguggugaacauccagaaggagaucgaucggcugaacgagguggccaagaaccugaacgagagccugaucgaccugcaggagcugggcaaguacgagcaguacaucaaguggcccugguacaucuggcugggcuucaucgccggccugaucgccaucgugauggugaccaucaugcugugcugcaugaccagcugcugcagcugccugaagggcuguugcagcugcggcagcugcugcaaguucgacgaggacgacagcgagcccgugcugaagggcgugaagcugcacuacaccugaggacuagucccuguucccagagcccacuuuuuuuucuuuuuuugaaauaaaauagccugucuuucagaucuaaaaaaaaaaaaaaaaaaaaaaaaaaaaaaaaaaaaaaaaaaaaaaaaaaaaaaaaaaaaaaaaaaaaaaaaaaaaaaaaaaaaaaaaaaaaaaaaaaaa

SEQ ID NO: 24987 - RNA, 4167 nt, Artificial Sequence
  SARS-CoV-2/Wuhan/WIV05/2019__EPI_ISL_402128 spike protein mRNA gc (1-1273)(A222V_D614G)
aggagagggcgcuuggcuugcaaggacccugagcugcggcauugaagcacacccaacccaacucgacugaagucagccucacugaaccggaucugagaaucuucucucucugggcuugccagggcucuccgaaccuagcuagcauccucuucaauuccaacuagaaagcuuaccauguucguguuccuggugcugcugccccuggugagcagccagugcgugaaccugaccacccggacccagcugccaccagccuacaccaacagcuucacccggggcgucuacuaccccgacaagguguuccggagcagcguccugcacagcacccaggaccuguuccugcccuucuucagcaacgugaccugguuccacgccauccacgugagcggcaccaacggcaccaagcgguucgacaaccccgugcugcccuucaacgacggcguguacuucgccagcaccgagaagagcaacaucauccggggcuggaucuucggcaccacccuggacagcaagacccagagccugcugaucgugaauaacgccaccaacguggugaucaaggugugcgaguuccaguucugcaacgaccccuuccugggcguguacuaccacaagaacaacaagagcuggauggagagcgaguuccggguguacagcagcgccaacaacugcaccuucgaguacgugagccagcccuuccugauggaccuggagggcaagcagggcaacuucaagaaccugcgggaguucguguucaagaacaucgacggcuacuucaagaucuacagcaagcacaccccaaucaaccuggugcgggaucugccccagggcuucucagugcuggagccccugguggaccugcccaucggcaucaacaucacccgguuccagacccugcuggcccugcaccggagcuaccugaccccaggcgacagcagcagcggguggacagcaggcgcggcugcuuacuacgugggcuaccugcagccccggaccuuccugcugaaguacaacgagaacggcaccaucaccgacgccguggacugcgcccuggacccucugagcgagaccaagugcacccugaagagcuucaccguggagaagggcaucuaccagaccagcaacuuccgggugcagcccaccgagagcaucgugcgguuccccaacaucaccaaccugugccccuucggcgagguguucaacgccacccgguucgccagcguguacgccuggaaccggaagcggaucagcaacugcguggccgacuacagcgugcuguacaacagcgccagcuucagcaccuucaagugcuacggcgugagccccaccaagcugaacgaccugugcuucaccaacguguacgccgacagcuucgugauccguggcgacgaggugcggcagaucgcacccggccagacaggcaagaucgccgacuacaacuacaagcugcccgacgacuucaccggcugcgugaucgccuggaacagcaacaaccucgacagcaaggugggcggcaacuacaacuaccuguaccggcuguuccggaagagcaaccugaagcccuucgagcgggacaucagcaccgagaucuaccaagccggcuccaccccuugcaacggcguggagggcuucaacugcuacuucccucugcagagcuacggcuuccagcccaccaacggcgugggcuaccagcccuaccgggugguggugcugagcuucgagcugcugcacgccccagccaccguguguggccccaagaagagcaccaaccuggugaagaacaagugcgugaacuucaacuucaacggccuuaccggcaccggcgugcugaccgagagcaacaagaaauuccugcccuuucagcaguucggccgggacaucgccgacaccaccgacgcugugcgggauccccagacccuggagauccuggacaucaccccuugcagcuucggcggcgugagcgugaucaccccaggcaccaacaccagcaaccagguggccgugcuguaccagggcgugaacugcaccgaggugcccguggccauccacgccgaccagcugacacccaccuggcgggucuacagcaccggcagcaacguguuccagacccgggccgguugccugaucggcgccgagcacgugaacaacagcuacgagugcgacauccccaucggcgccggcaucugugccagcuaccagacccagaccaauucaccccggagggcaaggagcguggccagccagagcaucaucgccuacaccaugagccugggcgccgagaacagcguggccuacagcaacaacagcaucgccauccccaccaacuucaccaucagcgugaccaccgagauucugcccgugagcaugaccaagaccagcguggacugcaccauguacaucugcggcgacagcaccgagugcagcaaccugcugcugcaguacggcagcuucugcacccagcugaaccgggcccugaccggcaucgccguggagcaggacaagaacacccaggagguguucgcccaggugaagcagaucuacaagaccccucccaucaaggacuucggcggcuucaacuucagccagauccugcccgaccccagcaagcccagcaagcggagcuucaucgaggaccugcuguucaacaaggugacccuagccgacgccggcuucaucaagcaguacggcgacugccucggcgacauagccgcccgggaccugaucugcgcccagaaguucaacggccugaccgugcugccuccccugcugaccgacgagaugaucgcccaguacaccagcgcccuguuagccggaaccaucaccagcggcuggacuuucggcgcuggagccgcucugcagauccccuucgccaugcagauggccuaccgguucaacggcaucggcgugacccagaacgugcuguacgagaaccagaagcugaucgccaaccaguucaacagcgccaucggcaagauccaggacagccugagcagcaccgcuagcgcccugggcaagcugcaggacguggugaaccagaacgcccaggcccugaacacccuggugaagcagcugagcagcaacuucggcgccaucagcagcgugcugaacgacauccugagccggcuggacaaggucgaggccgaggugcagaucgaccggcugaucacuggccggcugcagagccugcagaccuacgugacccagcagcugauccgggccgccgagauucgggccagcgccaaccuggccgccaccaagaugagcgagugcgugcugggccagagcaagcggguggacuucugcggcaagggcuaccaccugaugagcuuuccccagagcgcaccccacggagugguguuccugcacgugaccuacgugcccgcccaggagaagaacuucaccaccgccccagccaucugccacgacggcaaggcccacuuuccccgggagggcguguucgugagcaacggcacccacugguucgugacccagcggaacuucuacgagccccagaucaucaccaccgacaacaccuucgugagcggcaacugcgacguggugaucggcaucgugaacaacaccguguacgauccccugcagcccgagcuggacagcuucaaggaggagcuggacaaguacuucaagaaucacaccagccccgacguggaccugggcgacaucagcggcaucaacgccagcguggugaacauccagaaggagaucgaucggcugaacgagguggccaagaaccugaacgagagccugaucgaccugcaggagcugggcaaguacgagcaguacaucaaguggcccugguacaucuggcugggcuucaucgccggccugaucgccaucgugauggugaccaucaugcugugcugcaugaccagcugcugcagcugccugaagggcuguugcagcugcggcagcugcugcaaguucgacgaggacgacagcgagcccgugcugaagggcgugaagcugcacuacaccugaggacuagucccuguucccagagcccacuuuuuuuucuuuuuuugaaauaaaauagccugucuuucagaucuaaaaaaaaaaaaaaaaaaaaaaaaaaaaaaaaaaaaaaaaaaaaaaaaaaaaaaaaaaaaaaaaaaaaaaaaaaaaaaaaaaaaaaaaaaaaaaaaaaaa

SEQ ID NO: 24988 - RNA, 4167 nt, Artificial Sequence
  SARS-CoV-2/Wuhan/WIV05/2019__EPI_ISL_402128 spike protein mRNA gc (1-1273)(N439K_D614G)
aggagagggcgcuuggcuugcaaggacccugagcugcggcauugaagcacacccaacccaacucgacugaagucagccucacugaaccggaucugagaaucuucucucucugggcuugccagggcucuccgaaccuagcuagcauccucuucaauuccaacuagaaagcuuaccauguucguguuccuggugcugcugccccuggugagcagccagugcgugaaccugaccacccggacccagcugccaccagccuacaccaacagcuucacccggggcgucuacuaccccgacaagguguuccggagcagcguccugcacagcacccaggaccuguuccugcccuucuucagcaacgugaccugguuccacgccauccacgugagcggcaccaacggcaccaagcgguucgacaaccccgugcugcccuucaacgacggcguguacuucgccagcaccgagaagagcaacaucauccggggcuggaucuucggcaccacccuggacagcaagacccagagccugcugaucgugaauaacgccaccaacguggugaucaaggugugcgaguuccaguucugcaacgaccccuuccugggcguguacuaccacaagaacaacaagagcuggauggagagcgaguuccggguguacagcagcgccaacaacugcaccuucgaguacgugagccagcccuuccugauggaccuggagggcaagcagggcaacuucaagaaccugcgggaguucguguucaagaacaucgacggcuacuucaagaucuacagcaagcacaccccaaucaaccuggugcgggaucugccccagggcuucucagcccuggagccccugguggaccugcccaucggcaucaacaucacccgguuccagacccugcuggcccugcaccggagcuaccugaccccaggcgacagcagcagcggguggacagcaggcgcggcugcuuacuacgugggcuaccugcagccccggaccuuccugcugaaguacaacgagaacggcaccaucaccgacgccguggacugcgcccuggacccucugagcgagaccaagugcacccugaagagcuucaccguggagaagggcaucuaccagaccagcaacuuccgggugcagcccaccgagagcaucgugcgguuccccaacaucaccaaccugugccccuucggcgagguguucaacgccacccgguucgccagcguguacgccuggaaccggaagcggaucagcaacugcguggccgacuacagcgugcuguacaacagcgccagcuucagcaccuucaagugcuacggcgugagccccaccaagcugaacgaccugugcuucaccaacguguacgccgacagcuucgugauccguggcgacgaggugcggcagaucgcacccggccagacaggcaagaucgccgacuacaacuacaagcugcccgacgacuucaccggcugcgugaucgccuggaacagcaagaaccucgacagcaaggugggcggcaacuacaacuaccuguaccggcuguuccggaagagcaaccugaagcccuucgagcgggacaucagcaccgagaucuaccaagccggcuccaccccuugcaacggcguggagggcuucaacugcuacuucccucugcagagcuacggcuuccagcccaccaacggcgugggcuaccagcccuaccgggugguggugcugagcuucgagcugcugcacgccccagccaccguguguggccccaagaagagcaccaaccuggugaagaacaagugcgugaacuucaacuucaacggccuuaccggcaccggcgugcugaccgagagcaacaagaaauuccugcccuuucagcaguucggccgggacaucgccgacaccaccgacgcugugcgggauccccagacccuggagauccuggacaucaccccuugcagcuucggcggcgugagcgugaucaccccaggcaccaacaccagcaaccagguggccgugcuguaccagggcgugaacugcaccgaggugcccguggccauccacgccgaccagcugacacccaccuggcgggucuacagcaccggcagcaacguguuccagacccgggccgguugccugaucggcgccgagcacgugaacaacagcuacgagugcgacauccccaucggcgccggcaucugugccagcuaccagacccagaccaauucaccccggagggcaaggagcguggccagccagagcaucaucgccuacaccaugagccugggcgccgagaacagcguggccuacagcaacaacagcaucgccauccccaccaacuucaccaucagcgugaccaccgagauucugcccgugagcaugaccaagaccagcguggacugcaccauguacaucugcggcgacagcaccgagugcagcaaccugcugcugcaguacggcagcuucugcacccagcugaaccgggcccugaccggcaucgccguggagcaggacaagaacacccaggagguguucgcccaggugaagcagaucuacaagaccccucccaucaaggacuucggcggcuucaacuucagccagauccugcccgaccccagcaagcccagcaagcggagcuucaucgaggaccugcuguucaacaaggugacccuagccgacgccggcuucaucaagcaguacggcgacugccucggcgacauagccgcccgggaccugaucugcgcccagaaguucaacggccugaccgugcugccuccccugcugaccgacgagaugaucgcccaguacaccagcgcccuguuagccggaaccaucaccagcggcuggacuuucggcgcuggagccgcucugcagauccccuucgccaugcagauggccuaccgguucaacggcaucggcgugacccagaacgugcuguacgagaaccagaagcugaucgccaaccaguucaacagcgccaucggcaagauccaggacagccugagcagcaccgcuagcgcccugggcaagcugcaggacguggugaaccagaacgcccaggcccugaacacccuggugaagcagcugagcagcaacuucggcgccaucagcagcgugcugaacgacauccugagccggcuggacaaggucgaggccgaggugcagaucgaccggcugaucacuggccggcugcagagccugcagaccuacgugacccagcagcugauccgggccgccgagauucgggccagcgccaaccuggccgccaccaagaugagcgagugcgugcugggccagagcaagcggguggacuucugcggcaagggcuaccaccugaugagcuuuccccagagcgcaccccacggagugguguuccugcacgugaccuacgugcccgcccaggagaagaacuucaccaccgccccagccaucugccacgacggcaaggcccacuuuccccgggagggcguguucgugagcaacggcacccacugguucgugacccagcggaacuucuacgagccccagaucaucaccaccgacaacaccuucgugagcggcaacugcgacguggugaucggcaucgugaacaacaccguguacgauccccugcagcccgagcuggacagcuucaaggaggagcuggacaaguacuucaagaaucacaccagccccgacguggaccugggcgacaucagcggcaucaacgccagcguggugaacauccagaaggagaucgaucggcugaacgagguggccaagaaccugaacgagagccugaucgaccugcaggagcugggcaaguacgagcaguacaucaaguggcccugguacaucuggcugggcuucaucgccggccugaucgccaucgugauggugaccaucaugcugugcugcaugaccagcugcugcagcugccugaagggcuguugcagcugcggcagcugcugcaaguucgacgaggacgacagcgagcccgugcugaagggcgugaagcugcacuacaccugaggacuagucccuguucccagagcccacuuuuuuuucuuuuuuugaaauaaaauagccugucuuucagaucuaaaaaaaaaaaaaaaaaaaaaaaaaaaaaaaaaaaaaaaaaaaaaaaaaaaaaaaaaaaaaaaaaaaaaaaaaaaaaaaaaaaaaaaaaaaaaaaaaaaa

SEQ ID NO: 24989 - RNA, 4167 nt, Artificial Sequence
  SARS-CoV-2/Wuhan/WIV05/2019__EPI_ISL_402128 spike protein mRNA gc (1-1273)(S477N_D614G)
aggagagggcgcuuggcuugcaaggacccugagcugcggcauugaagcacacccaacccaacucgacugaagucagccucacugaaccggaucugagaaucuucucucucugggcuugccagggcucuccgaaccuagcuagcauccucuucaauuccaacuagaaagcuuaccauguucguguuccuggugcugcugccccuggugagcagccagugcgugaaccugaccacccggacccagcugccaccagccuacaccaacagcuucacccggggcgucuacuaccccgacaagguguuccggagcagcguccugcacagcacccaggaccuguuccugcccuucuucagcaacgugaccugguuccacgccauccacgugagcggcaccaacggcaccaagcgguucgacaaccccgugcugcccuucaacgacggcguguacuucgccagcaccgagaagagcaacaucauccggggcuggaucuucggcaccacccuggacagcaagacccagagccugcugaucgugaauaacgccaccaacguggugaucaaggugugcgaguuccaguucugcaacgaccccuuccugggcguguacuaccacaagaacaacaagagcuggauggagagcgaguuccggguguacagcagcgccaacaacugcaccuucgaguacgugagccagcccuuccugauggaccuggagggcaagcagggcaacuucaagaaccugcgggaguucguguucaagaacaucgacggcuacuucaagaucuacagcaagcacaccccaaucaaccuggugcgggaucugccccagggcuucucagcccuggagccccugguggaccugcccaucggcaucaacaucacccgguuccagacccugcuggcccugcaccggagcuaccugaccccaggcgacagcagcagcggguggacagcaggcgcggcugcuuacuacgugggcuaccugcagccccggaccuuccugcugaaguacaacgagaacggcaccaucaccgacgccguggacugcgcccuggacccucugagcgagaccaagugcacccugaagagcuucaccguggagaagggcaucuaccagaccagcaacuuccgggugcagcccaccgagagcaucgugcgguuccccaacaucaccaaccugugccccuucggcgagguguucaacgccacccgguucgccagcguguacgccuggaaccggaagcggaucagcaacugcguggccgacuacagcgugcuguacaacagcgccagcuucagcaccuucaagugcuacggcgugagccccaccaagcugaacgaccugugcuucaccaacguguacgccgacagcuucgugauccguggcgacgaggugcggcagaucgcacccggccagacaggcaagaucgccgacuacaacuacaagcugcccgacgacuucaccggcugcgugaucgccuggaacagcaacaaccucgacagcaaggugggcggcaacuacaacuaccuguaccggcuguuccggaagagcaaccugaagcccuucgagcgggacaucagcaccgagaucuaccaagccggcaacaccccuugcaacggcguggagggcuucaacugcuacuucccucugcagagcuacggcuuccagcccaccaacggcgugggcuaccagcccuaccgggugguggugcugagcuucgagcugcugcacgccccagccaccguguguggccccaagaagagcaccaaccuggugaagaacaagugcgugaacuucaacuucaacggccuuaccggcaccggcgugcugaccgagagcaacaagaaauuccugcccuuucagcaguucggccgggacaucgccgacaccaccgacgcugugcgggauccccagacccuggagauccuggacaucaccccuugcagcuucggcggcgugagcgugaucaccccaggcaccaacaccagcaaccagguggccgugcuguaccagggcgugaacugcaccgaggugcccguggccauccacgccgaccagcugacacccaccuggcgggucuacagcaccggcagcaacguguuccagacccgggccgguugccugaucggcgccgagcacgugaacaacagcuacgagugcgacauccccaucggcgccggcaucugugccagcuaccagacccagaccaauucaccccggagggcaaggagcguggccagccagagcaucaucgccuacaccaugagccugggcgccgagaacagcguggccuacagcaacaacagcaucgccauccccaccaacuucaccaucagcgugaccaccgagauucugcccgugagcaugaccaagaccagcguggacugcaccauguacaucugcggcgacagcaccgagugcagcaaccugcugcugcaguacggcagcuucugcacccagcugaaccgggcccugaccggcaucgccguggagcaggacaagaacacccaggagguguucgcccaggugaagcagaucuacaagaccccucccaucaaggacuucggcggcuucaacuucagccagauccugcccgaccccagcaagcccagcaagcggagcuucaucgaggaccugcuguucaacaaggugacccuagccgacgccggcuucaucaagcaguacggcgacugccucggcgacauagccgcccgggaccugaucugcgcccagaaguucaacggccugaccgugcugccuccccugcugaccgacgagaugaucgcccaguacaccagcgcccuguuagccggaaccaucaccagcggcuggacuuucggcgcuggagccgcucugcagauccccuucgccaugcagauggccuaccgguucaacggcaucggcgugacccagaacgugcuguacgagaaccagaagcugaucgccaaccaguucaacagcgccaucggcaagauccaggacagccugagcagcaccgcuagcgcccugggcaagcugcaggacguggugaaccagaacgcccaggcccugaacacccuggugaagcagcugagcagcaacuucggcgccaucagcagcgugcugaacgacauccugagccggcuggacaaggucgaggccgaggugcagaucgaccggcugaucacuggccggcugcagagccugcagaccuacgugacccagcagcugauccgggccgccgagauucgggccagcgccaaccuggccgccaccaagaugagcgagugcgugcugggccagagcaagcggguggacuucugcggcaagggcuaccaccugaugagcuuuccccagagcgcaccccacggagugguguuccugcacgugaccuacgugcccgcccaggagaagaacuucaccaccgccccagccaucugccacgacggcaaggcccacuuuccccgggagggcguguucgugagcaacggcacccacugguucgugacccagcggaacuucuacgagccccagaucaucaccaccgacaacaccuucgugagcggcaacugcgacguggugaucggcaucgugaacaacaccguguacgauccccugcagcccgagcuggacagcuucaaggaggagcuggacaaguacuucaagaaucacaccagccccgacguggaccugggcgacaucagcggcaucaacgccagcguggugaacauccagaaggagaucgaucggcugaacgagguggccaagaaccugaacgagagccugaucgaccugcaggagcugggcaaguacgagcaguacaucaaguggcccugguacaucuggcugggcuucaucgccggccugaucgccaucgugauggugaccaucaugcugugcugcaugaccagcugcugcagcugccugaagggcuguugcagcugcggcagcugcugcaaguucgacgaggacgacagcgagcccgugcugaagggcgugaagcugcacuacaccugaggacuagucccuguucccagagcccacuuuuuuuucuuuuuuugaaauaaaauagccugucuuucagaucuaaaaaaaaaaaaaaaaaaaaaaaaaaaaaaaaaaaaaaaaaaaaaaaaaaaaaaaaaaaaaaaaaaaaaaaaaaaaaaaaaaaaaaaaaaaaaaaaaaaa

SEQ ID NO: 24990 - RNA, 4167 nt, Artificial Sequence
  SARS-CoV-2/Wuhan/WIV05/2019__EPI_ISL_402128 spike protein mRNA gc (1-1273)(N501Y_D614G)
aggagagggcgcuuggcuugcaaggacccugagcugcggcauugaagcacacccaacccaacucgacugaagucagccucacugaaccggaucugagaaucuucucucucugggcuugccagggcucuccgaaccuagcuagcauccucuucaauuccaacuagaaagcuuaccauguucguguuccuggugcugcugccccuggugagcagccagugcgugaaccugaccacccggacccagcugccaccagccuacaccaacagcuucacccggggcgucuacuaccccgacaagguguuccggagcagcguccugcacagcacccaggaccuguuccugcccuucuucagcaacgugaccugguuccacgccauccacgugagcggcaccaacggcaccaagcgguucgacaaccccgugcugcccuucaacgacggcguguacuucgccagcaccgagaagagcaacaucauccggggcuggaucuucggcaccacccuggacagcaagacccagagccugcugaucgugaauaacgccaccaacguggugaucaaggugugcgaguuccaguucugcaacgaccccuuccugggcguguacuaccacaagaacaacaagagcuggauggagagcgaguuccggguguacagcagcgccaacaacugcaccuucgaguacgugagccagcccuuccugauggaccuggagggcaagcagggcaacuucaagaaccugcgggaguucguguucaagaacaucgacggcuacuucaagaucuacagcaagcacaccccaaucaaccuggugcgggaucugccccagggcuucucagcccuggagccccugguggaccugcccaucggcaucaacaucacccgguuccagacccugcuggcccugcaccggagcuaccugaccccaggcgacagcagcagcggguggacagcaggcgcggcugcuuacuacgugggcuaccugcagccccggaccuuccugcugaaguacaacgagaacggcaccaucaccgacgccguggacugcgcccuggacccucugagcgagaccaagugcacccugaagagcuucaccguggagaagggcaucuaccagaccagcaacuuccgggugcagcccaccgagagcaucgugcgguuccccaacaucaccaaccugugccccuucggcgagguguucaacgccacccgguucgccagcguguacgccuggaaccggaagcggaucagcaacugcguggccgacuacagcgugcuguacaacagcgccagcuucagcaccuucaagugcuacggcgugagccccaccaagcugaacgaccugugcuucaccaacguguacgccgacagcuucgugauccguggcgacgaggugcggcagaucgcacccggccagacaggcaagaucgccgacuacaacuacaagcugcccgacgacuucaccggcugcgugaucgccuggaacagcaacaaccucgacagcaaggugggcggcaacuacaacuaccuguaccggcuguuccggaagagcaaccugaagcccuucgagcgggacaucagcaccgagaucuaccaagccggcuccaccccuugcaacggcguggagggcuucaacugcuacuucccucugcagagcuacggcuuccagcccaccuacggcgugggcuaccagcccuaccgggugguggugcugagcuucgagcugcugcacgccccagccaccguguguggccccaagaagagcaccaaccuggugaagaacaagugcgugaacuucaacuucaacggccuuaccggcaccggcgugcugaccgagagcaacaagaaauuccugcccuuucagcaguucggccgggacaucgccgacaccaccgacgcugugcgggauccccagacccuggagauccuggacaucaccccuugcagcuucggcggcgugagcgugaucaccccaggcaccaacaccagcaaccagguggccgugcuguaccagggcgugaacugcaccgaggugcccguggccauccacgccgaccagcugacacccaccuggcgggucuacagcaccggcagcaacguguuccagacccgggccgguugccugaucggcgccgagcacgugaacaacagcuacgagugcgacauccccaucggcgccggcaucugugccagcuaccagacccagaccaauucaccccggagggcaaggagcguggccagccagagcaucaucgccuacaccaugagccugggcgccgagaacagcguggccuacagcaacaacagcaucgccauccccaccaacuucaccaucagcgugaccaccgagauucugcccgugagcaugaccaagaccagcguggacugcaccauguacaucugcggcgacagcaccgagugcagcaaccugcugcugcaguacggcagcuucugcacccagcugaaccgggcccugaccggcaucgccguggagcaggacaagaacacccaggagguguucgcccaggugaagcagaucuacaagaccccucccaucaaggacuucggcggcuucaacuucagccagauccugcccgaccccagcaagcccagcaagcggagcuucaucgaggaccugcuguucaacaaggugacccuagccgacgccggcuucaucaagcaguacggcgacugccucggcgacauagccgcccgggaccugaucugcgcccagaaguucaacggccugaccgugcugccuccccugcugaccgacgagaugaucgcccaguacaccagcgcccuguuagccggaaccaucaccagcggcuggacuuucggcgcuggagccgcucugcagauccccuucgccaugcagauggccuaccgguucaacggcaucggcgugacccagaacgugcuguacgagaaccagaagcugaucgccaaccaguucaacagcgccaucggcaagauccaggacagccugagcagcaccgcuagcgcccugggcaagcugcaggacguggugaaccagaacgcccaggcccugaacacccuggugaagcagcugagcagcaacuucggcgccaucagcagcgugcugaacgacauccugagccggcuggacaaggucgaggccgaggugcagaucgaccggcugaucacuggccggcugcagagccugcagaccuacgugacccagcagcugauccgggccgccgagauucgggccagcgccaaccuggccgccaccaagaugagcgagugcgugcugggccagagcaagcggguggacuucugcggcaagggcuaccaccugaugagcuuuccccagagcgcaccccacggagugguguuccugcacgugaccuacgugcccgcccaggagaagaacuucaccaccgccccagccaucugccacgacggcaaggcccacuuuccccgggagggcguguucgugagcaacggcacccacugguucgugacccagcggaacuucuacgagccccagaucaucaccaccgacaacaccuucgugagcggcaacugcgacguggugaucggcaucgugaacaacaccguguacgauccccugcagcccgagcuggacagcuucaaggaggagcuggacaaguacuucaagaaucacaccagccccgacguggaccugggcgacaucagcggcaucaacgccagcguggugaacauccagaaggagaucgaucggcugaacgagguggccaagaaccugaacgagagccugaucgaccugcaggagcugggcaaguacgagcaguacaucaaguggcccugguacaucuggcugggcuucaucgccggccugaucgccaucgugauggugaccaucaugcugugcugcaugaccagcugcugcagcugccugaagggcuguugcagcugcggcagcugcugcaaguucgacgaggacgacagcgagcccgugcugaagggcgugaagcugcacuacaccugaggacuagucccuguucccagagcccacuuuuuuuucuuuuuuugaaauaaaauagccugucuuucagaucuaaaaaaaaaaaaaaaaaaaaaaaaaaaaaaaaaaaaaaaaaaaaaaaaaaaaaaaaaaaaaaaaaaaaaaaaaaaaaaaaaaaaaaaaaaaaaaaaaaaa

SEQ ID NO: 24991 - RNA, 4161 nt, Artificial Sequence
  SARS-CoV-2/Wuhan/WIV05/2019__EPI_ISL_402128 spike protein mRNA gc (1-1273)(H69del_V70del_D614G)
aggagagggcgcuuggcuugcaaggacccugagcugcggcauugaagcacacccaacccaacucgacugaagucagccucacugaaccggaucugagaaucuucucucucugggcuugccagggcucuccgaaccuagcuagcauccucuucaauuccaacuagaaagcuuaccauguucguguuccuggugcugcugccccuggugagcagccagugcgugaaccugaccacccggacccagcugccaccagccuacaccaacagcuucacccggggcgucuacuaccccgacaagguguuccggagcagcguccugcacagcacccaggaccuguuccugcccuucuucagcaacgugaccugguuccacgccaucagcggcaccaacggcaccaagcgguucgacaaccccgugcugcccuucaacgacggcguguacuucgccagcaccgagaagagcaacaucauccggggcuggaucuucggcaccacccuggacagcaagacccagagccugcugaucgugaauaacgccaccaacguggugaucaaggugugcgaguuccaguucugcaacgaccccuuccugggcguguacuaccacaagaacaacaagagcuggauggagagcgaguuccggguguacagcagcgccaacaacugcaccuucgaguacgugagccagcccuuccugauggaccuggagggcaagcagggcaacuucaagaaccugcgggaguucguguucaagaacaucgacggcuacuucaagaucuacagcaagcacaccccaaucaaccuggugcgggaucugccccagggcuucucagcccuggagccccugguggaccugcccaucggcaucaacaucacccgguuccagacccugcuggcccugcaccggagcuaccugaccccaggcgacagcagcagcggguggacagcaggcgcggcugcuuacuacgugggcuaccugcagccccggaccuuccugcugaaguacaacgagaacggcaccaucaccgacgccguggacugcgcccuggacccucugagcgagaccaagugcacccugaagagcuucaccguggagaagggcaucuaccagaccagcaacuuccgggugcagcccaccgagagcaucgugcgguuccccaacaucaccaaccugugccccuucggcgagguguucaacgccacccgguucgccagcguguacgccuggaaccggaagcggaucagcaacugcguggccgacuacagcgugcuguacaacagcgccagcuucagcaccuucaagugcuacggcgugagccccaccaagcugaacgaccugugcuucaccaacguguacgccgacagcuucgugauccguggcgacgaggugcggcagaucgcacccggccagacaggcaagaucgccgacuacaacuacaagcugcccgacgacuucaccggcugcgugaucgccuggaacagcaacaaccucgacagcaaggugggcggcaacuacaacuaccuguaccggcuguuccggaagagcaaccugaagcccuucgagcgggacaucagcaccgagaucuaccaagccggcuccaccccuugcaacggcguggagggcuucaacugcuacuucccucugcagagcuacggcuuccagcccaccaacggcgugggcuaccagcccuaccgggugguggugcugagcuucgagcugcugcacgccccagccaccguguguggccccaagaagagcaccaaccuggugaagaacaagugcgugaacuucaacuucaacggccuuaccggcaccggcgugcugaccgagagcaacaagaaauuccugcccuuucagcaguucggccgggacaucgccgacaccaccgacgcugugcgggauccccagacccuggagauccuggacaucaccccuugcagcuucggcggcgugagcgugaucaccccaggcaccaacaccagcaaccagguggccgugcuguaccagggcgugaacugcaccgaggugcccguggccauccacgccgaccagcugacacccaccuggcgggucuacagcaccggcagcaacguguuccagacccgggccgguugccugaucggcgccgagcacgugaacaacagcuacgagugcgacauccccaucggcgccggcaucugugccagcuaccagacccagaccaauucaccccggagggcaaggagcguggccagccagagcaucaucgccuacaccaugagccugggcgccgagaacagcguggccuacagcaacaacagcaucgccauccccaccaacuucaccaucagcgugaccaccgagauucugcccgugagcaugaccaagaccagcguggacugcaccauguacaucugcggcgacagcaccgagugcagcaaccugcugcugcaguacggcagcuucugcacccagcugaaccgggcccugaccggcaucgccguggagcaggacaagaacacccaggagguguucgcccaggugaagcagaucuacaagaccccucccaucaaggacuucggcggcuucaacuucagccagauccugcccgaccccagcaagcccagcaagcggagcuucaucgaggaccugcuguucaacaaggugacccuagccgacgccggcuucaucaagcaguacggcgacugccucggcgacauagccgcccgggaccugaucugcgcccagaaguucaacggccugaccgugcugccuccccugcugaccgacgagaugaucgcccaguacaccagcgcccuguuagccggaaccaucaccagcggcuggacuuucggcgcuggagccgcucugcagauccccuucgccaugcagauggccuaccgguucaacggcaucggcgugacccagaacgugcuguacgagaaccagaagcugaucgccaaccaguucaacagcgccaucggcaagauccaggacagccugagcagcaccgcuagcgcccugggcaagcugcaggacguggugaaccagaacgcccaggcccugaacacccuggugaagcagcugagcagcaacuucggcgccaucagcagcgugcugaacgacauccugagccggcuggacaaggucgaggccgaggugcagaucgaccggcugaucacuggccggcugcagagccugcagaccuacgugacccagcagcugauccgggccgccgagauucgggccagcgccaaccuggccgccaccaagaugagcgagugcgugcugggccagagcaagcggguggacuucugcggcaagggcuaccaccugaugagcuuuccccagagcgcaccccacggagugguguuccugcacgugaccuacgugcccgcccaggagaagaacuucaccaccgccccagccaucugccacgacggcaaggcccacuuuccccgggagggcguguucgugagcaacggcacccacugguucgugacccagcggaacuucuacgagccccagaucaucaccaccgacaacaccuucgugagcggcaacugcgacguggugaucggcaucgugaacaacaccguguacgauccccugcagcccgagcuggacagcuucaaggaggagcuggacaaguacuucaagaaucacaccagccccgacguggaccugggcgacaucagcggcaucaacgccagcguggugaacauccagaaggagaucgaucggcugaacgagguggccaagaaccugaacgagagccugaucgaccugcaggagcugggcaaguacgagcaguacaucaaguggcccugguacaucuggcugggcuucaucgccggccugaucgccaucgugauggugaccaucaugcugugcugcaugaccagcugcugcagcugccugaagggcuguugcagcugcggcagcugcugcaaguucgacgaggacgacagcgagcccgugcugaagggcgugaagcugcacuacaccugaggacuagucccuguucccagagcccacuuuuuuuucuuuuuuugaaauaaaauagccugucuuucagaucuaaaaaaaaaaaaaaaaaaaaaaaaaaaaaaaaaaaaaaaaaaaaaaaaaaaaaaaaaaaaaaaaaaaaaaaaaaaaaaaaaaaaaaaaaaaaaaaaaaaa

SEQ ID NO: 24992 - RNA, 4167 nt, Artificial Sequence
  SARS-CoV-2/Wuhan/WIV05/2019__EPI_ISL_402128 spike protein mRNA gc (1-1273)(Y453F_D614G)
aggagagggcgcuuggcuugcaaggacccugagcugcggcauugaagcacacccaacccaacucgacugaagucagccucacugaaccggaucugagaaucuucucucucugggcuugccagggcucuccgaaccuagcuagcauccucuucaauuccaacuagaaagcuuaccauguucguguuccuggugcugcugccccuggugagcagccagugcgugaaccugaccacccggacccagcugccaccagccuacaccaacagcuucacccggggcgucuacuaccccgacaagguguuccggagcagcguccugcacagcacccaggaccuguuccugcccuucuucagcaacgugaccugguuccacgccauccacgugagcggcaccaacggcaccaagcgguucgacaaccccgugcugcccuucaacgacggcguguacuucgccagcaccgagaagagcaacaucauccggggcuggaucuucggcaccacccuggacagcaagacccagagccugcugaucgugaauaacgccaccaacguggugaucaaggugugcgaguuccaguucugcaacgaccccuuccugggcguguacuaccacaagaacaacaagagcuggauggagagcgaguuccggguguacagcagcgccaacaacugcaccuucgaguacgugagccagcccuuccugauggaccuggagggcaagcagggcaacuucaagaaccugcgggaguucguguucaagaacaucgacggcuacuucaagaucuacagcaagcacaccccaaucaaccuggugcgggaucugccccagggcuucucagcccuggagccccugguggaccugcccaucggcaucaacaucacccgguuccagacccugcuggcccugcaccggagcuaccugaccccaggcgacagcagcagcggguggacagcaggcgcggcugcuuacuacgugggcuaccugcagccccggaccuuccugcugaaguacaacgagaacggcaccaucaccgacgccguggacugcgcccuggacccucugagcgagaccaagugcacccugaagagcuucaccguggagaagggcaucuaccagaccagcaacuuccgggugcagcccaccgagagcaucgugcgguuccccaacaucaccaaccugugccccuucggcgagguguucaacgccacccgguucgccagcguguacgccuggaaccggaagcggaucagcaacugcguggccgacuacagcgugcuguacaacagcgccagcuucagcaccuucaagugcuacggcgugagccccaccaagcugaacgaccugugcuucaccaacguguacgccgacagcuucgugauccguggcgacgaggugcggcagaucgcacccggccagacaggcaagaucgccgacuacaacuacaagcugcccgacgacuucaccggcugcgugaucgccuggaacagcaacaaccucgacagcaaggugggcggcaacuacaacuaccuguuccggcuguuccggaagagcaaccugaagcccuucgagcgggacaucagcaccgagaucuaccaagccggcuccaccccuugcaacggcguggagggcuucaacugcuacuucccucugcagagcuacggcuuccagcccaccaacggcgugggcuaccagcccuaccgggugguggugcugagcuucgagcugcugcacgccccagccaccguguguggccccaagaagagcaccaaccuggugaagaacaagugcgugaacuucaacuucaacggccuuaccggcaccggcgugcugaccgagagcaacaagaaauuccugcccuuucagcaguucggccgggacaucgccgacaccaccgacgcugugcgggauccccagacccuggagauccuggacaucaccccuugcagcuucggcggcgugagcgugaucaccccaggcaccaacaccagcaaccagguggccgugcuguaccagggcgugaacugcaccgaggugcccguggccauccacgccgaccagcugacacccaccuggcgggucuacagcaccggcagcaacguguuccagacccgggccgguugccugaucggcgccgagcacgugaacaacagcuacgagugcgacauccccaucggcgccggcaucugugccagcuaccagacccagaccaauucaccccggagggcaaggagcguggccagccagagcaucaucgccuacaccaugagccugggcgccgagaacagcguggccuacagcaacaacagcaucgccauccccaccaacuucaccaucagcgugaccaccgagauucugcccgugagcaugaccaagaccagcguggacugcaccauguacaucugcggcgacagcaccgagugcagcaaccugcugcugcaguacggcagcuucugcacccagcugaaccgggcccugaccggcaucgccguggagcaggacaagaacacccaggagguguucgcccaggugaagcagaucuacaagaccccucccaucaaggacuucggcggcuucaacuucagccagauccugcccgaccccagcaagcccagcaagcggagcuucaucgaggaccugcuguucaacaaggugacccuagccgacgccggcuucaucaagcaguacggcgacugccucggcgacauagccgcccgggaccugaucugcgcccagaaguucaacggccugaccgugcugccuccccugcugaccgacgagaugaucgcccaguacaccagcgcccuguuagccggaaccaucaccagcggcuggacuuucggcgcuggagccgcucugcagauccccuucgccaugcagauggccuaccgguucaacggcaucggcgugacccagaacgugcuguacgagaaccagaagcugaucgccaaccaguucaacagcgccaucggcaagauccaggacagccugagcagcaccgcuagcgcccugggcaagcugcaggacguggugaaccagaacgcccaggcccugaacacccuggugaagcagcugagcagcaacuucggcgccaucagcagcgugcugaacgacauccugagccggcuggacaaggucgaggccgaggugcagaucgaccggcugaucacuggccggcugcagagccugcagaccuacgugacccagcagcugauccgggccgccgagauucgggccagcgccaaccuggccgccaccaagaugagcgagugcgugcugggccagagcaagcggguggacuucugcggcaagggcuaccaccugaugagcuuuccccagagcgcaccccacggagugguguuccugcacgugaccuacgugcccgcccaggagaagaacuucaccaccgccccagccaucugccacgacggcaaggcccacuuuccccgggagggcguguucgugagcaacggcacccacugguucgugacccagcggaacuucuacgagccccagaucaucaccaccgacaacaccuucgugagcggcaacugcgacguggugaucggcaucgugaacaacaccguguacgauccccugcagcccgagcuggacagcuucaaggaggagcuggacaaguacuucaagaaucacaccagccccgacguggaccugggcgacaucagcggcaucaacgccagcguggugaacauccagaaggagaucgaucggcugaacgagguggccaagaaccugaacgagagccugaucgaccugcaggagcugggcaaguacgagcaguacaucaaguggcccugguacaucuggcugggcuucaucgccggccugaucgccaucgugauggugaccaucaugcugugcugcaugaccagcugcugcagcugccugaagggcuguugcagcugcggcagcugcugcaaguucgacgaggacgacagcgagcccgugcugaagggcgugaagcugcacuacaccugaggacuagucccuguucccagagcccacuuuuuuuucuuuuuuugaaauaaaauagccugucuuucagaucuaaaaaaaaaaaaaaaaaaaaaaaaaaaaaaaaaaaaaaaaaaaaaaaaaaaaaaaaaaaaaaaaaaaaaaaaaaaaaaaaaaaaaaaaaaaaaaaaaaaa

SEQ ID NO: 24993 - RNA, 4167 nt, Artificial Sequence
  SARS-CoV-2/Wuhan/WIV05/2019__EPI_ISL_402128 spike protein mRNA gc (1-1273)(D614G_I692V)
aggagagggcgcuuggcuugcaaggacccugagcugcggcauugaagcacacccaacccaacucgacugaagucagccucacugaaccggaucugagaaucuucucucucugggcuugccagggcucuccgaaccuagcuagcauccucuucaauuccaacuagaaagcuuaccauguucguguuccuggugcugcugccccuggugagcagccagugcgugaaccugaccacccggacccagcugccaccagccuacaccaacagcuucacccggggcgucuacuaccccgacaagguguuccggagcagcguccugcacagcacccaggaccuguuccugcccuucuucagcaacgugaccugguuccacgccauccacgugagcggcaccaacggcaccaagcgguucgacaaccccgugcugcccuucaacgacggcguguacuucgccagcaccgagaagagcaacaucauccggggcuggaucuucggcaccacccuggacagcaagacccagagccugcugaucgugaauaacgccaccaacguggugaucaaggugugcgaguuccaguucugcaacgaccccuuccugggcguguacuaccacaagaacaacaagagcuggauggagagcgaguuccggguguacagcagcgccaacaacugcaccuucgaguacgugagccagcccuuccugauggaccuggagggcaagcagggcaacuucaagaaccugcgggaguucguguucaagaacaucgacggcuacuucaagaucuacagcaagcacaccccaaucaaccuggugcgggaucugccccagggcuucucagcccuggagccccugguggaccugcccaucggcaucaacaucacccgguuccagacccugcuggcccugcaccggagcuaccugaccccaggcgacagcagcagcggguggacagcaggcgcggcugcuuacuacgugggcuaccugcagccccggaccuuccugcugaaguacaacgagaacggcaccaucaccgacgccguggacugcgcccuggacccucugagcgagaccaagugcacccugaagagcuucaccguggagaagggcaucuaccagaccagcaacuuccgggugcagcccaccgagagcaucgugcgguuccccaacaucaccaaccugugccccuucggcgagguguucaacgccacccgguucgccagcguguacgccuggaaccggaagcggaucagcaacugcguggccgacuacagcgugcuguacaacagcgccagcuucagcaccuucaagugcuacggcgugagccccaccaagcugaacgaccugugcuucaccaacguguacgccgacagcuucgugauccguggcgacgaggugcggcagaucgcacccggccagacaggcaagaucgccgacuacaacuacaagcugcccgacgacuucaccggcugcgugaucgccuggaacagcaacaaccucgacagcaaggugggcggcaacuacaacuaccuguaccggcuguuccggaagagcaaccugaagcccuucgagcgggacaucagcaccgagaucuaccaagccggcuccaccccuugcaacggcguggagggcuucaacugcuacuucccucugcagagcuacggcuuccagcccaccaacggcgugggcuaccagcccuaccgggugguggugcugagcuucgagcugcugcacgccccagccaccguguguggccccaagaagagcaccaaccuggugaagaacaagugcgugaacuucaacuucaacggccuuaccggcaccggcgugcugaccgagagcaacaagaaauuccugcccuuucagcaguucggccgggacaucgccgacaccaccgacgcugugcgggauccccagacccuggagauccuggacaucaccccuugcagcuucggcggcgugagcgugaucaccccaggcaccaacaccagcaaccagguggccgugcuguaccagggcgugaacugcaccgaggugcccguggccauccacgccgaccagcugacacccaccuggcgggucuacagcaccggcagcaacguguuccagacccgggccgguugccugaucggcgccgagcacgugaacaacagcuacgagugcgacauccccaucggcgccggcaucugugccagcuaccagacccagaccaauucaccccggagggcaaggagcguggccagccagagcgugaucgccuacaccaugagccugggcgccgagaacagcguggccuacagcaacaacagcaucgccauccccaccaacuucaccaucagcgugaccaccgagauucugcccgugagcaugaccaagaccagcguggacugcaccauguacaucugcggcgacagcaccgagugcagcaaccugcugcugcaguacggcagcuucugcacccagcugaaccgggcccugaccggcaucgccguggagcaggacaagaacacccaggagguguucgcccaggugaagcagaucuacaagaccccucccaucaaggacuucggcggcuucaacuucagccagauccugcccgaccccagcaagcccagcaagcggagcuucaucgaggaccugcuguucaacaaggugacccuagccgacgccggcuucaucaagcaguacggcgacugccucggcgacauagccgcccgggaccugaucugcgcccagaaguucaacggccugaccgugcugccuccccugcugaccgacgagaugaucgcccaguacaccagcgcccuguuagccggaaccaucaccagcggcuggacuuucggcgcuggagccgcucugcagauccccuucgccaugcagauggccuaccgguucaacggcaucggcgugacccagaacgugcuguacgagaaccagaagcugaucgccaaccaguucaacagcgccaucggcaagauccaggacagccugagcagcaccgcuagcgcccugggcaagcugcaggacguggugaaccagaacgcccaggcccugaacacccuggugaagcagcugagcagcaacuucggcgccaucagcagcgugcugaacgacauccugagccggcuggacaaggucgaggccgaggugcagaucgaccggcugaucacuggccggcugcagagccugcagaccuacgugacccagcagcugauccgggccgccgagauucgggccagcgccaaccuggccgccaccaagaugagcgagugcgugcugggccagagcaagcggguggacuucugcggcaagggcuaccaccugaugagcuuuccccagagcgcaccccacggagugguguuccugcacgugaccuacgugcccgcccaggagaagaacuucaccaccgccccagccaucugccacgacggcaaggcccacuuuccccgggagggcguguucgugagcaacggcacccacugguucgugacccagcggaacuucuacgagccccagaucaucaccaccgacaacaccuucgugagcggcaacugcgacguggugaucggcaucgugaacaacaccguguacgauccccugcagcccgagcuggacagcuucaaggaggagcuggacaaguacuucaagaaucacaccagccccgacguggaccugggcgacaucagcggcaucaacgccagcguggugaacauccagaaggagaucgaucggcugaacgagguggccaagaaccugaacgagagccugaucgaccugcaggagcugggcaaguacgagcaguacaucaaguggcccugguacaucuggcugggcuucaucgccggccugaucgccaucgugauggugaccaucaugcugugcugcaugaccagcugcugcagcugccugaagggcuguugcagcugcggcagcugcugcaaguucgacgaggacgacagcgagcccgugcugaagggcgugaagcugcacuacaccugaggacuagucccuguucccagagcccacuuuuuuuucuuuuuuugaaauaaaauagccugucuuucagaucuaaaaaaaaaaaaaaaaaaaaaaaaaaaaaaaaaaaaaaaaaaaaaaaaaaaaaaaaaaaaaaaaaaaaaaaaaaaaaaaaaaaaaaaaaaaaaaaaaaaa

SEQ ID NO: 24994 - RNA, 4167 nt, Artificial Sequence
  SARS-CoV-2/Wuhan/WIV05/2019__EPI_ISL_402128 spike protein mRNA gc (1-1273)(D614G_M1229I)
aggagagggcgcuuggcuugcaaggacccugagcugcggcauugaagcacacccaacccaacucgacugaagucagccucacugaaccggaucugagaaucuucucucucugggcuugccagggcucuccgaaccuagcuagcauccucuucaauuccaacuagaaagcuuaccauguucguguuccuggugcugcugccccuggugagcagccagugcgugaaccugaccacccggacccagcugccaccagccuacaccaacagcuucacccggggcgucuacuaccccgacaagguguuccggagcagcguccugcacagcacccaggaccuguuccugcccuucuucagcaacgugaccugguuccacgccauccacgugagcggcaccaacggcaccaagcgguucgacaaccccgugcugcccuucaacgacggcguguacuucgccagcaccgagaagagcaacaucauccggggcuggaucuucggcaccacccuggacagcaagacccagagccugcugaucgugaauaacgccaccaacguggugaucaaggugugcgaguuccaguucugcaacgaccccuuccugggcguguacuaccacaagaacaacaagagcuggauggagagcgaguuccggguguacagcagcgccaacaacugcaccuucgaguacgugagccagcccuuccugauggaccuggagggcaagcagggcaacuucaagaaccugcgggaguucguguucaagaacaucgacggcuacuucaagaucuacagcaagcacaccccaaucaaccuggugcgggaucugccccagggcuucucagcccuggagccccugguggaccugcccaucggcaucaacaucacccgguuccagacccugcuggcccugcaccggagcuaccugaccccaggcgacagcagcagcggguggacagcaggcgcggcugcuuacuacgugggcuaccugcagccccggaccuuccugcugaaguacaacgagaacggcaccaucaccgacgccguggacugcgcccuggacccucugagcgagaccaagugcacccugaagagcuucaccguggagaagggcaucuaccagaccagcaacuuccgggugcagcccaccgagagcaucgugcgguuccccaacaucaccaaccugugccccuucggcgagguguucaacgccacccgguucgccagcguguacgccuggaaccggaagcggaucagcaacugcguggccgacuacagcgugcuguacaacagcgccagcuucagcaccuucaagugcuacggcgugagccccaccaagcugaacgaccugugcuucaccaacguguacgccgacagcuucgugauccguggcgacgaggugcggcagaucgcacccggccagacaggcaagaucgccgacuacaacuacaagcugcccgacgacuucaccggcugcgugaucgccuggaacagcaacaaccucgacagcaaggugggcggcaacuacaacuaccuguaccggcuguuccggaagagcaaccugaagcccuucgagcgggacaucagcaccgagaucuaccaagccggcuccaccccuugcaacggcguggagggcuucaacugcuacuucccucugcagagcuacggcuuccagcccaccaacggcgugggcuaccagcccuaccgggugguggugcugagcuucgagcugcugcacgccccagccaccguguguggccccaagaagagcaccaaccuggugaagaacaagugcgugaacuucaacuucaacggccuuaccggcaccggcgugcugaccgagagcaacaagaaauuccugcccuuucagcaguucggccgggacaucgccgacaccaccgacgcugugcgggauccccagacccuggagauccuggacaucaccccuugcagcuucggcggcgugagcgugaucaccccaggcaccaacaccagcaaccagguggccgugcuguaccagggcgugaacugcaccgaggugcccguggccauccacgccgaccagcugacacccaccuggcgggucuacagcaccggcagcaacguguuccagacccgggccgguugccugaucggcgccgagcacgugaacaacagcuacgagugcgacauccccaucggcgccggcaucugugccagcuaccagacccagaccaauucaccccggagggcaaggagcguggccagccagagcaucaucgccuacaccaugagccugggcgccgagaacagcguggccuacagcaacaacagcaucgccauccccaccaacuucaccaucagcgugaccaccgagauucugcccgugagcaugaccaagaccagcguggacugcaccauguacaucugcggcgacagcaccgagugcagcaaccugcugcugcaguacggcagcuucugcacccagcugaaccgggcccugaccggcaucgccguggagcaggacaagaacacccaggagguguucgcccaggugaagcagaucuacaagaccccucccaucaaggacuucggcggcuucaacuucagccagauccugcccgaccccagcaagcccagcaagcggagcuucaucgaggaccugcuguucaacaaggugacccuagccgacgccggcuucaucaagcaguacggcgacugccucggcgacauagccgcccgggaccugaucugcgcccagaaguucaacggccugaccgugcugccuccccugcugaccgacgagaugaucgcccaguacaccagcgcccuguuagccggaaccaucaccagcggcuggacuuucggcgcuggagccgcucugcagauccccuucgccaugcagauggccuaccgguucaacggcaucggcgugacccagaacgugcuguacgagaaccagaagcugaucgccaaccaguucaacagcgccaucggcaagauccaggacagccugagcagcaccgcuagcgcccugggcaagcugcaggacguggugaaccagaacgcccaggcccugaacacccuggugaagcagcugagcagcaacuucggcgccaucagcagcgugcugaacgacauccugagccggcuggacaaggucgaggccgaggugcagaucgaccggcugaucacuggccggcugcagagccugcagaccuacgugacccagcagcugauccgggccgccgagauucgggccagcgccaaccuggccgccaccaagaugagcgagugcgugcugggccagagcaagcggguggacuucugcggcaagggcuaccaccugaugagcuuuccccagagcgcaccccacggagugguguuccugcacgugaccuacgugcccgcccaggagaagaacuucaccaccgccccagccaucugccacgacggcaaggcccacuuuccccgggagggcguguucgugagcaacggcacccacugguucgugacccagcggaacuucuacgagccccagaucaucaccaccgacaacaccuucgugagcggcaacugcgacguggugaucggcaucgugaacaacaccguguacgauccccugcagcccgagcuggacagcuucaaggaggagcuggacaaguacuucaagaaucacaccagccccgacguggaccugggcgacaucagcggcaucaacgccagcguggugaacauccagaaggagaucgaucggcugaacgagguggccaagaaccugaacgagagccugaucgaccugcaggagcugggcaaguacgagcaguacaucaaguggcccugguacaucuggcugggcuucaucgccggccugaucgccaucgugaucgugaccaucaugcugugcugcaugaccagcugcugcagcugccugaagggcuguugcagcugcggcagcugcugcaaguucgacgaggacgacagcgagcccgugcugaagggcgugaagcugcacuacaccugaggacuagucccuguucccagagcccacuuuuuuuucuuuuuuugaaauaaaauagccugucuuucagaucuaaaaaaaaaaaaaaaaaaaaaaaaaaaaaaaaaaaaaaaaaaaaaaaaaaaaaaaaaaaaaaaaaaaaaaaaaaaaaaaaaaaaaaaaaaaaaaaaaaaa

SEQ ID NO: 24995 - RNA, 4161 nt, Artificial Sequence
  SARS-CoV-2/Wuhan/WIV05/2019__EPI_ISL_402128 spike protein mRNA gc (1-1273)(H69del_V70del_A222V_Y453F_S477N_D614G_I692V)
aggagagggcgcuuggcuugcaaggacccugagcugcggcauugaagcacacccaacccaacucgacugaagucagccucacugaaccggaucugagaaucuucucucucugggcuugccagggcucuccgaaccuagcuagcauccucuucaauuccaacuagaaagcuuaccauguucguguuccuggugcugcugccccuggugagcagccagugcgugaaccugaccacccggacccagcugccaccagccuacaccaacagcuucacccggggcgucuacuaccccgacaagguguuccggagcagcguccugcacagcacccaggaccuguuccugcccuucuucagcaacgugaccugguuccacgccaucagcggcaccaacggcaccaagcgguucgacaaccccgugcugcccuucaacgacggcguguacuucgccagcaccgagaagagcaacaucauccggggcuggaucuucggcaccacccuggacagcaagacccagagccugcugaucgugaauaacgccaccaacguggugaucaaggugugcgaguuccaguucugcaacgaccccuuccugggcguguacuaccacaagaacaacaagagcuggauggagagcgaguuccggguguacagcagcgccaacaacugcaccuucgaguacgugagccagcccuuccugauggaccuggagggcaagcagggcaacuucaagaaccugcgggaguucguguucaagaacaucgacggcuacuucaagaucuacagcaagcacaccccaaucaaccuggugcgggaucugccccagggcuucucagugcuggagccccugguggaccugcccaucggcaucaacaucacccgguuccagacccugcuggcccugcaccggagcuaccugaccccaggcgacagcagcagcggguggacagcaggcgcggcugcuuacuacgugggcuaccugcagccccggaccuuccugcugaaguacaacgagaacggcaccaucaccgacgccguggacugcgcccuggacccucugagcgagaccaagugcacccugaagagcuucaccguggagaagggcaucuaccagaccagcaacuuccgggugcagcccaccgagagcaucgugcgguuccccaacaucaccaaccugugccccuucggcgagguguucaacgccacccgguucgccagcguguacgccuggaaccggaagcggaucagcaacugcguggccgacuacagcgugcuguacaacagcgccagcuucagcaccuucaagugcuacggcgugagccccaccaagcugaacgaccugugcuucaccaacguguacgccgacagcuucgugauccguggcgacgaggugcggcagaucgcacccggccagacaggcaagaucgccgacuacaacuacaagcugcccgacgacuucaccggcugcgugaucgccuggaacagcaacaaccucgacagcaaggugggcggcaacuacaacuaccuguuccggcuguuccggaagagcaaccugaagcccuucgagcgggacaucagcaccgagaucuaccaagccggcaacaccccuugcaacggcguggagggcuucaacugcuacuucccucugcagagcuacggcuuccagcccaccaacggcgugggcuaccagcccuaccgggugguggugcugagcuucgagcugcugcacgccccagccaccguguguggccccaagaagagcaccaaccuggugaagaacaagugcgugaacuucaacuucaacggccuuaccggcaccggcgugcugaccgagagcaacaagaaauuccugcccuuucagcaguucggccgggacaucgccgacaccaccgacgcugugcgggauccccagacccuggagauccuggacaucaccccuugcagcuucggcggcgugagcgugaucaccccaggcaccaacaccagcaaccagguggccgugcuguaccagggcgugaacugcaccgaggugcccguggccauccacgccgaccagcugacacccaccuggcgggucuacagcaccggcagcaacguguuccagacccgggccgguugccugaucggcgccgagcacgugaacaacagcuacgagugcgacauccccaucggcgccggcaucugugccagcuaccagacccagaccaauucaccccggagggcaaggagcguggccagccagagcgugaucgccuacaccaugagccugggcgccgagaacagcguggccuacagcaacaacagcaucgccauccccaccaacuucaccaucagcgugaccaccgagauucugcccgugagcaugaccaagaccagcguggacugcaccauguacaucugcggcgacagcaccgagugcagcaaccugcugcugcaguacggcagcuucugcacccagcugaaccgggcccugaccggcaucgccguggagcaggacaagaacacccaggagguguucgcccaggugaagcagaucuacaagaccccucccaucaaggacuucggcggcuucaacuucagccagauccugcccgaccccagcaagcccagcaagcggagcuucaucgaggaccugcuguucaacaaggugacccuagccgacgccggcuucaucaagcaguacggcgacugccucggcgacauagccgcccgggaccugaucugcgcccagaaguucaacggccugaccgugcugccuccccugcugaccgacgagaugaucgcccaguacaccagcgcccuguuagccggaaccaucaccagcggcuggacuuucggcgcuggagccgcucugcagauccccuucgccaugcagauggccuaccgguucaacggcaucggcgugacccagaacgugcuguacgagaaccagaagcugaucgccaaccaguucaacagcgccaucggcaagauccaggacagccugagcagcaccgcuagcgcccugggcaagcugcaggacguggugaaccagaacgcccaggcccugaacacccuggugaagcagcugagcagcaacuucggcgccaucagcagcgugcugaacgacauccugagccggcuggacaaggucgaggccgaggugcagaucgaccggcugaucacuggccggcugcagagccugcagaccuacgugacccagcagcugauccgggccgccgagauucgggccagcgccaaccuggccgccaccaagaugagcgagugcgugcugggccagagcaagcggguggacuucugcggcaagggcuaccaccugaugagcuuuccccagagcgcaccccacggagugguguuccugcacgugaccuacgugcccgcccaggagaagaacuucaccaccgccccagccaucugccacgacggcaaggcccacuuuccccgggagggcguguucgugagcaacggcacccacugguucgugacccagcggaacuucuacgagccccagaucaucaccaccgacaacaccuucgugagcggcaacugcgacguggugaucggcaucgugaacaacaccguguacgauccccugcagcccgagcuggacagcuucaaggaggagcuggacaaguacuucaagaaucacaccagccccgacguggaccugggcgacaucagcggcaucaacgccagcguggugaacauccagaaggagaucgaucggcugaacgagguggccaagaaccugaacgagagccugaucgaccugcaggagcugggcaaguacgagcaguacaucaaguggcccugguacaucuggcugggcuucaucgccggccugaucgccaucgugauggugaccaucaugcugugcugcaugaccagcugcugcagcugccugaagggcuguugcagcugcggcagcugcugcaaguucgacgaggacgacagcgagcccgugcugaagggcgugaagcugcacuacaccugaggacuagucccuguucccagagcccacuuuuuuuucuuuuuuugaaauaaaauagccugucuuucagaucuaaaaaaaaaaaaaaaaaaaaaaaaaaaaaaaaaaaaaaaaaaaaaaaaaaaaaaaaaaaaaaaaaaaaaaaaaaaaaaaaaaaaaaaaaaaaaaaaaaaa

SEQ ID NO: 24996 - RNA, 4161 nt, Artificial Sequence
  SARS-CoV-2/Wuhan/WIV05/2019__EPI_ISL_402128 spike protein mRNA gc (1-1273)(H69del_V70del_Y453F_D614G_I692V_M1229I)
aggagagggcgcuuggcuugcaaggacccugagcugcggcauugaagcacacccaacccaacucgacugaagucagccucacugaaccggaucugagaaucuucucucucugggcuugccagggcucuccgaaccuagcuagcauccucuucaauuccaacuagaaagcuuaccauguucguguuccuggugcugcugccccuggugagcagccagugcgugaaccugaccacccggacccagcugccaccagccuacaccaacagcuucacccggggcgucuacuaccccgacaagguguuccggagcagcguccugcacagcacccaggaccuguuccugcccuucuucagcaacgugaccugguuccacgccaucagcggcaccaacggcaccaagcgguucgacaaccccgugcugcccuucaacgacggcguguacuucgccagcaccgagaagagcaacaucauccggggcuggaucuucggcaccacccuggacagcaagacccagagccugcugaucgugaauaacgccaccaacguggugaucaaggugugcgaguuccaguucugcaacgaccccuuccugggcguguacuaccacaagaacaacaagagcuggauggagagcgaguuccggguguacagcagcgccaacaacugcaccuucgaguacgugagccagcccuuccugauggaccuggagggcaagcagggcaacuucaagaaccugcgggaguucguguucaagaacaucgacggcuacuucaagaucuacagcaagcacaccccaaucaaccuggugcgggaucugccccagggcuucucagcccuggagccccugguggaccugcccaucggcaucaacaucacccgguuccagacccugcuggcccugcaccggagcuaccugaccccaggcgacagcagcagcggguggacagcaggcgcggcugcuuacuacgugggcuaccugcagccccggaccuuccugcugaaguacaacgagaacggcaccaucaccgacgccguggacugcgcccuggacccucugagcgagaccaagugcacccugaagagcuucaccguggagaagggcaucuaccagaccagcaacuuccgggugcagcccaccgagagcaucgugcgguuccccaacaucaccaaccugugccccuucggcgagguguucaacgccacccgguucgccagcguguacgccuggaaccggaagcggaucagcaacugcguggccgacuacagcgugcuguacaacagcgccagcuucagcaccuucaagugcuacggcgugagccccaccaagcugaacgaccugugcuucaccaacguguacgccgacagcuucgugauccguggcgacgaggugcggcagaucgcacccggccagacaggcaagaucgccgacuacaacuacaagcugcccgacgacuucaccggcugcgugaucgccuggaacagcaacaaccucgacagcaaggugggcggcaacuacaacuaccuguuccggcuguuccggaagagcaaccugaagcccuucgagcgggacaucagcaccgagaucuaccaagccggcuccaccccuugcaacggcguggagggcuucaacugcuacuucccucugcagagcuacggcuuccagcccaccaacggcgugggcuaccagcccuaccgggugguggugcugagcuucgagcugcugcacgccccagccaccguguguggccccaagaagagcaccaaccuggugaagaacaagugcgugaacuucaacuucaacggccuuaccggcaccggcgugcugaccgagagcaacaagaaauuccugcccuuucagcaguucggccgggacaucgccgacaccaccgacgcugugcgggauccccagacccuggagauccuggacaucaccccuugcagcuucggcggcgugagcgugaucaccccaggcaccaacaccagcaaccagguggccgugcuguaccagggcgugaacugcaccgaggugcccguggccauccacgccgaccagcugacacccaccuggcgggucuacagcaccggcagcaacguguuccagacccgggccgguugccugaucggcgccgagcacgugaacaacagcuacgagugcgacauccccaucggcgccggcaucugugccagcuaccagacccagaccaauucaccccggagggcaaggagcguggccagccagagcgugaucgccuacaccaugagccugggcgccgagaacagcguggccuacagcaacaacagcaucgccauccccaccaacuucaccaucagcgugaccaccgagauucugcccgugagcaugaccaagaccagcguggacugcaccauguacaucugcggcgacagcaccgagugcagcaaccugcugcugcaguacggcagcuucugcacccagcugaaccgggcccugaccggcaucgccguggagcaggacaagaacacccaggagguguucgcccaggugaagcagaucuacaagaccccucccaucaaggacuucggcggcuucaacuucagccagauccugcccgaccccagcaagcccagcaagcggagcuucaucgaggaccugcuguucaacaaggugacccuagccgacgccggcuucaucaagcaguacggcgacugccucggcgacauagccgcccgggaccugaucugcgcccagaaguucaacggccugaccgugcugccuccccugcugaccgacgagaugaucgcccaguacaccagcgcccuguuagccggaaccaucaccagcggcuggacuuucggcgcuggagccgcucugcagauccccuucgccaugcagauggccuaccgguucaacggcaucggcgugacccagaacgugcuguacgagaaccagaagcugaucgccaaccaguucaacagcgccaucggcaagauccaggacagccugagcagcaccgcuagcgcccugggcaagcugcaggacguggugaaccagaacgcccaggcccugaacacccuggugaagcagcugagcagcaacuucggcgccaucagcagcgugcugaacgacauccugagccggcuggacaaggucgaggccgaggugcagaucgaccggcugaucacuggccggcugcagagccugcagaccuacgugacccagcagcugauccgggccgccgagauucgggccagcgccaaccuggccgccaccaagaugagcgagugcgugcugggccagagcaagcggguggacuucugcggcaagggcuaccaccugaugagcuuuccccagagcgcaccccacggagugguguuccugcacgugaccuacgugcccgcccaggagaagaacuucaccaccgccccagccaucugccacgacggcaaggcccacuuuccccgggagggcguguucgugagcaacggcacccacugguucgugacccagcggaacuucuacgagccccagaucaucaccaccgacaacaccuucgugagcggcaacugcgacguggugaucggcaucgugaacaacaccguguacgauccccugcagcccgagcuggacagcuucaaggaggagcuggacaaguacuucaagaaucacaccagccccgacguggaccugggcgacaucagcggcaucaacgccagcguggugaacauccagaaggagaucgaucggcugaacgagguggccaagaaccugaacgagagccugaucgaccugcaggagcugggcaaguacgagcaguacaucaaguggcccugguacaucuggcugggcuucaucgccggccugaucgccaucgugaucgugaccaucaugcugugcugcaugaccagcugcugcagcugccugaagggcuguugcagcugcggcagcugcugcaaguucgacgaggacgacagcgagcccgugcugaagggcgugaagcugcacuacaccugaggacuagucccuguucccagagcccacuuuuuuuucuuuuuuugaaauaaaauagccugucuuucagaucuaaaaaaaaaaaaaaaaaaaaaaaaaaaaaaaaaaaaaaaaaaaaaaaaaaaaaaaaaaaaaaaaaaaaaaaaaaaaaaaaaaaaaaaaaaaaaaaaaaaa

SEQ ID NO: 24997 - RNA, 4158 nt, Artificial Sequence
  SARS-CoV-2/Wuhan/WIV05/2019__EPI_ISL_402128 spike protein mRNA gc (1-1273)(H69del_V70del_Y144del_N501Y_A570D_D614G_P681H_T716I_S982 A_D1118H)
aggagagggcgcuuggcuugcaaggacccugagcugcggcauugaagcacacccaacccaacucgacugaagucagccucacugaaccggaucugagaaucuucucucucugggcuugccagggcucuccgaaccuagcuagcauccucuucaauuccaacuagaaagcuuaccauguucguguuccuggugcugcugccccuggugagcagccagugcgugaaccugaccacccggacccagcugccaccagccuacaccaacagcuucacccggggcgucuacuaccccgacaagguguuccggagcagcguccugcacagcacccaggaccuguuccugcccuucuucagcaacgugaccugguuccacgccaucagcggcaccaacggcaccaagcgguucgacaaccccgugcugcccuucaacgacggcguguacuucgccagcaccgagaagagcaacaucauccggggcuggaucuucggcaccacccuggacagcaagacccagagccugcugaucgugaauaacgccaccaacguggugaucaaggugugcgaguuccaguucugcaacgaccccuuccugggcguguaccacaagaacaacaagagcuggauggagagcgaguuccggguguacagcagcgccaacaacugcaccuucgaguacgugagccagcccuuccugauggaccuggagggcaagcagggcaacuucaagaaccugcgggaguucguguucaagaacaucgacggcuacuucaagaucuacagcaagcacaccccaaucaaccuggugcgggaucugccccagggcuucucagcccuggagccccugguggaccugcccaucggcaucaacaucacccgguuccagacccugcuggcccugcaccggagcuaccugaccccaggcgacagcagcagcggguggacagcaggcgcggcugcuuacuacgugggcuaccugcagccccggaccuuccugcugaaguacaacgagaacggcaccaucaccgacgccguggacugcgcccuggacccucugagcgagaccaagugcacccugaagagcuucaccguggagaagggcaucuaccagaccagcaacuuccgggugcagcccaccgagagcaucgugcgguuccccaacaucaccaaccugugccccuucggcgagguguucaacgccacccgguucgccagcguguacgccuggaaccggaagcggaucagcaacugcguggccgacuacagcgugcuguacaacagcgccagcuucagcaccuucaagugcuacggcgugagccccaccaagcugaacgaccugugcuucaccaacguguacgccgacagcuucgugauccguggcgacgaggugcggcagaucgcacccggccagacaggcaagaucgccgacuacaacuacaagcugcccgacgacuucaccggcugcgugaucgccuggaacagcaacaaccucgacagcaaggugggcggcaacuacaacuaccuguaccggcuguuccggaagagcaaccugaagcccuucgagcgggacaucagcaccgagaucuaccaagccggcuccaccccuugcaacggcguggagggcuucaacugcuacuucccucugcagagcuacggcuuccagcccaccuacggcgugggcuaccagcccuaccgggugguggugcugagcuucgagcugcugcacgccccagccaccguguguggccccaagaagagcaccaaccuggugaagaacaagugcgugaacuucaacuucaacggccuuaccggcaccggcgugcugaccgagagcaacaagaaauuccugcccuuucagcaguucggccgggacaucgacgacaccaccgacgcugugcgggauccccagacccuggagauccuggacaucaccccuugcagcuucggcggcgugagcgugaucaccccaggcaccaacaccagcaaccagguggccgugcuguaccagggcgugaacugcaccgaggugcccguggccauccacgccgaccagcugacacccaccuggcgggucuacagcaccggcagcaacguguuccagacccgggccgguugccugaucggcgccgagcacgugaacaacagcuacgagugcgacauccccaucggcgccggcaucugugccagcuaccagacccagaccaauucacaccggagggcaaggagcguggccagccagagcaucaucgccuacaccaugagccugggcgccgagaacagcguggccuacagcaacaacagcaucgccauccccaucaacuucaccaucagcgugaccaccgagauucugcccgugagcaugaccaagaccagcguggacugcaccauguacaucugcggcgacagcaccgagugcagcaaccugcugcugcaguacggcagcuucugcacccagcugaaccgggcccugaccggcaucgccguggagcaggacaagaacacccaggagguguucgcccaggugaagcagaucuacaagaccccucccaucaaggacuucggcggcuucaacuucagccagauccugcccgaccccagcaagcccagcaagcggagcuucaucgaggaccugcuguucaacaaggugacccuagccgacgccggcuucaucaagcaguacggcgacugccucggcgacauagccgcccgggaccugaucugcgcccagaaguucaacggccugaccgugcugccuccccugcugaccgacgagaugaucgcccaguacaccagcgcccuguuagccggaaccaucaccagcggcuggacuuucggcgcuggagccgcucugcagauccccuucgccaugcagauggccuaccgguucaacggcaucggcgugacccagaacgugcuguacgagaaccagaagcugaucgccaaccaguucaacagcgccaucggcaagauccaggacagccugagcagcaccgcuagcgcccugggcaagcugcaggacguggugaaccagaacgcccaggcccugaacacccuggugaagcagcugagcagcaacuucggcgccaucagcagcgugcugaacgacauccuggcccggcuggacaaggucgaggccgaggugcagaucgaccggcugaucacuggccggcugcagagccugcagaccuacgugacccagcagcugauccgggccgccgagauucgggccagcgccaaccuggccgccaccaagaugagcgagugcgugcugggccagagcaagcggguggacuucugcggcaagggcuaccaccugaugagcuuuccccagagcgcaccccacggagugguguuccugcacgugaccuacgugcccgcccaggagaagaacuucaccaccgccccagccaucugccacgacggcaaggcccacuuuccccgggagggcguguucgugagcaacggcacccacugguucgugacccagcggaacuucuacgagccccagaucaucaccacccacaacaccuucgugagcggcaacugcgacguggugaucggcaucgugaacaacaccguguacgauccccugcagcccgagcuggacagcuucaaggaggagcuggacaaguacuucaagaaucacaccagccccgacguggaccugggcgacaucagcggcaucaacgccagcguggugaacauccagaaggagaucgaucggcugaacgagguggccaagaaccugaacgagagccugaucgaccugcaggagcugggcaaguacgagcaguacaucaaguggcccugguacaucuggcugggcuucaucgccggccugaucgccaucgugauggugaccaucaugcugugcugcaugaccagcugcugcagcugccugaagggcuguugcagcugcggcagcugcugcaaguucgacgaggacgacagcgagcccgugcugaagggcgugaagcugcacuacaccugaggacuagucccuguucccagagcccacuuuuuuuucuuuuuuugaaauaaaauagccugucuuucagaucuaaaaaaaaaaaaaaaaaaaaaaaaaaaaaaaaaaaaaaaaaaaaaaaaaaaaaaaaaaaaaaaaaaaaaaaaaaaaaaaaaaaaaaaaaaaaaaaaaaaa

SEQ ID NO: 24998 - RNA, 4167 nt, Artificial Sequence
  SARS-CoV-2/Wuhan/WIV05/2019__EPI_ISL_402128 spike protein mRNA gc (1-1273)(K417N_E484K_N501Y_D614G)
aggagagggcgcuuggcuugcaaggacccugagcugcggcauugaagcacacccaacccaacucgacugaagucagccucacugaaccggaucugagaaucuucucucucugggcuugccagggcucuccgaaccuagcuagcauccucuucaauuccaacuagaaagcuuaccauguucguguuccuggugcugcugccccuggugagcagccagugcgugaaccugaccacccggacccagcugccaccagccuacaccaacagcuucacccggggcgucuacuaccccgacaagguguuccggagcagcguccugcacagcacccaggaccuguuccugcccuucuucagcaacgugaccugguuccacgccauccacgugagcggcaccaacggcaccaagcgguucgacaaccccgugcugcccuucaacgacggcguguacuucgccagcaccgagaagagcaacaucauccggggcuggaucuucggcaccacccuggacagcaagacccagagccugcugaucgugaauaacgccaccaacguggugaucaaggugugcgaguuccaguucugcaacgaccccuuccugggcguguacuaccacaagaacaacaagagcuggauggagagcgaguuccggguguacagcagcgccaacaacugcaccuucgaguacgugagccagcccuuccugauggaccuggagggcaagcagggcaacuucaagaaccugcgggaguucguguucaagaacaucgacggcuacuucaagaucuacagcaagcacaccccaaucaaccuggugcgggaucugccccagggcuucucagcccuggagccccugguggaccugcccaucggcaucaacaucacccgguuccagacccugcuggcccugcaccggagcuaccugaccccaggcgacagcagcagcggguggacagcaggcgcggcugcuuacuacgugggcuaccugcagccccggaccuuccugcugaaguacaacgagaacggcaccaucaccgacgccguggacugcgcccuggacccucugagcgagaccaagugcacccugaagagcuucaccguggagaagggcaucuaccagaccagcaacuuccgggugcagcccaccgagagcaucgugcgguuccccaacaucaccaaccugugccccuucggcgagguguucaacgccacccgguucgccagcguguacgccuggaaccggaagcggaucagcaacugcguggccgacuacagcgugcuguacaacagcgccagcuucagcaccuucaagugcuacggcgugagccccaccaagcugaacgaccugugcuucaccaacguguacgccgacagcuucgugauccguggcgacgaggugcggcagaucgcacccggccagacaggcaacaucgccgacuacaacuacaagcugcccgacgacuucaccggcugcgugaucgccuggaacagcaacaaccucgacagcaaggugggcggcaacuacaacuaccuguaccggcuguuccggaagagcaaccugaagcccuucgagcgggacaucagcaccgagaucuaccaagccggcuccaccccuugcaacggcgugaagggcuucaacugcuacuucccucugcagagcuacggcuuccagcccaccuacggcgugggcuaccagcccuaccgggugguggugcugagcuucgagcugcugcacgccccagccaccguguguggccccaagaagagcaccaaccuggugaagaacaagugcgugaacuucaacuucaacggccuuaccggcaccggcgugcugaccgagagcaacaagaaauuccugcccuuucagcaguucggccgggacaucgccgacaccaccgacgcugugcgggauccccagacccuggagauccuggacaucaccccuugcagcuucggcggcgugagcgugaucaccccaggcaccaacaccagcaaccagguggccgugcuguaccagggcgugaacugcaccgaggugcccguggccauccacgccgaccagcugacacccaccuggcgggucuacagcaccggcagcaacguguuccagacccgggccgguugccugaucggcgccgagcacgugaacaacagcuacgagugcgacauccccaucggcgccggcaucugugccagcuaccagacccagaccaauucaccccggagggcaaggagcguggccagccagagcaucaucgccuacaccaugagccugggcgccgagaacagcguggccuacagcaacaacagcaucgccauccccaccaacuucaccaucagcgugaccaccgagauucugcccgugagcaugaccaagaccagcguggacugcaccauguacaucugcggcgacagcaccgagugcagcaaccugcugcugcaguacggcagcuucugcacccagcugaaccgggcccugaccggcaucgccguggagcaggacaagaacacccaggagguguucgcccaggugaagcagaucuacaagaccccucccaucaaggacuucggcggcuucaacuucagccagauccugcccgaccccagcaagcccagcaagcggagcuucaucgaggaccugcuguucaacaaggugacccuagccgacgccggcuucaucaagcaguacggcgacugccucggcgacauagccgcccgggaccugaucugcgcccagaaguucaacggccugaccgugcugccuccccugcugaccgacgagaugaucgcccaguacaccagcgcccuguuagccggaaccaucaccagcggcuggacuuucggcgcuggagccgcucugcagauccccuucgccaugcagauggccuaccgguucaacggcaucggcgugacccagaacgugcuguacgagaaccagaagcugaucgccaaccaguucaacagcgccaucggcaagauccaggacagccugagcagcaccgcuagcgcccugggcaagcugcaggacguggugaaccagaacgcccaggcccugaacacccuggugaagcagcugagcagcaacuucggcgccaucagcagcgugcugaacgacauccugagccggcuggacaaggucgaggccgaggugcagaucgaccggcugaucacuggccggcugcagagccugcagaccuacgugacccagcagcugauccgggccgccgagauucgggccagcgccaaccuggccgccaccaagaugagcgagugcgugcugggccagagcaagcggguggacuucugcggcaagggcuaccaccugaugagcuuuccccagagcgcaccccacggagugguguuccugcacgugaccuacgugcccgcccaggagaagaacuucaccaccgccccagccaucugccacgacggcaaggcccacuuuccccgggagggcguguucgugagcaacggcacccacugguucgugacccagcggaacuucuacgagccccagaucaucaccaccgacaacaccuucgugagcggcaacugcgacguggugaucggcaucgugaacaacaccguguacgauccccugcagcccgagcuggacagcuucaaggaggagcuggacaaguacuucaagaaucacaccagccccgacguggaccugggcgacaucagcggcaucaacgccagcguggugaacauccagaaggagaucgaucggcugaacgagguggccaagaaccugaacgagagccugaucgaccugcaggagcugggcaaguacgagcaguacaucaaguggcccugguacaucuggcugggcuucaucgccggccugaucgccaucgugauggugaccaucaugcugugcugcaugaccagcugcugcagcugccugaagggcuguugcagcugcggcagcugcugcaaguucgacgaggacgacagcgagcccgugcugaagggcgugaagcugcacuacaccugaggacuagucccuguucccagagcccacuuuuuuuucuuuuuuugaaauaaaauagccugucuuucagaucuaaaaaaaaaaaaaaaaaaaaaaaaaaaaaaaaaaaaaaaaaaaaaaaaaaaaaaaaaaaaaaaaaaaaaaaaaaaaaaaaaaaaaaaaaaaaaaaaaaaa

SEQ ID NO: 24999 - RNA, 4158 nt, Artificial Sequence
  SARS-CoV-2/Wuhan/WIV05/2019__EPI_ISL_402128 spike protein mRNA gc (1-1273)(L18F_D80A_D215G_L242del_A243del_L244del_R246I_K417N_E484 K_N501Y_D614G_A701V)
aggagagggcgcuuggcuugcaaggacccugagcugcggcauugaagcacacccaacccaacucgacugaagucagccucacugaaccggaucugagaaucuucucucucugggcuugccagggcucuccgaaccuagcuagcauccucuucaauuccaacuagaaagcuuaccauguucguguuccuggugcugcugccccuggugagcagccagugcgugaacuucaccacccggacccagcugccaccagccuacaccaacagcuucacccggggcgucuacuaccccgacaagguguuccggagcagcguccugcacagcacccaggaccuguuccugcccuucuucagcaacgugaccugguuccacgccauccacgugagcggcaccaacggcaccaagcgguucgccaaccccgugcugcccuucaacgacggcguguacuucgccagcaccgagaagagcaacaucauccggggcuggaucuucggcaccacccuggacagcaagacccagagccugcugaucgugaauaacgccaccaacguggugaucaaggugugcgaguuccaguucugcaacgaccccuuccugggcguguacuaccacaagaacaacaagagcuggauggagagcgaguuccggguguacagcagcgccaacaacugcaccuucgaguacgugagccagcccuuccugauggaccuggagggcaagcagggcaacuucaagaaccugcgggaguucguguucaagaacaucgacggcuacuucaagaucuacagcaagcacaccccaaucaaccuggugcggggccugccccagggcuucucagcccuggagccccugguggaccugcccaucggcaucaacaucacccgguuccagacccugcacaucagcuaccugaccccaggcgacagcagcagcggguggacagcaggcgcggcugcuuacuacgugggcuaccugcagccccggaccuuccugcugaaguacaacgagaacggcaccaucaccgacgccguggacugcgcccuggacccucugagcgagaccaagugcacccugaagagcuucaccguggagaagggcaucuaccagaccagcaacuuccgggugcagcccaccgagagcaucgugcgguuccccaacaucaccaaccugugccccuucggcgagguguucaacgccacccgguucgccagcguguacgccuggaaccggaagcggaucagcaacugcguggccgacuacagcgugcuguacaacagcgccagcuucagcaccuucaagugcuacggcgugagccccaccaagcugaacgaccugugcuucaccaacguguacgccgacagcuucgugauccguggcgacgaggugcggcagaucgcacccggccagacaggcaacaucgccgacuacaacuacaagcugcccgacgacuucaccggcugcgugaucgccuggaacagcaacaaccucgacagcaaggugggcggcaacuacaacuaccuguaccggcuguuccggaagagcaaccugaagcccuucgagcgggacaucagcaccgagaucuaccaagccggcuccaccccuugcaacggcgugaagggcuucaacugcuacuucccucugcagagcuacggcuuccagcccaccuacggcgugggcuaccagcccuaccgggugguggugcugagcuucgagcugcugcacgccccagccaccguguguggccccaagaagagcaccaaccuggugaagaacaagugcgugaacuucaacuucaacggccuuaccggcaccggcgugcugaccgagagcaacaagaaauuccugcccuuucagcaguucggccgggacaucgccgacaccaccgacgcugugcgggauccccagacccuggagauccuggacaucaccccuugcagcuucggcggcgugagcgugaucaccccaggcaccaacaccagcaaccagguggccgugcuguaccagggcgugaacugcaccgaggugcccguggccauccacgccgaccagcugacacccaccuggcgggucuacagcaccggcagcaacguguuccagacccgggccgguugccugaucggcgccgagcacgugaacaacagcuacgagugcgacauccccaucggcgccggcaucugugccagcuaccagacccagaccaauucaccccggagggcaaggagcguggccagccagagcaucaucgccuacaccaugagccugggcguggagaacagcguggccuacagcaacaacagcaucgccauccccaccaacuucaccaucagcgugaccaccgagauucugcccgugagcaugaccaagaccagcguggacugcaccauguacaucugcggcgacagcaccgagugcagcaaccugcugcugcaguacggcagcuucugcacccagcugaaccgggcccugaccggcaucgccguggagcaggacaagaacacccaggagguguucgcccaggugaagcagaucuacaagaccccucccaucaaggacuucggcggcuucaacuucagccagauccugcccgaccccagcaagcccagcaagcggagcuucaucgaggaccugcuguucaacaaggugacccuagccgacgccggcuucaucaagcaguacggcgacugccucggcgacauagccgcccgggaccugaucugcgcccagaaguucaacggccugaccgugcugccuccccugcugaccgacgagaugaucgcccaguacaccagcgcccuguuagccggaaccaucaccagcggcuggacuuucggcgcuggagccgcucugcagauccccuucgccaugcagauggccuaccgguucaacggcaucggcgugacccagaacgugcuguacgagaaccagaagcugaucgccaaccaguucaacagcgccaucggcaagauccaggacagccugagcagcaccgcuagcgcccugggcaagcugcaggacguggugaaccagaacgcccaggcccugaacacccuggugaagcagcugagcagcaacuucggcgccaucagcagcgugcugaacgacauccugagccggcuggacaaggucgaggccgaggugcagaucgaccggcugaucacuggccggcugcagagccugcagaccuacgugacccagcagcugauccgggccgccgagauucgggccagcgccaaccuggccgccaccaagaugagcgagugcgugcugggccagagcaagcggguggacuucugcggcaagggcuaccaccugaugagcuuuccccagagcgcaccccacggagugguguuccugcacgugaccuacgugcccgcccaggagaagaacuucaccaccgccccagccaucugccacgacggcaaggcccacuuuccccgggagggcguguucgugagcaacggcacccacugguucgugacccagcggaacuucuacgagccccagaucaucaccaccgacaacaccuucgugagcggcaacugcgacguggugaucggcaucgugaacaacaccguguacgauccccugcagcccgagcuggacagcuucaaggaggagcuggacaaguacuucaagaaucacaccagccccgacguggaccugggcgacaucagcggcaucaacgccagcguggugaacauccagaaggagaucgaucggcugaacgagguggccaagaaccugaacgagagccugaucgaccugcaggagcugggcaaguacgagcaguacaucaaguggcccugguacaucuggcugggcuucaucgccggccugaucgccaucgugauggugaccaucaugcugugcugcaugaccagcugcugcagcugccugaagggcuguugcagcugcggcagcugcugcaaguucgacgaggacgacagcgagcccgugcugaagggcgugaagcugcacuacaccugaggacuagucccuguucccagagcccacuuuuuuuucuuuuuuugaaauaaaauagccugucuuucagaucuaaaaaaaaaaaaaaaaaaaaaaaaaaaaaaaaaaaaaaaaaaaaaaaaaaaaaaaaaaaaaaaaaaaaaaaaaaaaaaaaaaaaaaaaaaaaaaaaaaaa

SEQ ID NO: 25000 - RNA, 4167 nt, Artificial Sequence
  SARS-CoV-2/Wuhan/WIV05/2019__EPI_ISL_402128 spike protein mRNA gc (1-1273)(E484K_D614G)
aggagagggcgcuuggcuugcaaggacccugagcugcggcauugaagcacacccaacccaacucgacugaagucagccucacugaaccggaucugagaaucuucucucucugggcuugccagggcucuccgaaccuagcuagcauccucuucaauuccaacuagaaagcuuaccauguucguguuccuggugcugcugccccuggugagcagccagugcgugaaccugaccacccggacccagcugccaccagccuacaccaacagcuucacccggggcgucuacuaccccgacaagguguuccggagcagcguccugcacagcacccaggaccuguuccugcccuucuucagcaacgugaccugguuccacgccauccacgugagcggcaccaacggcaccaagcgguucgacaaccccgugcugcccuucaacgacggcguguacuucgccagcaccgagaagagcaacaucauccggggcuggaucuucggcaccacccuggacagcaagacccagagccugcugaucgugaauaacgccaccaacguggugaucaaggugugcgaguuccaguucugcaacgaccccuuccugggcguguacuaccacaagaacaacaagagcuggauggagagcgaguuccggguguacagcagcgccaacaacugcaccuucgaguacgugagccagcccuuccugauggaccuggagggcaagcagggcaacuucaagaaccugcgggaguucguguucaagaacaucgacggcuacuucaagaucuacagcaagcacaccccaaucaaccuggugcgggaucugccccagggcuucucagcccuggagccccugguggaccugcccaucggcaucaacaucacccgguuccagacccugcuggcccugcaccggagcuaccugaccccaggcgacagcagcagcggguggacagcaggcgcggcugcuuacuacgugggcuaccugcagccccggaccuuccugcugaaguacaacgagaacggcaccaucaccgacgccguggacugcgcccuggacccucugagcgagaccaagugcacccugaagagcuucaccguggagaagggcaucuaccagaccagcaacuuccgggugcagcccaccgagagcaucgugcgguuccccaacaucaccaaccugugccccuucggcgagguguucaacgccacccgguucgccagcguguacgccuggaaccggaagcggaucagcaacugcguggccgacuacagcgugcuguacaacagcgccagcuucagcaccuucaagugcuacggcgugagccccaccaagcugaacgaccugugcuucaccaacguguacgccgacagcuucgugauccguggcgacgaggugcggcagaucgcacccggccagacaggcaagaucgccgacuacaacuacaagcugcccgacgacuucaccggcugcgugaucgccuggaacagcaacaaccucgacagcaaggugggcggcaacuacaacuaccuguaccggcuguuccggaagagcaaccugaagcccuucgagcgggacaucagcaccgagaucuaccaagccggcuccaccccuugcaacggcgugaagggcuucaacugcuacuucccucugcagagcuacggcuuccagcccaccaacggcgugggcuaccagcccuaccgggugguggugcugagcuucgagcugcugcacgccccagccaccguguguggccccaagaagagcaccaaccuggugaagaacaagugcgugaacuucaacuucaacggccuuaccggcaccggcgugcugaccgagagcaacaagaaauuccugcccuuucagcaguucggccgggacaucgccgacaccaccgacgcugugcgggauccccagacccuggagauccuggacaucaccccuugcagcuucggcggcgugagcgugaucaccccaggcaccaacaccagcaaccagguggccgugcuguaccagggcgugaacugcaccgaggugcccguggccauccacgccgaccagcugacacccaccuggcgggucuacagcaccggcagcaacguguuccagacccgggccgguugccugaucggcgccgagcacgugaacaacagcuacgagugcgacauccccaucggcgccggcaucugugccagcuaccagacccagaccaauucaccccggagggcaaggagcguggccagccagagcaucaucgccuacaccaugagccugggcgccgagaacagcguggccuacagcaacaacagcaucgccauccccaccaacuucaccaucagcgugaccaccgagauucugcccgugagcaugaccaagaccagcguggacugcaccauguacaucugcggcgacagcaccgagugcagcaaccugcugcugcaguacggcagcuucugcacccagcugaaccgggcccugaccggcaucgccguggagcaggacaagaacacccaggagguguucgcccaggugaagcagaucuacaagaccccucccaucaaggacuucggcggcuucaacuucagccagauccugcccgaccccagcaagcccagcaagcggagcuucaucgaggaccugcuguucaacaaggugacccuagccgacgccggcuucaucaagcaguacggcgacugccucggcgacauagccgcccgggaccugaucugcgcccagaaguucaacggccugaccgugcugccuccccugcugaccgacgagaugaucgcccaguacaccagcgcccuguuagccggaaccaucaccagcggcuggacuuucggcgcuggagccgcucugcagauccccuucgccaugcagauggccuaccgguucaacggcaucggcgugacccagaacgugcuguacgagaaccagaagcugaucgccaaccaguucaacagcgccaucggcaagauccaggacagccugagcagcaccgcuagcgcccugggcaagcugcaggacguggugaaccagaacgcccaggcccugaacacccuggugaagcagcugagcagcaacuucggcgccaucagcagcgugcugaacgacauccugagccggcuggacaaggucgaggccgaggugcagaucgaccggcugaucacuggccggcugcagagccugcagaccuacgugacccagcagcugauccgggccgccgagauucgggccagcgccaaccuggccgccaccaagaugagcgagugcgugcugggccagagcaagcggguggacuucugcggcaagggcuaccaccugaugagcuuuccccagagcgcaccccacggagugguguuccugcacgugaccuacgugcccgcccaggagaagaacuucaccaccgccccagccaucugccacgacggcaaggcccacuuuccccgggagggcguguucgugagcaacggcacccacugguucgugacccagcggaacuucuacgagccccagaucaucaccaccgacaacaccuucgugagcggcaacugcgacguggugaucggcaucgugaacaacaccguguacgauccccugcagcccgagcuggacagcuucaaggaggagcuggacaaguacuucaagaaucacaccagccccgacguggaccugggcgacaucagcggcaucaacgccagcguggugaacauccagaaggagaucgaucggcugaacgagguggccaagaaccugaacgagagccugaucgaccugcaggagcugggcaaguacgagcaguacaucaaguggcccugguacaucuggcugggcuucaucgccggccugaucgccaucgugauggugaccaucaugcugugcugcaugaccagcugcugcagcugccugaagggcuguugcagcugcggcagcugcugcaaguucgacgaggacgacagcgagcccgugcugaagggcgugaagcugcacuacaccugaggacuagucccuguucccagagcccacuuuuuuuucuuuuuuugaaauaaaauagccugucuuucagaucuaaaaaaaaaaaaaaaaaaaaaaaaaaaaaaaaaaaaaaaaaaaaaaaaaaaaaaaaaaaaaaaaaaaaaaaaaaaaaaaaaaaaaaaaaaaaaaaaaaaa

SEQ ID NO: 25001 - RNA, 4167 nt, Artificial Sequence
  SARS-CoV-2/Wuhan/WIV05/2019__EPI_ISL_402128 spike protein mRNA gc (1-1273)(L18F_T20N_P26S_D138Y_R190S_K417T_E484K_N501Y_D614G_H655Y _T1027I)
aggagagggcgcuuggcuugcaaggacccugagcugcggcauugaagcacacccaacccaacucgacugaagucagccucacugaaccggaucugagaaucuucucucucugggcuugccagggcucuccgaaccuagcuagcauccucuucaauuccaacuagaaagcuuaccauguucguguuccuggugcugcugccccuggugagcagccagugcgugaacuucaccaaccggacccagcugccaagcgccuacaccaacagcuucacccggggcgucuacuaccccgacaagguguuccggagcagcguccugcacagcacccaggaccuguuccugcccuucuucagcaacgugaccugguuccacgccauccacgugagcggcaccaacggcaccaagcgguucgacaaccccgugcugcccuucaacgacggcguguacuucgccagcaccgagaagagcaacaucauccggggcuggaucuucggcaccacccuggacagcaagacccagagccugcugaucgugaauaacgccaccaacguggugaucaaggugugcgaguuccaguucugcaacuaccccuuccugggcguguacuaccacaagaacaacaagagcuggauggagagcgaguuccggguguacagcagcgccaacaacugcaccuucgaguacgugagccagcccuuccugauggaccuggagggcaagcagggcaacuucaagaaccugagcgaguucguguucaagaacaucgacggcuacuucaagaucuacagcaagcacaccccaaucaaccuggugcgggaucugccccagggcuucucagcccuggagccccugguggaccugcccaucggcaucaacaucacccgguuccagacccugcuggcccugcaccggagcuaccugaccccaggcgacagcagcagcggguggacagcaggcgcggcugcuuacuacgugggcuaccugcagccccggaccuuccugcugaaguacaacgagaacggcaccaucaccgacgccguggacugcgcccuggacccucugagcgagaccaagugcacccugaagagcuucaccguggagaagggcaucuaccagaccagcaacuuccgggugcagcccaccgagagcaucgugcgguuccccaacaucaccaaccugugccccuucggcgagguguucaacgccacccgguucgccagcguguacgccuggaaccggaagcggaucagcaacugcguggccgacuacagcgugcuguacaacagcgccagcuucagcaccuucaagugcuacggcgugagccccaccaagcugaacgaccugugcuucaccaacguguacgccgacagcuucgugauccguggcgacgaggugcggcagaucgcacccggccagacaggcaccaucgccgacuacaacuacaagcugcccgacgacuucaccggcugcgugaucgccuggaacagcaacaaccucgacagcaaggugggcggcaacuacaacuaccuguaccggcuguuccggaagagcaaccugaagcccuucgagcgggacaucagcaccgagaucuaccaagccggcuccaccccuugcaacggcgugaagggcuucaacugcuacuucccucugcagagcuacggcuuccagcccaccuacggcgugggcuaccagcccuaccgggugguggugcugagcuucgagcugcugcacgccccagccaccguguguggccccaagaagagcaccaaccuggugaagaacaagugcgugaacuucaacuucaacggccuuaccggcaccggcgugcugaccgagagcaacaagaaauuccugcccuuucagcaguucggccgggacaucgccgacaccaccgacgcugugcgggauccccagacccuggagauccuggacaucaccccuugcagcuucggcggcgugagcgugaucaccccaggcaccaacaccagcaaccagguggccgugcuguaccagggcgugaacugcaccgaggugcccguggccauccacgccgaccagcugacacccaccuggcgggucuacagcaccggcagcaacguguuccagacccgggccgguugccugaucggcgccgaguacgugaacaacagcuacgagugcgacauccccaucggcgccggcaucugugccagcuaccagacccagaccaauucaccccggagggcaaggagcguggccagccagagcaucaucgccuacaccaugagccugggcgccgagaacagcguggccuacagcaacaacagcaucgccauccccaccaacuucaccaucagcgugaccaccgagauucugcccgugagcaugaccaagaccagcguggacugcaccauguacaucugcggcgacagcaccgagugcagcaaccugcugcugcaguacggcagcuucugcacccagcugaaccgggcccugaccggcaucgccguggagcaggacaagaacacccaggagguguucgcccaggugaagcagaucuacaagaccccucccaucaaggacuucggcggcuucaacuucagccagauccugcccgaccccagcaagcccagcaagcggagcuucaucgaggaccugcuguucaacaaggugacccuagccgacgccggcuucaucaagcaguacggcgacugccucggcgacauagccgcccgggaccugaucugcgcccagaaguucaacggccugaccgugcugccuccccugcugaccgacgagaugaucgcccaguacaccagcgcccuguuagccggaaccaucaccagcggcuggacuuucggcgcuggagccgcucugcagauccccuucgccaugcagauggccuaccgguucaacggcaucggcgugacccagaacgugcuguacgagaaccagaagcugaucgccaaccaguucaacagcgccaucggcaagauccaggacagccugagcagcaccgcuagcgcccugggcaagcugcaggacguggugaaccagaacgcccaggcccugaacacccuggugaagcagcugagcagcaacuucggcgccaucagcagcgugcugaacgacauccugagccggcuggacaaggucgaggccgaggugcagaucgaccggcugaucacuggccggcugcagagccugcagaccuacgugacccagcagcugauccgggccgccgagauucgggccagcgccaaccuggccgccaucaagaugagcgagugcgugcugggccagagcaagcggguggacuucugcggcaagggcuaccaccugaugagcuuuccccagagcgcaccccacggagugguguuccugcacgugaccuacgugcccgcccaggagaagaacuucaccaccgccccagccaucugccacgacggcaaggcccacuuuccccgggagggcguguucgugagcaacggcacccacugguucgugacccagcggaacuucuacgagccccagaucaucaccaccgacaacaccuucgugagcggcaacugcgacguggugaucggcaucgugaacaacaccguguacgauccccugcagcccgagcuggacagcuucaaggaggagcuggacaaguacuucaagaaucacaccagccccgacguggaccugggcgacaucagcggcaucaacgccagcguggugaacauccagaaggagaucgaucggcugaacgagguggccaagaaccugaacgagagccugaucgaccugcaggagcugggcaaguacgagcaguacaucaaguggcccugguacaucuggcugggcuucaucgccggccugaucgccaucgugauggugaccaucaugcugugcugcaugaccagcugcugcagcugccugaagggcuguugcagcugcggcagcugcugcaaguucgacgaggacgacagcgagcccgugcugaagggcgugaagcugcacuacaccugaggacuagucccuguucccagagcccacuuuuuuuucuuuuuuugaaauaaaauagccugucuuucagaucuaaaaaaaaaaaaaaaaaaaaaaaaaaaaaaaaaaaaaaaaaaaaaaaaaaaaaaaaaaaaaaaaaaaaaaaaaaaaaaaaaaaaaaaaaaaaaaaaaaaa

SEQ ID NO: 25002 - RNA, 4167 nt, Artificial Sequence
  SARS-CoV-2/Wuhan/WIV05/2019__EPI_ISL_402128 spike protein mRNA gc (1-1273)(S13I_W152C_L452R_D614G)
aggagagggcgcuuggcuugcaaggacccugagcugcggcauugaagcacacccaacccaacucgacugaagucagccucacugaaccggaucugagaaucuucucucucugggcuugccagggcucuccgaaccuagcuagcauccucuucaauuccaacuagaaagcuuaccauguucguguuccuggugcugcugccccuggugagcauccagugcgugaaccugaccacccggacccagcugccaccagccuacaccaacagcuucacccggggcgucuacuaccccgacaagguguuccggagcagcguccugcacagcacccaggaccuguuccugcccuucuucagcaacgugaccugguuccacgccauccacgugagcggcaccaacggcaccaagcgguucgacaaccccgugcugcccuucaacgacggcguguacuucgccagcaccgagaagagcaacaucauccggggcuggaucuucggcaccacccuggacagcaagacccagagccugcugaucgugaauaacgccaccaacguggugaucaaggugugcgaguuccaguucugcaacgaccccuuccugggcguguacuaccacaagaacaacaagagcugcauggagagcgaguuccggguguacagcagcgccaacaacugcaccuucgaguacgugagccagcccuuccugauggaccuggagggcaagcagggcaacuucaagaaccugcgggaguucguguucaagaacaucgacggcuacuucaagaucuacagcaagcacaccccaaucaaccuggugcgggaucugccccagggcuucucagcccuggagccccugguggaccugcccaucggcaucaacaucacccgguuccagacccugcuggcccugcaccggagcuaccugaccccaggcgacagcagcagcggguggacagcaggcgcggcugcuuacuacgugggcuaccugcagccccggaccuuccugcugaaguacaacgagaacggcaccaucaccgacgccguggacugcgcccuggacccucugagcgagaccaagugcacccugaagagcuucaccguggagaagggcaucuaccagaccagcaacuuccgggugcagcccaccgagagcaucgugcgguuccccaacaucaccaaccugugccccuucggcgagguguucaacgccacccgguucgccagcguguacgccuggaaccggaagcggaucagcaacugcguggccgacuacagcgugcuguacaacagcgccagcuucagcaccuucaagugcuacggcgugagccccaccaagcugaacgaccugugcuucaccaacguguacgccgacagcuucgugauccguggcgacgaggugcggcagaucgcacccggccagacaggcaagaucgccgacuacaacuacaagcugcccgacgacuucaccggcugcgugaucgccuggaacagcaacaaccucgacagcaaggugggcggcaacuacaacuaccgcuaccggcuguuccggaagagcaaccugaagcccuucgagcgggacaucagcaccgagaucuaccaagccggcuccaccccuugcaacggcguggagggcuucaacugcuacuucccucugcagagcuacggcuuccagcccaccaacggcgugggcuaccagcccuaccgggugguggugcugagcuucgagcugcugcacgccccagccaccguguguggccccaagaagagcaccaaccuggugaagaacaagugcgugaacuucaacuucaacggccuuaccggcaccggcgugcugaccgagagcaacaagaaauuccugcccuuucagcaguucggccgggacaucgccgacaccaccgacgcugugcgggauccccagacccuggagauccuggacaucaccccuugcagcuucggcggcgugagcgugaucaccccaggcaccaacaccagcaaccagguggccgugcuguaccagggcgugaacugcaccgaggugcccguggccauccacgccgaccagcugacacccaccuggcgggucuacagcaccggcagcaacguguuccagacccgggccgguugccugaucggcgccgagcacgugaacaacagcuacgagugcgacauccccaucggcgccggcaucugugccagcuaccagacccagaccaauucaccccggagggcaaggagcguggccagccagagcaucaucgccuacaccaugagccugggcgccgagaacagcguggccuacagcaacaacagcaucgccauccccaccaacuucaccaucagcgugaccaccgagauucugcccgugagcaugaccaagaccagcguggacugcaccauguacaucugcggcgacagcaccgagugcagcaaccugcugcugcaguacggcagcuucugcacccagcugaaccgggcccugaccggcaucgccguggagcaggacaagaacacccaggagguguucgcccaggugaagcagaucuacaagaccccucccaucaaggacuucggcggcuucaacuucagccagauccugcccgaccccagcaagcccagcaagcggagcuucaucgaggaccugcuguucaacaaggugacccuagccgacgccggcuucaucaagcaguacggcgacugccucggcgacauagccgcccgggaccugaucugcgcccagaaguucaacggccugaccgugcugccuccccugcugaccgacgagaugaucgcccaguacaccagcgcccuguuagccggaaccaucaccagcggcuggacuuucggcgcuggagccgcucugcagauccccuucgccaugcagauggccuaccgguucaacggcaucggcgugacccagaacgugcuguacgagaaccagaagcugaucgccaaccaguucaacagcgccaucggcaagauccaggacagccugagcagcaccgcuagcgcccugggcaagcugcaggacguggugaaccagaacgcccaggcccugaacacccuggugaagcagcugagcagcaacuucggcgccaucagcagcgugcugaacgacauccugagccggcuggacaaggucgaggccgaggugcagaucgaccggcugaucacuggccggcugcagagccugcagaccuacgugacccagcagcugauccgggccgccgagauucgggccagcgccaaccuggccgccaccaagaugagcgagugcgugcugggccagagcaagcggguggacuucugcggcaagggcuaccaccugaugagcuuuccccagagcgcaccccacggagugguguuccugcacgugaccuacgugcccgcccaggagaagaacuucaccaccgccccagccaucugccacgacggcaaggcccacuuuccccgggagggcguguucgugagcaacggcacccacugguucgugacccagcggaacuucuacgagccccagaucaucaccaccgacaacaccuucgugagcggcaacugcgacguggugaucggcaucgugaacaacaccguguacgauccccugcagcccgagcuggacagcuucaaggaggagcuggacaaguacuucaagaaucacaccagccccgacguggaccugggcgacaucagcggcaucaacgccagcguggugaacauccagaaggagaucgaucggcugaacgagguggccaagaaccugaacgagagccugaucgaccugcaggagcugggcaaguacgagcaguacaucaaguggcccugguacaucuggcugggcuucaucgccggccugaucgccaucgugauggugaccaucaugcugugcugcaugaccagcugcugcagcugccugaagggcuguugcagcugcggcagcugcugcaaguucgacgaggacgacagcgagcccgugcugaagggcgugaagcugcacuacaccugaggacuagucccuguucccagagcccacuuuuuuuucuuuuuuugaaauaaaauagccugucuuucagaucuaaaaaaaaaaaaaaaaaaaaaaaaaaaaaaaaaaaaaaaaaaaaaaaaaaaaaaaaaaaaaaaaaaaaaaaaaaaaaaaaaaaaaaaaaaaaaaaaaaaa

SEQ ID NO: 25003 - RNA, 4167 nt, Artificial Sequence
  SARS-CoV-2/Wuhan/WIV05/2019__EPI_ISL_402128 spike protein mRNA gc (1-1273)
aggagagggcgcuuggcuugcaaggacccugagcugcggcauugaagcacacccaacccaacucgacugaagucagccucacugaaccggaucugagaaucuucucucucugggcuugccagggcucuccgaaccuagcuagcauccucuucaauuccaacuagaaagcuuaccauguucguguuccuggugcugcugccccuggugagcagccagugcgugaaccugaccacccggacccagcugcccccugccuacaccaacagcuucacccggggcguguacuaccccgacaagguguuccggagcagcgugcugcacagcacccaggaccuguuccugcccuucuucagcaacgugaccugguuccacgccauccacgugagcggcaccaacggcaccaagcgguucgacaacccagugcugcccuucaacgacggcguguacuucgccagcaccgagaagucaaacaucauccggggcuggaucuucggcaccacccuggacagcaagacacagagccugcugaucgugaacaacgccaccaacguggugaucaaggugugcgaguuucaguucugcaacgaccccuuccugggcguguacuaccacaagaacaacaagagcuggauggagagcgaguuccgggucuacagcagcgcuaacaauugcaccuucgaguacgugagccagcccuuccugauggaccucgagggcaagcagggcaacuucaagaaccugcgggaguucguguucaagaacaucgauggcuacuucaagaucuacagcaagcacacccccaucaaccuggugcgggaccugccccagggauucagcgcccuggagccucugguggaccugcccaucggcaucaacaucaccagguuccagacccugcuggcccugcaccggagcuaccugacccccggcgacagcagcagcggcuggaccgccggcgccgccgcauacuacgugggcuaccugcagccacggaccuuccugcugaaguacaacgagaacggcaccaucaccgacgccguggacugcgcccuggacccccugagcgagaccaagugcacccuaaagagcuucaccguggagaagggcaucuaccagaccagcaacuuccgggugcagcccacugagagcaucgugcgguuccccaacauuaccaaccugugucccuucggcgagguguucaacgccacccgguucgccagcguguacgccuggaaccggaagcggaucagcaacugcguggccgacuacagcgugcuguacaacagcgccagcuucagcaccuucaagugcuacggcgugagcccuaccaagcugaacgaccugugcuucaccaacguguacgcugacagcuucgugauccggggcgacgaggugcggcagaucgcccccggccagaccggcaagaucgccgacuacaacuacaagcugcccgacgacuucaccggcugcgugaucgccuggaacagcaacaaccuggacagcaaggugggcggcaacuacaacuaccuguaccggcuguuccguaagagcaaccugaagccauucgagcgggacaucagcaccgagaucuaccaggccggcagcacccccugcaacgguguggagggcuuuaacugcuacuucccccugcagagcuacggcuuccagcccaccaacggcgugggcuaccagcccuaccgggugguggugcugagcuucgagcugcugcacgcccccgccaccgugugcggcccuaaaaagagcaccaaccuggugaagaacaagugcgugaacuucaauuucaacggccugaccggcaccggcgugcugaccgagagcaacaagaaguuccugcccuuccagcaguucggccgggauaucgccgacaccaccgacgcagugcgggacccccagacccuggagauccuggacaucaccccaugcagcuucggcggcgugagcgucaucacccccggcacaaacaccagcaaccagguggccgugcuguaccaggacgugaacugcaccgaggugcccguggccauccacgccgaccagcugacccccaccuggcggguguacagcaccggaagcaacguguuccagacccgggccggcugccugaucggcgccgagcacgugaacaacuccuacgagugcgacauccccaucggcgcuggcaucugcgccagcuaccagacccagaccaacagcccccggcgggcccggagcguggccagccagagcaucaucgccuacaccaugagcuuaggcgccgagaacagcguggccuacagcaacaacagcaucgcgaucccuaccaacuucaccaucagcgugaccaccgagauacugcccgugagcaugaccaagaccagcguggacuguaccauguacaucugcggcgacagcaccgagugcagcaaccugcugcugcaguacggcagcuucugcacccagcugaaccgggcccugaccggcaucgccguggagcaggacaagaacacccaagagguguucgcccaggugaagcagaucuacaagacucccccaaucaaggacuucggcggcuucaacuucagccagauccugcccgaccccagcaagcccagcaagcggagcuucaucgaggaccugcuguucaacaaggugacccuggccgacgccggcuucaucaagcaguacggcgauugccugggcgacaucgccgcucgggaccugaucugcgcccagaaguucaacgggcugaccgugcugcccccucugcugaccgacgagaugaucgcccaguacaccagcgcccugcuugccggcaccaucaccagcggcuggaccuucggcgccggcgcagcccugcagauccccuucgccaugcagauggccuaccgguucaacggcaucggcgugacccagaacgugcuguacgagaaccagaagcugaucgccaaccaguucaacagcgccaucggcaagauccaggacagccugagcagcaccgccagcgcccugggcaagcugcaggacguggugaaccagaacgcucaggcccugaacacccuggugaagcagcugagcagcaacuucggcgccaucagcucagugcugaaugacauccugagcaggcuggacaagguggaggccgaggugcagaucgaccggcugaucaccggccggcugcagagccugcagaccuacgugacccagcagcugauccgggccgccgagauccgggccagcgccaaccuggcagccaccaagaugagcgagugcgugcugggccagagcaagcggguggacuuuugcggcaagggcuaccaccugaugagcuucccccagagcgccccacacggcgugguguuccuccacgucacauacgugcccgcccaggagaagaacuucaccaccgcccccgccauuugccacgacggcaaggcucacuucccccgggagggcguguucgugagcaacggaacccacugguucgugacccagcggaacuucuacgagccccagaucaucaccaccgacaacaccuucgugagcggcaacugcgacguggugaucggcaucgugaacaacaccguguacgacccccugcagccugagcuggacagcuucaaggaggagcuggacaaguacuucaagaaccacaccagccccgauguggaccugggcgacaucagcggcaucaacgccagcguggugaacauccagaaggagaucgaccggcugaacgagguggccaagaaccugaacgagagccugaucgaccugcaggagcugggcaaguacgagcaguacaucaaguggcccugguacaucuggcugggcuucaucgccggccugaucgccaucgugauggugaccaucaugcugugcugcaugaccagcugcuguagcugccugaagggcugcugcagcugcggcagcugcugcaaguucgacgaggacgacagcgagccagugcugaagggcgugaagcugcacuacaccugaggacuagucccuguucccagagcccacuuuuuuuucuuuuuuugaaauaaaauagccugucuuucagaucuaaaaaaaaaaaaaaaaaaaaaaaaaaaaaaaaaaaaaaaaaaaaaaaaaaaaaaaaaaaaaaaaaaaaaaaaaaaaaaaaaaaaaaaaaaaaaaaaaaaa

SEQ ID NO: 25004 - RNA, 4167 nt, Artificial Sequence
  SARS-CoV-2/Wuhan/WIV05/2019__EPI_ISL_402128 spike protein mRNA gc (1-1273)(D614G)
aggagagggcgcuuggcuugcaaggacccugagcugcggcauugaagcacacccaacccaacucgacugaagucagccucacugaaccggaucugagaaucuucucucucugggcuugccagggcucuccgaaccuagcuagcauccucuucaauuccaacuagaaagcuuaccauguucguguuccuggugcugcugccccuggugagcagccagugcgugaaccugaccacccggacccagcugcccccugccuacaccaacagcuucacccggggcguguacuaccccgacaagguguuccggagcagcgugcugcacagcacccaggaccuguuccugcccuucuucagcaacgugaccugguuccacgccauccacgugagcggcaccaacggcaccaagcgguucgacaacccagugcugcccuucaacgacggcguguacuucgccagcaccgagaagucaaacaucauccggggcuggaucuucggcaccacccuggacagcaagacacagagccugcugaucgugaacaacgccaccaacguggugaucaaggugugcgaguuucaguucugcaacgaccccuuccugggcguguacuaccacaagaacaacaagagcuggauggagagcgaguuccgggucuacagcagcgcuaacaauugcaccuucgaguacgugagccagcccuuccugauggaccucgagggcaagcagggcaacuucaagaaccugcgggaguucguguucaagaacaucgauggcuacuucaagaucuacagcaagcacacccccaucaaccuggugcgggaccugccccagggauucagcgcccuggagccucugguggaccugcccaucggcaucaacaucaccagguuccagacccugcuggcccugcaccggagcuaccugacccccggcgacagcagcagcggcuggaccgccggcgccgccgcauacuacgugggcuaccugcagccacggaccuuccugcugaaguacaacgagaacggcaccaucaccgacgccguggacugcgcccuggacccccugagcgagaccaagugcacccuaaagagcuucaccguggagaagggcaucuaccagaccagcaacuuccgggugcagcccacugagagcaucgugcgguuccccaacauuaccaaccugugucccuucggcgagguguucaacgccacccgguucgccagcguguacgccuggaaccggaagcggaucagcaacugcguggccgacuacagcgugcuguacaacagcgccagcuucagcaccuucaagugcuacggcgugagcccuaccaagcugaacgaccugugcuucaccaacguguacgcugacagcuucgugauccggggcgacgaggugcggcagaucgcccccggccagaccggcaagaucgccgacuacaacuacaagcugcccgacgacuucaccggcugcgugaucgccuggaacagcaacaaccuggacagcaaggugggcggcaacuacaacuaccuguaccggcuguuccguaagagcaaccugaagccauucgagcgggacaucagcaccgagaucuaccaggccggcagcacccccugcaacgguguggagggcuuuaacugcuacuucccccugcagagcuacggcuuccagcccaccaacggcgugggcuaccagcccuaccgggugguggugcugagcuucgagcugcugcacgcccccgccaccgugugcggcccuaaaaagagcaccaaccuggugaagaacaagugcgugaacuucaauuucaacggccugaccggcaccggcgugcugaccgagagcaacaagaaguuccugcccuuccagcaguucggccgggauaucgccgacaccaccgacgcagugcgggacccccagacccuggagauccuggacaucaccccaugcagcuucggcggcgugagcgucaucacccccggcacaaacaccagcaaccagguggccgugcuguaccagggagugaacugcaccgaggugcccguggccauccacgccgaccagcugacccccaccuggcggguguacagcaccggcagcaacguguuccagacccgggccggcugccugaucggcgccgagcacgugaacaacuccuacgagugcgacauccccaucggcgcuggcaucugcgccagcuaccagacccagaccaacagcccccggcgggcccggagcguggccagccagagcaucaucgccuacaccaugagcuuaggcgccgagaacagcguggccuacagcaacaacagcaucgcgaucccuaccaacuucaccaucagcgugaccaccgagauacugcccgugagcaugaccaagaccagcguggacuguaccauguacaucugcggcgacagcaccgagugcagcaaccugcugcugcaguacggcagcuucugcacccagcugaaccgggcccugaccggcaucgccguggagcaggacaagaacacccaagagguguucgcccaggugaagcagaucuacaagacucccccaaucaaggacuucggcggcuucaacuucagccagauccugcccgaccccagcaagcccagcaagcggagcuucaucgaggaccugcuguucaacaaggugacccuggccgacgccggcuucaucaagcaguacggcgacugccugggggauaucgccgcucgggaccugaucugcgcccagaaguucaacggccugaccgugcugcccccucugcugaccgacgagaugaucgcccaguacaccagcgcccugcuugccggcaccaucaccagcggcuggaccuucggcgccggcgcagcccugcagauccccuucgccaugcagauggccuaccgguucaacggcaucggcgugacccagaacgugcuguacgagaaccagaagcugaucgccaaccaguucaacagcgccaucggcaagauccaggacagccugagcagcaccgccagcgcccugggcaagcugcaggacguggugaaccagaacgcucaggcccugaacacccuggugaagcagcugagcagcaacuucggcgccaucagcucagugcugaaugacauccugagcaggcuggacaagguggaggccgaggugcagaucgaccggcugaucaccggccggcugcagagccugcagaccuacgugacccagcagcugauccgggccgccgagauccgggccagcgccaaccuggcagccaccaagaugagcgagugcgugcugggccagagcaagcggguggacuuuugcggcaagggcuaccaccugaugagcuucccccagagcgccccacacggcgugguguuccuccacgucacauacgugcccgcccaggagaagaacuucaccaccgcccccgccauuugccacgacggcaaggcucacuucccccgggagggaguguucgugagcaacggcacccacugguucgugacccagcggaacuucuacgagccccagaucaucaccaccgacaacaccuucgugagcggcaacugcgacguggugaucggcaucgugaacaacaccguguacgacccccugcagccugagcuggacagcuucaaggaggagcuggacaaguacuucaagaaccacaccagccccgacguggaucugggcgacaucagcggcaucaacgccagcguggugaacauccagaaggagaucgaccggcugaacgagguggccaagaaccugaacgagagccugaucgaccugcaggagcugggcaaguacgagcaguacaucaaguggcccugguacaucuggcugggcuucaucgccggccugaucgccaucgugauggugaccaucaugcugugcugcaugaccagcugcuguagcugccugaagggcugcugcagcugcggcagcugcugcaaguucgacgaggacgacagcgagccagugcugaagggcgugaagcugcacuacaccugaggacuagucccuguucccagagcccacuuuuuuuucuuuuuuugaaauaaaauagccugucuuucagaucuaaaaaaaaaaaaaaaaaaaaaaaaaaaaaaaaaaaaaaaaaaaaaaaaaaaaaaaaaaaaaaaaaaaaaaaaaaaaaaaaaaaaaaaaaaaaaaaaaaaa

SEQ ID NO: 25005 - RNA, 4167 nt, Artificial Sequence
  SARS-CoV-2/Wuhan/WIV05/2019__EPI_ISL_402128 spike protein mRNA gc (1-1273)(A222V_D614G)
aggagagggcgcuuggcuugcaaggacccugagcugcggcauugaagcacacccaacccaacucgacugaagucagccucacugaaccggaucugagaaucuucucucucugggcuugccagggcucuccgaaccuagcuagcauccucuucaauuccaacuagaaagcuuaccauguucguguuccuggugcugcugccccuggugagcagccagugcgugaaccugaccacccggacccagcugcccccugccuacaccaacagcuucacccggggcguguacuaccccgacaagguguuccggagcagcgugcugcacagcacccaggaccuguuccugcccuucuucagcaacgugaccugguuccacgccauccacgugagcggcaccaacggcaccaagcgguucgacaacccagugcugcccuucaacgacggcguguacuucgccagcaccgagaagucaaacaucauccggggcuggaucuucggcaccacccuggacagcaagacacagagccugcugaucgugaacaacgccaccaacguggugaucaaggugugcgaguuucaguucugcaacgaccccuuccugggcguguacuaccacaagaacaacaagagcuggauggagagcgaguuccgggucuacagcagcgcuaacaauugcaccuucgaguacgugagccagcccuuccugauggaccucgagggcaagcagggcaacuucaagaaccugcgggaguucguguucaagaacaucgauggcuacuucaagaucuacagcaagcacacccccaucaaccuggugcgggaccugccccagggauucagcgugcuggagccucugguggaccugcccaucggcaucaacaucaccagguuccagacccugcuggcccugcaccggagcuaccugacccccggcgacagcagcagcggcuggaccgccggcgccgccgccuacuacgugggcuaccugcagccacggaccuuccugcugaaguacaacgagaacggcaccaucaccgacgcaguggacugcgcccuggacccccugagcgagaccaagugcacccuaaagagcuucaccguggagaagggcaucuaccagaccagcaacuuccgggugcagcccacugagagcaucgugcgguuccccaacauuaccaaccugugucccuucggcgagguguucaacgccacccgguucgccagcguguacgccuggaaccggaagcggaucagcaacugcguggccgacuacagcgugcuguacaacagcgccagcuucagcaccuucaagugcuacggcgugagcccuaccaagcugaacgaccugugcuucaccaacguguacgccgacagcuucgugauccggggcgacgaggugcggcagaucgcucccggccagaccggcaagaucgccgacuacaacuacaagcugcccgacgacuucaccggcugcgugaucgccuggaacagcaacaaccuggacagcaaggugggcggcaacuacaacuaccuguaccggcuguuccguaagagcaaccugaagccauucgagcgggacaucagcaccgagaucuaccaggccggcagcacccccugcaacgguguggagggcuuuaacugcuacuucccccugcagagcuacggcuuccagcccaccaacggcgugggcuaccagcccuaccgggugguggugcugagcuucgagcugcugcacgcccccgccaccgugugcggcccuaaaaagagcaccaaccuggugaagaacaagugcgugaacuucaauuucaacggccugaccggcaccggcgugcugaccgagagcaacaagaaguuccugcccuuccagcaguucggccgggauaucgccgacaccaccgacgccgugcgggacccccagacccuggagauccuggacaucaccccaugcagcuucggcggcgucagcgugaucacccccggcacaaacaccagcaaccagguggcagugcuguaccagggagugaacugcaccgaggugcccguggccauccacgccgaccagcugacccccaccuggcggguguacagcaccggcagcaacguguuccagacccgggccggcugccugaucggcgccgagcacgugaacaacuccuacgagugcgacauccccaucggcgccggcaucugcgcuagcuaccagacccagaccaacagcccccggcgggcccggagcguggccagccagagcaucaucgccuacaccaugagcuuaggcgccgagaacagcguggccuacagcaacaacagcaucgccaucccuaccaacuucaccaucagcgugaccaccgagauacugcccgugagcaugaccaagaccagcguggacuguaccauguacaucugcggcgacagcaccgagugcagcaaccugcugcugcaguacggcagcuucugcacccagcugaaccgggcgcugaccggcaucgccguggagcaggacaagaacacccaagagguguucgcccaggugaagcagaucuacaagacucccccaaucaaggacuucggcggcuucaacuucagccagauccugcccgaccccagcaagcccagcaagcggagcuucaucgaggaccugcuguucaacaaggugacccuggccgacgccggcuucaucaagcaguacggcgacugccugggggauaucgccgcccgggaccugaucugcgcucagaaguucaacggccugaccgugcugcccccucugcugaccgacgagaugaucgcccaguacaccagcgcccugcuugccggcaccaucaccagcggcuggaccuucggcgccggcgccgcacugcagauccccuucgccaugcagauggccuaccgguucaacggcaucggcgugacccagaacgugcuguacgagaaccagaagcugaucgccaaccaguucaacagcgccaucggcaagauccaggacagccugagcagcaccgccagcgcccugggcaagcugcaggacguggugaaccagaacgcccaggcucugaacacccuggugaagcagcugagcagcaacuucggcgccaucagcucagugcugaaugacauccugagcaggcuggacaagguggaggccgaggugcagaucgaccggcugaucaccggccggcugcagagccugcagaccuacgugacccagcagcugauccgggccgccgagauccgggccagcgccaaccuggccgcaaccaagaugagcgagugcgugcugggccagagcaagcggguggacuuuugcggcaagggcuaccaccugaugagcuucccccagagcgccccacacggcguggucuuccuccacgugacauacgugcccgcccaggagaagaacuucaccaccgcccccgccauuugccacgacggcaaggcccacuucccccgggagggaguguucgugagcaacggcacccacugguucgugacccagcggaacuucuacgagccccagaucaucaccaccgacaacaccuucgugagcggcaacugcgacguggugaucggcaucgugaacaacaccguguacgacccccugcagccugagcuggacagcuucaaggaggagcuggacaaguacuucaagaaccacaccagccccgacguggaucugggcgacaucagcggcaucaacgcuagcguggugaacauccagaaggagaucgaccggcugaacgagguggccaagaaccugaacgagagccugaucgaccugcaggagcugggcaaguacgagcaguacaucaaguggcccugguacaucuggcugggcuucaucgccggccugaucgccaucgugauggugaccaucaugcugugcugcaugaccagcugcuguagcugccugaagggcugcugcagcugcggcagcugcugcaaguucgacgaggacgacagcgagccagugcugaagggcgugaagcugcacuacaccugaggacuagucccuguucccagagcccacuuuuuuuucuuuuuuugaaauaaaauagccugucuuucagaucuaaaaaaaaaaaaaaaaaaaaaaaaaaaaaaaaaaaaaaaaaaaaaaaaaaaaaaaaaaaaaaaaaaaaaaaaaaaaaaaaaaaaaaaaaaaaaaaaaaaa

SEQ ID NO: 25006 - RNA, 4167 nt, Artificial Sequence
  SARS-CoV-2/Wuhan/WIV05/2019__EPI_ISL_402128 spike protein mRNA gc (1-1273)(N439K_D614G)
aggagagggcgcuuggcuugcaaggacccugagcugcggcauugaagcacacccaacccaacucgacugaagucagccucacugaaccggaucugagaaucuucucucucugggcuugccagggcucuccgaaccuagcuagcauccucuucaauuccaacuagaaagcuuaccauguucguguuccuggugcugcugccccuggugagcagccagugcgugaaccugaccacccggacccagcugcccccugccuacaccaacagcuucacccggggcguguacuaccccgacaagguguuccggagcagcgugcugcacagcacccaggaccuguuccugcccuucuucagcaacgugaccugguuccacgccauccacgugagcggcaccaacggcaccaagcgguucgacaacccagugcugcccuucaacgacggcguguacuucgccagcaccgagaagucaaacaucauccggggcuggaucuucggcaccacccuggacagcaagacacagagccugcugaucgugaacaacgccaccaacguggugaucaaggugugcgaguuucaguucugcaacgaccccuuccugggcguguacuaccacaagaacaacaagagcuggauggagagcgaguuccgggucuacagcagcgcuaacaauugcaccuucgaguacgugagccagcccuuccugauggaccucgagggcaagcagggcaacuucaagaaccugcgggaguucguguucaagaacaucgauggcuacuucaagaucuacagcaagcacacccccaucaaccuggugcgggaccugccccagggauucagcgcccuggagccucugguggaccugcccaucggcaucaacaucaccagguuccagacccugcuggcccugcaccggagcuaccugacccccggcgacagcagcagcggcuggaccgccggcgccgccgcauacuacgugggcuaccugcagccacggaccuuccugcugaaguacaacgagaacggcaccaucaccgacgccguggacugcgcccuggacccccugagcgagaccaagugcacccuaaagagcuucaccguggagaagggcaucuaccagaccagcaacuuccgggugcagcccacugagagcaucgugcgguuccccaacauuaccaaccugugucccuucggcgagguguucaacgccacccgguucgccagcguguacgccuggaaccggaagcggaucagcaacugcguggccgacuacagcgugcuguacaacagcgccagcuucagcaccuucaagugcuacggcgugagcccuaccaagcugaacgaccugugcuucaccaacguguacgcugacagcuucgugauccggggcgacgaggugcggcagaucgcccccggccagaccggcaagaucgccgacuacaacuacaagcugcccgacgacuucaccggcugcgugaucgccuggaacagcaagaaccuggacagcaaggugggcggcaacuacaacuaccuguaccggcuguuccguaagagcaaccugaagccauucgagcgggacaucagcaccgagaucuaccaggccggcagcacccccugcaacgguguggagggcuuuaacugcuacuucccccugcagagcuacggcuuccagcccaccaacggcgugggcuaccagcccuaccgggugguggugcugagcuucgagcugcugcacgcccccgccaccgugugcggcccuaaaaagagcaccaaccuggugaagaacaagugcgugaacuucaacuucaauggccugaccggcaccggcgugcugaccgagagcaacaagaaguuccugcccuuccagcaguucggccgggauaucgccgacaccaccgacgcagugcgggacccccagacccuggagauccuggacaucaccccaugcagcuucggcggcgugagcgucaucacccccggcacaaacaccagcaaccagguggccgugcuguaccagggagugaacugcaccgaggugcccguggccauccacgccgaccagcugacccccaccuggcggguguacagcaccggcagcaacguguuccagacccgggccggcugccugaucggcgccgagcacgugaacaacuccuacgagugcgacauccccaucggcgcuggcaucugcgccagcuaccagacccagaccaacagcccccggcgggcccggagcguggccagccagagcaucaucgccuacaccaugagcuuaggcgccgagaacagcguggccuacagcaacaacagcaucgcgaucccuaccaacuucaccaucagcgugaccaccgagauacugcccgugagcaugaccaagaccagcguggacuguaccauguacaucugcggcgacagcaccgagugcagcaaccugcugcugcaguacggcagcuucugcacccagcugaaccgggcccugaccggcaucgccguggagcaggacaagaacacccaagagguguucgcccaggugaagcagaucuacaagacucccccaaucaaggacuucggcggcuucaacuucagccagauccugcccgaccccagcaagcccagcaagcggagcuucaucgaggaccugcuguucaacaaggugacccuggccgacgccggcuucaucaagcaguacggcgacugccugggggauaucgccgcucgggaccugaucugcgcccagaaguucaacggccugaccgugcugcccccucugcugaccgacgagaugaucgcccaguacaccagcgcccugcuugccggcaccaucaccagcggcuggaccuucggcgccggcgcagcccugcagauccccuucgccaugcagauggccuaccgguucaacggcaucggcgugacccagaacgugcuguacgagaaccagaagcugaucgccaaccaguucaacagcgccaucggcaagauccaggacagccugagcagcaccgccagcgcccugggcaagcugcaggacguggugaaccagaacgcucaggcccugaacacccuggugaagcagcugagcagcaacuucggcgccaucagcucagugcugaacgacauccugagcaggcuggacaagguggaggccgaggugcagaucgaccggcugaucaccggccggcugcagagccugcagaccuacgugacccagcagcugauccgggccgccgagauccgggccagcgccaaucuggcagccaccaagaugagcgagugcgugcugggccagagcaagcggguggacuuuugcggcaagggcuaccaccugaugagcuucccccagagcgccccacacggcgugguguuccuccacgucacauacgugcccgcccaggagaagaacuucaccaccgcccccgccauuugccacgacggcaaggcucacuucccccgggagggaguguucgugagcaacggcacccacugguucgugacccagcggaacuucuacgagccccagaucaucaccaccgacaacaccuucgugagcggcaacugcgacguggugaucggcaucgugaacaacaccguguacgacccccugcagccugagcuggacagcuucaaggaggagcuggacaaguacuucaagaaccacaccagccccgacguggaucugggcgacaucagcggcaucaacgccagcguggugaacauccagaaggagaucgaccggcugaacgagguggccaagaaccugaacgagagccugaucgaccugcaggagcugggcaaguacgagcaguacaucaaguggcccugguacaucuggcugggcuucaucgccggccugaucgccaucgugauggugaccaucaugcugugcugcaugaccagcugcuguagcugccugaagggcugcugcagcugcggcagcugcugcaaguucgacgaggacgacagcgagccagugcugaagggcgugaagcugcacuacaccugaggacuagucccuguucccagagcccacuuuuuuuucuuuuuuugaaauaaaauagccugucuuucagaucuaaaaaaaaaaaaaaaaaaaaaaaaaaaaaaaaaaaaaaaaaaaaaaaaaaaaaaaaaaaaaaaaaaaaaaaaaaaaaaaaaaaaaaaaaaaaaaaaaaaa

SEQ ID NO: 25007 - RNA, 4167 nt, Artificial Sequence
  SARS-CoV-2/Wuhan/WIV05/2019__EPI_ISL_402128 spike protein mRNA gc (1-1273)(S477N_D614G)
aggagagggcgcuuggcuugcaaggacccugagcugcggcauugaagcacacccaacccaacucgacugaagucagccucacugaaccggaucugagaaucuucucucucugggcuugccagggcucuccgaaccuagcuagcauccucuucaauuccaacuagaaagcuuaccauguucguguuccuggugcugcugccccuggugagcagccagugcgugaaccugaccacccggacccagcugcccccugccuacaccaacagcuucacccggggcguguacuaccccgacaagguguuccggagcagcgugcugcacagcacccaggaccuguuccugcccuucuucagcaacgugaccugguuccacgccauccacgugagcggcaccaacggcaccaagcgguucgacaacccagugcugcccuucaacgacggcguguacuucgccagcaccgagaagucaaacaucauccggggcuggaucuucggcaccacccuggacagcaagacacagagccugcugaucgugaacaacgccaccaacguggugaucaaggugugcgaguuucaguucugcaacgaccccuuccugggcguguacuaccacaagaacaacaagagcuggauggagagcgaguuccgggucuacagcagcgcuaacaauugcaccuucgaguacgugagccagcccuuccugauggaccucgagggcaagcagggcaacuucaagaaccugcgggaguucguguucaagaacaucgauggcuacuucaagaucuacagcaagcacacccccaucaaccuggugcgggaccugccccagggauucagcgcccuggagccucugguggaccugcccaucggcaucaacaucaccagguuccagacccugcuggcccugcaccggagcuaccugacccccggcgacagcagcagcggcuggaccgccggcgccgccgcauacuacgugggcuaccugcagccacggaccuuccugcugaaguacaacgagaacggcaccaucaccgacgccguggacugcgcccuggacccccugagcgagaccaagugcacccuaaagagcuucaccguggagaagggcaucuaccagaccagcaacuuccgggugcagcccacugagagcaucgugcgguuccccaacauuaccaaccugugucccuucggcgagguguucaacgccacccgguucgccagcguguacgccuggaaccggaagcggaucagcaacugcguggccgacuacagcgugcuguacaacagcgccagcuucagcaccuucaagugcuacggcgugagcccuaccaagcugaacgaccugugcuucaccaacguguacgcugacagcuucgugauccggggcgacgaggugcggcagaucgcccccggccagaccggcaagaucgccgacuacaacuacaagcugcccgacgacuucaccggcugcgugaucgccuggaacagcaacaaccuggacagcaaggugggcggcaacuacaacuaccuguaccggcuguuccguaagagcaaccugaagccauucgagcgggacaucagcaccgagaucuaccaggccggcaacacccccugcaacgguguggagggcuuuaacugcuacuucccccugcagagcuacggcuuccagcccaccaacggcgugggcuaccagcccuaccgggugguggugcugagcuucgagcugcugcacgcccccgccaccgugugcggcccuaaaaagagcaccaaccuggugaagaacaagugcgugaauuucaacuucaacggccugaccggcaccggcgugcugaccgagagcaacaagaaguuccugcccuuccagcaguucggccgggauaucgccgacaccaccgacgcagugcgggacccccagacccuggagauccuggacaucaccccaugcagcuucggcggcgugagcgucaucacccccggcacaaacaccagcaaccagguggccgugcuguaccagggagugaacugcaccgaggugcccguggccauccacgccgaccagcugacccccaccuggcggguguacagcaccggcagcaacguguuccagacccgggccggcugccugaucggcgccgagcacgugaacaacagcuacgagugcgacauccccaucggcgcuggcaucugcgccuccuaccagacccagaccaacagcccccggcgggcccggagcguggccagccagagcaucaucgccuacaccaugagcuuaggcgccgagaacagcguggccuacagcaacaacagcaucgcgaucccuaccaacuucaccaucagcgugaccaccgagauacugcccgugagcaugaccaagaccagcguggacuguaccauguacaucugcggcgacagcaccgagugcagcaaccugcugcugcaguacggcagcuucugcacccagcugaaccgggcccugaccggcaucgccguggagcaggacaagaacacccaagagguguucgcccaggugaagcagaucuacaagacucccccaaucaaggacuucggcggcuucaacuucagccagauccugcccgaccccagcaagcccagcaagcggagcuucaucgaggaccugcuguucaacaaggugacccuggccgacgccggcuucaucaagcaguacggcgacugccugggggauaucgccgcucgggaccugaucugcgcccagaaguucaacggccugaccgugcugcccccucugcugaccgacgagaugaucgcccaguacaccagcgcccugcuugccggcaccaucaccagcggcuggaccuucggcgccggcgcagcccugcagauccccuucgccaugcagauggccuaccgguucaacggcaucggcgugacccagaacgugcuguacgagaaccagaagcugaucgccaaccaguucaacagcgccaucggcaagauccaggacagccugagcagcaccgccagcgcccugggcaagcugcaggacguggugaaccagaacgcucaggcccugaacacccuggugaagcagcugagcagcaauuucggcgccaucagcagcgugcugaacgacauccugucaaggcuggacaagguggaggccgaggugcagaucgaccggcugaucaccggccggcugcagagccugcagaccuacgugacccagcagcugauccgggccgccgagauccgggccagcgccaaccuggcagccaccaagaugagcgagugcgugcugggccagagcaagcggguggacuuuugcggcaagggcuaccaccugaugagcuucccccagagcgccccacacggcgugguguuccuccacgucacauacgugcccgcccaggagaagaacuucaccaccgcccccgccauuugccacgacggcaaggcucacuucccccgggagggaguguucgugagcaacggcacccacugguucgugacccagcggaacuucuacgagccccagaucaucaccaccgacaacaccuucgugagcggcaacugcgacguggugaucggcaucgugaacaacaccguguacgacccccugcagccugagcuggacagcuucaaggaggagcuggacaaguacuucaagaaccacaccagccccgacguggaucugggcgacaucagcggcaucaacgccagcguggugaacauccagaaggagaucgaccggcugaacgagguggccaagaaccugaacgagagccugaucgaccugcaggagcugggcaaguacgagcaguacaucaaguggcccugguacaucuggcugggcuucaucgccggccugaucgccaucgugauggugaccaucaugcugugcugcaugaccagcugcuguagcugccugaagggcugcugcagcugcggcagcugcugcaaguucgacgaggacgacagcgagccagugcugaagggcgugaagcugcacuacaccugaggacuagucccuguucccagagcccacuuuuuuuucuuuuuuugaaauaaaauagccugucuuucagaucuaaaaaaaaaaaaaaaaaaaaaaaaaaaaaaaaaaaaaaaaaaaaaaaaaaaaaaaaaaaaaaaaaaaaaaaaaaaaaaaaaaaaaaaaaaaaaaaaaaaa

SEQ ID NO: 25008 - RNA, 4167 nt, Artificial Sequence
  SARS-CoV-2/Wuhan/WIV05/2019__EPI_ISL_402128 spike protein mRNA gc (1-1273)(N501Y_D614G)
aggagagggcgcuuggcuugcaaggacccugagcugcggcauugaagcacacccaacccaacucgacugaagucagccucacugaaccggaucugagaaucuucucucucugggcuugccagggcucuccgaaccuagcuagcauccucuucaauuccaacuagaaagcuuaccauguucguguuccuggugcugcugccccuggugagcagccagugcgugaaccugaccacccggacccagcugcccccugccuacaccaacagcuucacccggggcguguacuaccccgacaagguguuccggagcagcgugcugcacagcacccaggaccuguuccugcccuucuucagcaacgugaccugguuccacgccauccacgugagcggcaccaacggcaccaagcgguucgacaacccagugcugcccuucaacgacggcguguacuucgccagcaccgagaagucaaacaucauccggggcuggaucuucggcaccacccuggacagcaagacacagagccugcugaucgugaacaacgccaccaacguggugaucaaggugugcgaguuucaguucugcaacgaccccuuccugggcguguacuaccacaagaacaacaagagcuggauggagagcgaguuccgggucuacagcagcgcuaacaauugcaccuucgaguacgugagccagcccuuccugauggaccucgagggcaagcagggcaacuucaagaaccugcgggaguucguguucaagaacaucgauggcuacuucaagaucuacagcaagcacacccccaucaaccuggugcgggaccugccccagggauucagcgcccuggagccucugguggaccugcccaucggcaucaacaucaccagguuccagacccugcuggcccugcaccggagcuaccugacccccggcgacagcagcagcggcuggaccgccggcgccgccgcauacuacgugggcuaccugcagccacggaccuuccugcugaaguacaacgagaacggcaccaucaccgacgccguggacugcgcccuggacccccugagcgagaccaagugcacccuaaagagcuucaccguggagaagggcaucuaccagaccagcaacuuccgggugcagcccacugagagcaucgugcgguuccccaacauuaccaaccugugucccuucggcgagguguucaacgccacccgguucgccagcguguacgccuggaaccggaagcggaucagcaacugcguggccgacuacagcgugcuguacaacagcgccagcuucagcaccuucaagugcuacggcgugagcccuaccaagcugaacgaccugugcuucaccaacguguacgcugacagcuucgugauccggggcgacgaggugcggcagaucgcccccggccagaccggcaagaucgccgacuacaacuacaagcugcccgacgacuucaccggcugcgugaucgccuggaacagcaacaaccuggacagcaaggugggcggcaacuacaacuaccuguaccggcuguuccguaagagcaaccugaagccauucgagcgggacaucagcaccgagaucuaccaggccggcagcacccccugcaacgguguggagggcuuuaacugcuacuucccccugcagagcuacggcuuccagcccaccuacggcgugggcuaccagcccuaccgggugguggugcugagcuucgagcugcugcacgcccccgccaccgugugcggcccuaaaaagagcaccaaccuggugaagaacaagugcgugaacuucaacuucaauggccugaccggcaccggcgugcugaccgagagcaacaagaaguuccugcccuuccagcaguucggccgggauaucgccgacaccaccgacgcagugcgggacccccagacccuggagauccuggacaucaccccaugcagcuucggcggcgugagcgucaucacccccggcacaaacaccagcaaccagguggccgugcuguaccagggagugaacugcaccgaggugcccguggccauccacgccgaccagcugacccccaccuggcggguguacagcaccggcagcaacguguuccagacccgggccggcugccugaucggcgccgagcacgugaacaacuccuacgagugcgacauccccaucggcgcuggcaucugcgccagcuaccagacccagaccaacagcccccggcgggcccggagcguggccagccagagcaucaucgccuacaccaugagcuuaggcgccgagaacagcguggccuacagcaacaacagcaucgcgaucccuaccaacuucaccaucagcgugaccaccgagauacugcccgugagcaugaccaagaccagcguggacuguaccauguacaucugcggcgacagcaccgagugcagcaaccugcugcugcaguacggcagcuucugcacccagcugaaccgggcccugaccggcaucgccguggagcaggacaagaacacccaagagguguucgcccaggugaagcagaucuacaagacucccccaaucaaggacuucggcggcuucaacuucagccagauccugcccgaccccagcaagcccagcaagcggagcuucaucgaggaccugcuguucaacaaggugacccuggccgacgccggcuucaucaagcaguacggcgacugccugggggauaucgccgcucgggaccugaucugcgcccagaaguucaacggccugaccgugcugcccccucugcugaccgacgagaugaucgcccaguacaccagcgcccugcuugccggcaccaucaccagcggcuggaccuucggcgccggcgcagcccugcagauccccuucgccaugcagauggccuaccgguucaacggcaucggcgugacccagaacgugcuguacgagaaccagaagcugaucgccaaccaguucaacagcgccaucggcaagauccaggacagccugagcagcaccgccagcgcccugggcaagcugcaggacguggugaaccagaacgcucaggcccugaacacccuggugaagcagcugagcagcaacuucggcgccaucagcucagugcugaacgacauccugagcaggcuggacaagguggaggccgaggugcagaucgaccggcugaucaccggccggcugcagagccugcagaccuacgugacccagcagcugauccgggccgccgagauccgggccagcgccaaucuggcagccaccaagaugagcgagugcgugcugggccagagcaagcggguggacuuuugcggcaagggcuaccaccugaugagcuucccccagagcgccccacacggcgugguguuccuccacgucacauacgugcccgcccaggagaagaacuucaccaccgcccccgccauuugccacgacggcaaggcucacuucccccgggagggaguguucgugagcaacggcacccacugguucgugacccagcggaacuucuacgagccccagaucaucaccaccgacaacaccuucgugagcggcaacugcgacguggugaucggcaucgugaacaacaccguguacgacccccugcagccugagcuggacagcuucaaggaggagcuggacaaguacuucaagaaccacaccagccccgacguggaucugggcgacaucagcggcaucaacgccagcguggugaacauccagaaggagaucgaccggcugaacgagguggccaagaaccugaacgagagccugaucgaccugcaggagcugggcaaguacgagcaguacaucaaguggcccugguacaucuggcugggcuucaucgccggccugaucgccaucgugauggugaccaucaugcugugcugcaugaccagcugcuguagcugccugaagggcugcugcagcugcggcagcugcugcaaguucgacgaggacgacagcgagccagugcugaagggcgugaagcugcacuacaccugaggacuagucccuguucccagagcccacuuuuuuuucuuuuuuugaaauaaaauagccugucuuucagaucuaaaaaaaaaaaaaaaaaaaaaaaaaaaaaaaaaaaaaaaaaaaaaaaaaaaaaaaaaaaaaaaaaaaaaaaaaaaaaaaaaaaaaaaaaaaaaaaaaaaa

SEQ ID NO: 25009 - RNA, 4161 nt, Artificial Sequence
  SARS-CoV-2/Wuhan/WIV05/2019__EPI_ISL_402128 spike protein mRNA gc (1-1273)(H69del_V70del_D614G)
aggagagggcgcuuggcuugcaaggacccugagcugcggcauugaagcacacccaacccaacucgacugaagucagccucacugaaccggaucugagaaucuucucucucugggcuugccagggcucuccgaaccuagcuagcauccucuucaauuccaacuagaaagcuuaccauguucguguuccuggugcugcugccccuggugagcagccagugcgugaaccugaccacccggacccagcugcccccugccuacaccaacagcuucacccggggcguguacuaccccgacaagguguuccggagcagcgugcugcacagcacccaggaccuguuccugcccuucuucagcaacgugaccugguuccacgccaucagcggcaccaacggcaccaagcgguucgacaacccagugcugcccuucaacgacggcguguacuucgccagcaccgagaagucaaacaucauccggggcuggaucuucggcaccacccuggacagcaagacacagagccugcugaucgugaacaacgccaccaacguggugaucaaggugugcgaguuucaguucugcaacgaccccuuccugggcguguacuaccacaagaacaacaagagcuggauggagagcgaguuccggguguacagcagcgcuaacaauugcaccuucgaguacgucagccagcccuuccugauggaccucgagggcaagcagggcaacuucaagaaccugcgggaguucguguucaagaacaucgauggcuacuucaagaucuacagcaagcacacccccaucaaccuggugcgggaccugccccagggauucagcgcccuggagccucugguggaccugcccaucggcaucaacaucaccagguuccagacccugcuggcccugcaccggagcuaccugacccccggcgacagcagcagcggcuggaccgccggcgccgccgcauacuacgugggcuaccugcagccacggaccuuccugcugaaguacaacgagaacggcaccaucaccgacgccguggacugcgcccuggacccccugagcgagaccaagugcacccuaaagagcuucaccguggagaagggcaucuaccagaccagcaacuuccgggugcagcccacugagagcaucgugcgguuccccaacauuaccaaccugugucccuucggcgagguguucaacgccacccgguucgccagcguguacgccuggaaccggaagcggaucagcaacugcguggccgacuacagcgugcuguacaacagcgccagcuucagcaccuucaagugcuacggcgugagcccuaccaagcugaacgaccugugcuucaccaacguguacgcugacagcuucgugauccggggcgacgaggugcggcagaucgcccccggccagaccggcaagaucgccgacuacaacuacaagcugcccgacgacuucaccggcugcgugaucgccuggaacagcaacaaccuggacagcaaggugggcggcaacuacaacuaccuguaccggcuguuccguaagagcaaccugaagccauucgagcgggacaucagcaccgagaucuaccaggccggcagcacccccugcaacgguguggagggcuuuaacugcuacuucccccugcagagcuacggcuuccagcccaccaacggcgugggcuaccagcccuaccgggugguggugcugagcuucgagcugcugcacgcccccgccaccgugugcggcccuaaaaagagcaccaaccuggugaagaacaagugcgugaacuucaauuucaacggccugaccggcaccggcgugcugaccgagagcaacaagaaguuccugcccuuccagcaguucggccgggauaucgccgacaccaccgacgcagugcgggacccccagacccuggagauccuggacaucaccccaugcagcuucggcggcgugagcgugaucacccccggcacaaacaccagcaaccaggucgccgugcuguaccagggagugaacugcaccgaggugcccguggccauccacgccgaccagcugacccccaccuggcggguguacagcaccggcagcaacguguuccagacccgggccggcugccugaucggcgccgagcacgugaacaacuccuacgagugcgacauccccaucggcgcuggcaucugcgccagcuaccagacccagaccaacagcccccggcgggcccggagcguggccagccagagcaucaucgccuacaccaugagcuuaggcgccgagaacagcguggccuacagcaacaacagcaucgcgaucccuaccaacuucaccaucagcgugaccaccgagauacugcccgugagcaugaccaagaccagcguggacuguaccauguacaucugcggcgacagcaccgagugcagcaaccugcugcugcaguacggcagcuucugcacccagcugaaccgggcccugaccggcaucgccguggagcaggacaagaacacccaagagguguucgcccaggugaagcagaucuacaagacucccccaaucaaggacuucggcggcuucaacuucagccagauccugcccgaccccagcaagcccagcaagcggagcuucaucgaggaccugcuguucaacaaggugacccuggccgacgccggcuucaucaagcaguacggcgacugccugggggauaucgccgcucgggaccugaucugcgcccagaaguucaacggccugaccgugcugcccccucugcugaccgacgagaugaucgcccaguacaccagcgcccugcuugccggcaccaucaccagcggcuggaccuucggcgccggcgcagcccugcagauccccuucgccaugcagauggccuaccgguucaacggcaucggcgugacccagaacgugcuguacgagaaccagaagcugaucgccaaccaguucaacagcgccaucggcaagauccaggacagccugagcagcaccgccagcgcccugggcaagcugcaggacguggugaaccagaacgcucaggcccugaacacccuggugaagcagcugagcagcaacuucggcgccaucagcucagugcugaaugacauccugagcaggcuggacaagguggaggccgaggugcagaucgaccggcugaucaccggccggcugcagagccugcagaccuacgugacccagcagcugauccgggccgccgagauccgggccagcgccaaccuggcagccaccaagaugagcgagugcgugcugggccagagcaagcggguggacuuuugcggcaagggcuaccaccugaugagcuucccccagagcgccccacacggcgugguguuccuccacgugacauacguccccgcccaggagaagaacuucaccaccgcccccgccauuugccacgacggcaaggcucacuucccccgggagggaguguucgugagcaacggcacccacugguucgugacccagcggaacuucuacgagccccagaucaucaccaccgacaacaccuucgugagcggcaacugcgacguggugaucggcaucgugaacaacaccguguacgacccccugcagccugagcuggacagcuucaaggaggagcuggacaaguacuucaagaaccacaccagccccgacguggaucugggcgacaucagcggcaucaacgccagcguggugaacauccagaaggagaucgaccggcugaacgagguggccaagaaccugaacgagagccugaucgaccugcaggagcugggcaaguacgagcaguacaucaaguggcccugguacaucuggcugggcuucaucgccggccugaucgccaucgugauggugaccaucaugcugugcugcaugaccagcugcuguagcugccugaagggcugcugcagcugcggcagcugcugcaaguucgacgaggacgacagcgagccagugcugaagggcgugaagcugcacuacaccugaggacuagucccuguucccagagcccacuuuuuuuucuuuuuuugaaauaaaauagccugucuuucagaucuaaaaaaaaaaaaaaaaaaaaaaaaaaaaaaaaaaaaaaaaaaaaaaaaaaaaaaaaaaaaaaaaaaaaaaaaaaaaaaaaaaaaaaaaaaaaaaaaaaaa

SEQ ID NO: 25010 - RNA, 4167 nt, Artificial Sequence
  SARS-CoV-2/Wuhan/WIV05/2019__EPI_ISL_402128 spike protein mRNA gc (1-1273)(Y453F_D614G)
aggagagggcgcuuggcuugcaaggacccugagcugcggcauugaagcacacccaacccaacucgacugaagucagccucacugaaccggaucugagaaucuucucucucugggcuugccagggcucuccgaaccuagcuagcauccucuucaauuccaacuagaaagcuuaccauguucguguuccuggugcugcugccccuggugagcagccagugcgugaaccugaccacccggacccagcugcccccugccuacaccaacagcuucacccggggcguguacuaccccgacaagguguuccggagcagcgugcugcacagcacccaggaccuguuccugcccuucuucagcaacgugaccugguuccacgccauccacgugagcggcaccaacggcaccaagcgguucgacaacccagugcugcccuucaacgacggcguguacuucgccagcaccgagaagucaaacaucauccggggcuggaucuucggcaccacccuggacagcaagacacagagccugcugaucgugaacaacgccaccaacguggugaucaaggugugcgaguuucaguucugcaacgaccccuuccugggcguguacuaccacaagaacaacaagagcuggauggagagcgaguuccgggucuacagcagcgcuaacaauugcaccuucgaguacgugagccagcccuuccugauggaccucgagggcaagcagggcaacuucaagaaccugcgggaguucguguucaagaacaucgauggcuacuucaagaucuacagcaagcacacccccaucaaccuggugcgggaccugccccagggauucagcgcccuggagccucugguggaccugcccaucggcaucaacaucaccagguuccagacccugcuggcccugcaccggagcuaccugacccccggcgacagcagcagcggcuggaccgccggcgccgccgcauacuacgugggcuaccugcagccacggaccuuccugcugaaguacaacgagaacggcaccaucaccgacgccguggacugcgcccuggacccccugagcgagaccaagugcacccuaaagagcuucaccguggagaagggcaucuaccagaccagcaacuuccgggugcagcccacugagagcaucgugcgguuccccaacauuaccaaccugugucccuucggcgagguguucaacgccacccgguucgccagcguguacgccuggaaccggaagcggaucagcaacugcguggccgacuacagcgugcuguacaacagcgccagcuucagcaccuucaagugcuacggcgugagcccuaccaagcugaacgaccugugcuucaccaacguguacgcugacagcuucgugauccggggcgacgaggugcggcagaucgcccccggccagaccggcaagaucgccgacuacaacuacaagcugcccgacgacuucaccggcugcgugaucgccuggaacagcaacaaccuggacagcaaggugggcggcaacuacaacuaccuguuccggcuguuccguaagagcaaccugaagccauuugagcgggacaucagcaccgagaucuaccaggccggcagcacccccugcaacgguguggagggcuucaacugcuacuucccccugcagagcuacggcuuccagcccaccaacggcgugggcuaccagcccuaccgggugguggugcugagcuucgagcugcugcacgcccccgccaccgugugcggcccuaaaaagagcaccaaccuggugaagaacaagugcgugaacuucaauuucaacggccugaccggcaccggcgugcugaccgagagcaacaagaaguuccugcccuuccagcaguucggccgggauaucgccgacaccaccgacgcagugcgggacccccagacccuggagauccuggacaucaccccaugcagcuucggcggcgugagcgucaucacccccggcacaaacaccagcaaccagguggccgugcuguaccagggagugaacugcaccgaggugcccguggccauccacgccgaccagcugacccccaccuggcggguguacagcaccggcagcaacguguuccagacccgggccggcugccugaucggcgccgagcacgugaacaacuccuacgagugcgacauccccaucggcgcuggcaucugcgccagcuaccagacccagaccaacagcccccggcgggcccggagcguggccagccagagcaucaucgccuacaccaugagcuuaggcgccgagaacagcguggccuacagcaacaacagcaucgcgaucccuaccaacuucaccaucagcgugaccaccgagauacugcccgugagcaugaccaagaccagcguggacuguaccauguacaucugcggcgacagcaccgagugcagcaaccugcugcugcaguacggcagcuucugcacccagcugaaccgggcccugaccggcaucgccguggagcaggacaagaacacccaagagguguucgcccaggugaagcagaucuacaagacucccccaaucaaggacuucggcggcuucaacuucagccagauccugcccgaccccagcaagcccagcaagcggagcuucaucgaggaccugcuguucaacaaggugacccuggccgacgccggcuucaucaagcaguacggcgacugccugggggauaucgccgcucgggaccugaucugcgcccagaaguucaacggccugaccgugcugcccccucugcugaccgacgagaugaucgcccaguacaccagcgcccugcuugccggcaccaucaccagcggcuggaccuucggcgccggcgcagcccugcagauccccuucgccaugcagauggccuaccgguucaacggcaucggcgugacccagaacgugcuguacgagaaccagaagcugaucgccaaccaguucaacagcgccaucggcaagauccaggacagccugagcagcaccgccagcgcccugggcaagcugcaggacguggugaaccagaacgcucaggcccugaacacccuggugaagcagcugagcagcaacuuuggcgccaucagcucagugcugaaugacauccugagcaggcuggacaagguggaggccgaggugcagaucgaccggcugaucaccggccggcugcagagccugcagaccuacgugacccagcagcugauccgggccgccgagauccgggccagcgccaaccuggcagccaccaagaugagcgagugcgugcugggccagagcaagcggguggacuucugcggcaagggcuaccaccugaugagcuucccccagagcgccccacacggcgugguguuccuccacgucacauacgugcccgcccaggagaagaacuucaccaccgcccccgccauuugccacgacggcaaggcucacuucccccgggagggaguguucgugagcaacggcacccacugguucgugacccagcggaacuucuacgagccccagaucaucaccaccgacaacaccuucgugagcggcaacugcgacguggugaucggcaucgugaacaacaccguguacgacccccugcagccugagcuggacagcuucaaggaggagcuggacaaguacuucaagaaccacaccagccccgacguggaucugggcgacaucagcggcaucaacgccagcguggugaacauccagaaggagaucgaccggcugaacgagguggccaagaaccugaacgagagccugaucgaccugcaggagcugggcaaguacgagcaguacaucaaguggcccugguacaucuggcugggcuucaucgccggccugaucgccaucgugauggugaccaucaugcugugcugcaugaccagcugcuguagcugccugaagggcugcugcagcugcggcagcugcugcaaguucgacgaggacgacagcgagccagugcugaagggcgugaagcugcacuacaccugaggacuagucccuguucccagagcccacuuuuuuuucuuuuuuugaaauaaaauagccugucuuucagaucuaaaaaaaaaaaaaaaaaaaaaaaaaaaaaaaaaaaaaaaaaaaaaaaaaaaaaaaaaaaaaaaaaaaaaaaaaaaaaaaaaaaaaaaaaaaaaaaaaaaa

SEQ ID NO: 25011 - RNA, 4167 nt, Artificial Sequence
  SARS-CoV-2/Wuhan/WIV05/2019__EPI_ISL_402128 spike protein mRNA gc (1-1273)(D614G_I692V)
aggagagggcgcuuggcuugcaaggacccugagcugcggcauugaagcacacccaacccaacucgacugaagucagccucacugaaccggaucugagaaucuucucucucugggcuugccagggcucuccgaaccuagcuagcauccucuucaauuccaacuagaaagcuuaccauguucguguuccuggugcugcugccccuggugagcagccagugcgugaaccugaccacccggacccagcugcccccugccuacaccaacagcuucacccggggcguguacuaccccgacaagguguuccggagcagcgugcugcacagcacccaggaccuguuccugcccuucuucagcaacgugaccugguuccacgccauccacgugagcggcaccaacggcaccaagcgguucgacaacccagugcugcccuucaacgacggcguguacuucgccagcaccgagaagucaaacaucauccggggcuggaucuucggcaccacccuggacagcaagacacagagccugcugaucgugaacaacgccaccaacguggugaucaaggugugcgaguuucaguucugcaacgaccccuuccugggcguguacuaccacaagaacaacaagagcuggauggagagcgaguuccgggucuacagcagcgcuaacaauugcaccuucgaguacgugagccagcccuuccugauggaccucgagggcaagcagggcaacuucaagaaccugcgggaguucguguucaagaacaucgauggcuacuucaagaucuacagcaagcacacccccaucaaccuggugcgggaccugccccagggauucagcgcccuggagccucugguggaccugcccaucggcaucaacaucaccagguuccagacccugcuggcccugcaccggagcuaccugacccccggcgacagcagcagcggcuggaccgccggcgccgccgcauacuacgugggcuaccugcagccacggaccuuccugcugaaguacaacgagaacggcaccaucaccgacgccguggacugcgcccuggacccccugagcgagaccaagugcacccuaaagagcuucaccguggagaagggcaucuaccagaccagcaacuuccgggugcagcccacugagagcaucgugcgguuccccaacauuaccaaccugugucccuucggcgagguguucaacgccacccgguucgccagcguguacgccuggaaccggaagcggaucagcaacugcguggccgacuacagcgugcuguacaacagcgccagcuucagcaccuucaagugcuacggcgugagcccuaccaagcugaacgaccugugcuucaccaacguguacgcugacagcuucgugauccggggcgacgaggugcggcagaucgcccccggccagaccggcaagaucgccgacuacaacuacaagcugcccgacgacuucaccggcugcgugaucgccuggaacagcaacaaccuggacagcaaggugggcggcaacuacaacuaccuguaccggcuguuccguaagagcaaccugaagccauucgagcgggacaucagcaccgagaucuaccaggccggcagcacccccugcaacgguguggagggcuuuaacugcuacuucccccugcagagcuacggcuuccagcccaccaacggcgugggcuaccagcccuaccgggugguggugcugagcuucgagcugcugcacgcccccgccaccgugugcggcccuaaaaagagcaccaaccuggugaagaacaagugcgugaacuucaauuucaacggccugaccggcaccggcgugcugaccgagagcaacaagaaguuccugcccuuccagcaguucggccgggauaucgccgacaccaccgacgcagugcgggacccccagacccuggagauccuggacaucaccccaugcagcuucggcggcgugagcgucaucacccccggcacaaacaccagcaaccagguggccgugcuguaccagggagugaacugcaccgaggugcccguggccauccacgccgaccagcugacccccaccuggcggguguacagcaccggcagcaacguguuccagacccgggccggcugccugaucggcgccgagcacgugaacaacuccuacgagugcgacauccccaucggcgcuggcaucugcgccagcuaccagacccagaccaacagcccccggcgggcccggagcguggccagccagagcgugaucgccuacaccaugagcuuaggcgccgagaacagcguggccuacagcaacaacagcaucgcgaucccuaccaacuucaccaucagcgugaccaccgagauccugcccgugagcaugaccaagaccagcguggacuguaccauguacauaugcggcgacagcaccgagugcagcaaccugcugcugcaguacggcagcuucugcacccagcugaaccgggcccugaccggcaucgccguggagcaggacaagaacacccaagagguguucgcccaggugaagcagaucuacaagacucccccaaucaaggacuucggcggcuucaacuucagccagauccugcccgaccccagcaagcccagcaagcggagcuucaucgaggaccugcuguucaacaaggugacccuggccgacgccggcuucaucaagcaguacggcgacugccugggggauaucgccgcucgggaccugaucugcgcccagaaguucaacggccugaccgugcugcccccucugcugaccgacgagaugaucgcccaguacaccagcgcccugcuugccggcaccaucaccagcggcuggaccuucggcgccggcgcagcccugcagauccccuucgccaugcagauggccuaccgguucaacggcaucggcgugacccagaacgugcuguacgagaaccagaagcugaucgccaaccaguucaacagcgccaucggcaagauccaggacagccugagcagcaccgccagcgcccugggcaagcugcaggacguggugaaccagaacgcucaggcccugaacacccuggugaagcagcugagcagcaacuucggcgccaucagcucagugcugaaugacauccugagcaggcuggacaagguggaggccgaggugcagaucgaccggcugaucaccggccggcugcagagccugcagaccuacgugacccagcagcugauccgggccgccgagauccgggccagcgccaaccuggcagccaccaagaugagcgagugcgugcugggccagagcaagcggguggacuuuugcggcaagggcuaccaccugaugagcuucccccagagcgccccacacggcguggucuuccuccacgugacauacgugcccgcccaggagaagaacuucaccaccgcccccgccaucugccacgacggcaaggcucacuucccccgggagggaguguucgugagcaacggcacccacugguucgugacccagcggaacuucuacgagccccagauuaucaccaccgacaacaccuucgugagcggcaacugcgacguggugaucggcaucgugaacaacaccguguacgacccccugcagccugagcuggacagcuucaaggaggagcuggacaaguacuucaagaaccacaccagccccgacguggaucugggcgacaucagcggcaucaacgccagcguggugaacauccagaaggagaucgaccggcugaacgagguggccaagaaccugaacgagagccugaucgaccugcaggagcugggcaaguacgagcaguacaucaaguggcccugguacaucuggcugggcuucaucgccggccugaucgccaucgugauggugaccaucaugcugugcugcaugaccagcugcuguagcugccugaagggcugcugcagcugcggcagcugcugcaaguucgacgaggacgacagcgagccagugcugaagggcgugaagcugcacuacaccugaggacuagucccuguucccagagcccacuuuuuuuucuuuuuuugaaauaaaauagccugucuuucagaucuaaaaaaaaaaaaaaaaaaaaaaaaaaaaaaaaaaaaaaaaaaaaaaaaaaaaaaaaaaaaaaaaaaaaaaaaaaaaaaaaaaaaaaaaaaaaaaaaaaaa

SEQ ID NO: 25012 - RNA, 4167 nt, Artificial Sequence
  SARS-CoV-2/Wuhan/WIV05/2019__EPI_ISL_402128 spike protein mRNA gc (1-1273)(D614G_M1229I)
aggagagggcgcuuggcuugcaaggacccugagcugcggcauugaagcacacccaacccaacucgacugaagucagccucacugaaccggaucugagaaucuucucucucugggcuugccagggcucuccgaaccuagcuagcauccucuucaauuccaacuagaaagcuuaccauguucguguuccuggugcugcugccccuggugagcagccagugcgugaaccugaccacccggacccagcugcccccugccuacaccaacagcuucacccggggcguguacuaccccgacaagguguuccggagcagcgugcugcacagcacccaggaccuguuccugcccuucuucagcaacgugaccugguuccacgccauccacgugagcggcaccaacggcaccaagcgguucgacaacccagugcugcccuucaacgacggcguguacuucgccagcaccgagaagucaaacaucauccggggcuggaucuucggcaccacccuggacagcaagacacagagccugcugaucgugaacaacgccaccaacguggugaucaaggugugcgaguuucaguucugcaacgaccccuuccugggcguguacuaccacaagaacaacaagagcuggauggagagcgaguuccgggucuacagcagcgcuaacaauugcaccuucgaguacgugagccagcccuuccugauggaccucgagggcaagcagggcaacuucaagaaccugcgggaguucguguucaagaacaucgauggcuacuucaagaucuacagcaagcacacccccaucaaccuggugcgggaccugccccagggauucagcgcccuggagccucugguggaccugcccaucggcaucaacaucaccagguuccagacccugcuggcccugcaccggagcuaccugacccccggcgacagcagcagcggcuggaccgccggcgccgccgcauacuacgugggcuaccugcagccacggaccuuccugcugaaguacaacgagaacggcaccaucaccgacgccguggacugcgcccuggacccccugagcgagaccaagugcacccuaaagagcuucaccguggagaagggcaucuaccagaccagcaacuuccgggugcagcccacugagagcaucgugcgguuccccaacauuaccaaccugugucccuucggcgagguguucaacgccacccgguucgccagcguguacgccuggaaccggaagcggaucagcaacugcguggccgacuacagcgugcuguacaacagcgccagcuucagcaccuucaagugcuacggcgugagcccuaccaagcugaacgaccugugcuucaccaacguguacgcugacagcuucgugauccggggcgacgaggugcggcagaucgcccccggccagaccggcaagaucgccgacuacaacuacaagcugcccgacgacuucaccggcugcgugaucgccuggaacagcaacaaccuggacagcaaggugggcggcaacuacaacuaccuguaccggcuguuccguaagagcaaccugaagccauucgagcgggacaucagcaccgagaucuaccaggccggcagcacccccugcaacgguguggagggcuuuaacugcuacuucccccugcagagcuacggcuuccagcccaccaacggcgugggcuaccagcccuaccgggugguggugcugagcuucgagcugcugcacgcccccgccaccgugugcggcccuaaaaagagcaccaaccuggugaagaacaagugcgugaacuucaauuucaacggccugaccggcaccggcgugcugaccgagagcaacaagaaguuccugcccuuccagcaguucggccgggauaucgccgacaccaccgacgcagugcgggacccccagacccuggagauccuggacaucaccccaugcagcuucggcggcgugagcgucaucacccccggcacaaacaccagcaaccagguggccgugcuguaccagggagugaacugcaccgaggugcccguggccauccacgccgaccagcugacccccaccuggcggguguacagcaccggcagcaacguguuccagacccgggccggcugccugaucggcgccgagcacgugaacaacuccuacgagugcgacauccccaucggcgcuggcaucugcgccagcuaccagacccagaccaacagcccccggcgggcccggagcguggccagccagagcaucaucgccuacaccaugagcuuaggcgccgagaacagcguggccuacagcaacaacagcaucgcgaucccuaccaacuucaccaucagcgugaccaccgagauacugcccgugagcaugaccaagaccagcguggacuguaccauguacaucugcggcgacagcaccgagugcagcaaccugcugcugcaguacggcagcuucugcacccagcugaaccgggcccugaccggcaucgccguggagcaggacaagaacacccaagagguguucgcccaggugaagcagaucuacaagacucccccaaucaaggacuucggcggcuucaacuucagccagauccugcccgaccccagcaagcccagcaagcggagcuucaucgaggaccugcuguucaacaaggugacccuggccgacgccggcuucaucaagcaguacggcgacugccugggggauaucgccgcucgggaccugaucugcgcccagaaguucaacggccugaccgugcugcccccucugcugaccgacgagaugaucgcccaguacaccagcgcccugcuugccggcaccaucaccagcggcuggaccuucggcgccggcgcagcccugcagauccccuucgccaugcagauggccuaccgguucaacggcaucggcgugacccagaacgugcuguacgagaaccagaagcugaucgccaaccaguucaacagcgccaucggcaagauccaggacagccugagcagcaccgccagcgcccugggcaagcugcaggacguggugaaccagaacgcucaggcccugaacacccuggugaagcagcugagcagcaacuucggcgccaucagcucagugcugaaugacauccugagcaggcuggacaagguggaggccgaggugcagaucgaccggcugaucaccggccggcugcagagccugcagaccuacgugacccagcagcugauccgggccgccgagauccgggccagcgccaaccuggcagccaccaagaugagcgagugcgugcugggccagagcaagcggguggacuuuugcggcaagggcuaccaccugaugagcuucccccagagcgccccacacggcgugguguuccuccacgucacauacgugcccgcccaggagaagaacuucaccaccgcccccgccauuugccacgacggcaaggcucacuucccccgggagggaguguucgugagcaacggcacccacugguucgugacccagcggaacuucuacgagccccagaucaucaccaccgacaacaccuucgugagcggcaacugcgacguggugaucggcaucgugaacaacaccguguacgacccccugcagccugagcuggacagcuucaaggaggagcuggacaaguacuucaagaaccacaccagccccgacguggaucugggcgacaucagcggcaucaacgccagcguggugaacauccagaaggagaucgaccggcugaacgagguggccaagaaccugaacgagagccugaucgaccugcaggagcugggcaaguacgagcaguacaucaaguggcccugguacaucuggcugggcuucaucgccggccugaucgccaucgugaucgugaccaucaugcugugcugcaugaccagcugcuguagcugccugaagggcugcugcagcugcggcagcugcugcaaguucgacgaggacgacagcgagccagugcugaagggcgugaagcugcacuacaccugaggacuagucccuguucccagagcccacuuuuuuuucuuuuuuugaaauaaaauagccugucuuucagaucuaaaaaaaaaaaaaaaaaaaaaaaaaaaaaaaaaaaaaaaaaaaaaaaaaaaaaaaaaaaaaaaaaaaaaaaaaaaaaaaaaaaaaaaaaaaaaaaaaaaa

SEQ ID NO: 25013 - RNA, 4161 nt, Artificial Sequence
  SARS-CoV-2/Wuhan/WIV05/2019__EPI_ISL_402128 spike protein mRNA gc (1-1273)(H69del_V70del_A222V_Y453F_S477N_D614G_I692V)
aggagagggcgcuuggcuugcaaggacccugagcugcggcauugaagcacacccaacccaacucgacugaagucagccucacugaaccggaucugagaaucuucucucucugggcuugccagggcucuccgaaccuagcuagcauccucuucaauuccaacuagaaagcuuaccauguucguguuccuggugcugcugccccuggugagcagccagugcgugaaccugaccacccggacccagcugcccccugccuacaccaacagcuucacccggggcguguacuaccccgacaagguguuccggagcagcgugcugcacagcacccaggaccuguuccugcccuucuucagcaacgugaccugguuccacgccaucagcggcaccaacggcaccaagcgguucgacaacccagugcugcccuucaacgacggcguguacuucgccagcaccgagaagucaaacaucauccggggcuggaucuucggcaccacccuggacagcaagacacagagccugcugaucgugaacaacgccaccaacguggugaucaaggugugcgaguuucaguucugcaacgaccccuuccugggcguguacuaccacaagaacaacaagagcuggauggagagcgaguuccggguguacagcagcgcuaacaauugcaccuucgaguacgucagccagcccuuccugauggaccucgagggcaagcagggcaacuucaagaaccugcgggaguucguguucaagaacaucgauggcuacuucaagaucuacagcaagcacacccccaucaaccuggugcgggaccugccccagggauucagcgugcuggagccucugguggaccugcccaucggcaucaacaucaccagguuccagacccugcuggcccugcaccggagcuaccugacccccggcgacagcagcagcggcuggaccgccggcgccgccgccuacuacgugggcuaccugcagccacggaccuuccugcugaaguacaacgagaacggcaccaucaccgacgcaguggacugcgcccuggacccccugagcgagaccaagugcacccuaaagagcuucaccguggagaagggcaucuaccagaccagcaacuuccgggugcagcccacugagagcaucgugcgguuccccaacauuaccaaccugugucccuucggcgagguguucaacgccacccgguucgccagcguguacgccuggaaccggaagcggaucagcaacugcguggccgacuacagcgugcuguacaacagcgccagcuucagcaccuucaagugcuacggcgugagcccuaccaagcugaacgaccugugcuucaccaacguguacgccgacagcuucgugauccggggcgacgaggugcggcagaucgcucccggccagaccggcaagaucgccgacuacaacuacaagcugcccgacgacuucaccggcugcgugaucgccuggaacagcaacaaccuggacagcaaggugggcggcaacuacaacuaccuguuccggcuguuccguaagagcaaccugaagccauuugagcgggacaucagcaccgagaucuaccaggccggcaacacccccugcaacgguguggagggcuucaacugcuacuucccccugcagagcuacggcuuccagcccaccaacggcgugggcuaccagcccuaccgggugguggugcugagcuucgagcugcugcacgcccccgccaccgugugcggcccuaaaaagagcaccaaccuggugaagaacaagugcgugaauuucaacuucaacggccugaccggcaccggcgugcugaccgagagcaacaagaaguuccugcccuuccagcaguucggccgggauaucgccgacaccaccgacgccgugcgggacccccagacccuggagauccuggacaucaccccaugcagcuucggcggcgugagcgucaucacccccggcacaaacaccagcaaccagguggcagugcuguaccagggagugaacugcaccgaggugcccguggccauccacgccgaccagcugacccccaccuggcggguguacagcaccggcagcaacguguuccagacccgggccggcugccugaucggcgccgagcacgugaacaacagcuacgagugcgacauccccaucggcgccggcaucugcgcuuccuaccagacccagaccaacagcccccggcgggcccggagcguggccagccagagcgugaucgccuacaccaugagcuuaggcgccgagaacagcguggccuacagcaacaacagcaucgccaucccuaccaacuucaccaucagcgugaccaccgagauccugcccgugagcaugaccaagaccagcguggacuguaccauguacauaugcggcgacagcaccgagugcagcaaccugcugcugcaguacggcagcuucugcacccagcugaaccgggcgcugaccggcaucgccguggagcaggacaagaacacccaagagguguucgcccaggugaagcagaucuacaagacucccccaaucaaggacuucggcggcuucaacuucagccagauccugcccgaccccagcaagcccagcaagcggagcuucaucgaggaccugcuguucaacaaggugacccuggccgacgccggcuucaucaagcaguacggcgacugccugggggauaucgccgcccgggaccugaucugcgcucagaaguucaacggccugaccgugcugcccccucugcugaccgacgagaugaucgcccaguacaccagcgcccugcuugccggcaccaucaccagcggcuggaccuucggcgccggcgccgcacugcagauccccuucgccaugcagauggccuaccgguucaacggcaucggcgugacccagaacgugcuguacgagaaccagaagcugaucgccaaccaguucaacagcgccaucggcaagauccaggacagccugagcagcaccgccagcgcccugggcaagcugcaggacguggugaaccagaacgcccaggcucugaacacccuggugaagcagcugagcagcaauuuuggcgccaucagcagcgugcugaacgacauccugucaaggcuggacaagguggaggccgaggugcagaucgaccggcugaucaccggccggcugcagagccugcagaccuacgugacccagcagcugauccgggccgccgagauccgggccagcgccaaccuggccgcaaccaagaugagcgagugcgugcugggccagagcaagcggguggacuucugcggcaagggcuaccaccugaugagcuucccccagagcgccccacacggcguggucuuccuccacgugacauacgugcccgcccaggagaagaacuucaccaccgcccccgccaucugccacgacggcaaggcccacuucccccgggagggaguguucgugagcaacggcacccacugguucgugacccagcggaacuucuacgagccccagauuaucaccaccgacaacaccuucgugagcggcaacugcgacguggugaucggcaucgugaacaacaccguguacgacccccugcagccugagcuggacagcuucaaggaggagcuggacaaguacuucaagaaccacaccagccccgacguggaucugggcgacaucagcggcaucaacgcuagcguggugaacauccagaaggagaucgaccggcugaacgagguggccaagaaccugaacgagagccugaucgaccugcaggagcugggcaaguacgagcaguacaucaaguggcccugguacaucuggcugggcuucaucgccggccugaucgccaucgugauggugaccaucaugcugugcugcaugaccagcugcuguagcugccugaagggcugcugcagcugcggcagcugcugcaaguucgacgaggacgacagcgagccagugcugaagggcgugaagcugcacuacaccugaggacuagucccuguucccagagcccacuuuuuuuucuuuuuuugaaauaaaauagccugucuuucagaucuaaaaaaaaaaaaaaaaaaaaaaaaaaaaaaaaaaaaaaaaaaaaaaaaaaaaaaaaaaaaaaaaaaaaaaaaaaaaaaaaaaaaaaaaaaaaaaaaaaaa

SEQ ID NO: 25014 - RNA, 4161 nt, Artificial Sequence
  SARS-CoV-2/Wuhan/WIV05/2019__EPI_ISL_402128 spike protein mRNA gc (1-1273)(H69del_V70del_Y453F_D614G_I692V_M1229I)
aggagagggcgcuuggcuugcaaggacccugagcugcggcauugaagcacacccaacccaacucgacugaagucagccucacugaaccggaucugagaaucuucucucucugggcuugccagggcucuccgaaccuagcuagcauccucuucaauuccaacuagaaagcuuaccauguucguguuccuggugcugcugccccuggugagcagccagugcgugaaccugaccacccggacccagcugcccccugccuacaccaacagcuucacccggggcguguacuaccccgacaagguguuccggagcagcgugcugcacagcacccaggaccuguuccugcccuucuucagcaacgugaccugguuccacgccaucagcggcaccaacggcaccaagcgguucgacaacccagugcugcccuucaacgacggcguguacuucgccagcaccgagaagucaaacaucauccggggcuggaucuucggcaccacccuggacagcaagacacagagccugcugaucgugaacaacgccaccaacguggugaucaaggugugcgaguuucaguucugcaacgaccccuuccugggcguguacuaccacaagaacaacaagagcuggauggagagcgaguuccggguguacagcagcgcuaacaauugcaccuucgaguacgucagccagcccuuccugauggaccucgagggcaagcagggcaacuucaagaaccugcgggaguucguguucaagaacaucgauggcuacuucaagaucuacagcaagcacacccccaucaaccuggugcgggaccugccccagggauucagcgcccuggagccucugguggaccugcccaucggcaucaacaucaccagguuccagacccugcuggcccugcaccggagcuaccugacccccggcgacagcagcagcggcuggaccgccggcgccgccgcauacuacgugggcuaccugcagccacggaccuuccugcugaaguacaacgagaacggcaccaucaccgacgccguggacugcgcccuggacccccugagcgagaccaagugcacccuaaagagcuucaccguggagaagggcaucuaccagaccagcaacuuccgggugcagcccacugagagcaucgugcgguuccccaacauuaccaaccugugucccuucggcgagguguucaacgccacccgguucgccagcguguacgccuggaaccggaagcggaucagcaacugcguggccgacuacagcgugcuguacaacagcgccagcuucagcaccuucaagugcuacggcgugagcccuaccaagcugaacgaccugugcuucaccaacguguacgcugacagcuucgugauccggggcgacgaggugcggcagaucgcccccggccagaccggcaagaucgccgacuacaacuacaagcugcccgacgacuucaccggcugcgugaucgccuggaacagcaacaaccuggacagcaaggugggcggcaacuacaacuaccuguuccggcuguuccguaagagcaaccugaagccauuugagcgggacaucagcaccgagaucuaccaggccggcagcacccccugcaacgguguggagggcuucaacugcuacuucccccugcagagcuacggcuuccagcccaccaacggcgugggcuaccagcccuaccgggugguggugcugagcuucgagcugcugcacgcccccgccaccgugugcggcccuaaaaagagcaccaaccuggugaagaacaagugcgugaacuucaauuucaacggccugaccggcaccggcgugcugaccgagagcaacaagaaguuccugcccuuccagcaguucggccgggauaucgccgacaccaccgacgcagugcgggacccccagacccuggagauccuggacaucaccccaugcagcuucggcggcgugagcgugaucacccccggcacaaacaccagcaaccaggucgccgugcuguaccagggagugaacugcaccgaggugcccguggccauccacgccgaccagcugacccccaccuggcggguguacagcaccggcagcaacguguuccagacccgggccggcugccugaucggcgccgagcacgugaacaacuccuacgagugcgacauccccaucggcgcuggcaucugcgccagcuaccagacccagaccaacagcccccggcgggcccggagcguggccagccagagcgugaucgccuacaccaugagcuuaggcgccgagaacagcguggccuacagcaacaacagcaucgcgaucccuaccaacuucaccaucagcgugaccaccgagauccugcccgugagcaugaccaagaccagcguggacuguaccauguacauaugcggcgacagcaccgagugcagcaaccugcugcugcaguacggcagcuucugcacccagcugaaccgggcccugaccggcaucgccguggagcaggacaagaacacccaagagguguucgcccaggugaagcagaucuacaagacucccccaaucaaggacuucggcggcuucaacuucagccagauccugcccgaccccagcaagcccagcaagcggagcuucaucgaggaccugcuguucaacaaggugacccuggccgacgccggcuucaucaagcaguacggcgacugccugggggauaucgccgcucgggaccugaucugcgcccagaaguucaacggccugaccgugcugcccccucugcugaccgacgagaugaucgcccaguacaccagcgcccugcuugccggcaccaucaccagcggcuggaccuucggcgccggcgcagcccugcagauccccuucgccaugcagauggccuaccgguucaacggcaucggcgugacccagaacgugcuguacgagaaccagaagcugaucgccaaccaguucaacagcgccaucggcaagauccaggacagccugagcagcaccgccagcgcccugggcaagcugcaggacguggugaaccagaacgcucaggcccugaacacccuggugaagcagcugagcagcaacuuuggcgccaucagcucagugcugaaugacauccugagcaggcuggacaagguggaggccgaggugcagaucgaccggcugaucaccggccggcugcagagccugcagaccuacgugacccagcagcugauccgggccgccgagauccgggccagcgccaaccuggcagccaccaagaugagcgagugcgugcugggccagagcaagcggguggacuucugcggcaagggcuaccaccugaugagcuucccccagagcgccccacacggcgugguguuccuccacgucacauacgugcccgcccaggagaagaacuucaccaccgcccccgccaucugccacgacggcaaggcucacuucccccgggagggaguguucgugagcaacggcacccacugguucgugacccagcggaacuucuacgagccccagauuaucaccaccgacaacaccuucgugagcggcaacugcgacguggugaucggcaucgugaacaacaccguguacgacccccugcagccugagcuggacagcuucaaggaggagcuggacaaguacuucaagaaccacaccagccccgacguggaucugggcgacaucagcggcaucaacgccagcguggugaacauccagaaggagaucgaccggcugaacgagguggccaagaaccugaacgagagccugaucgaccugcaggagcugggcaaguacgagcaguacaucaaguggcccugguacaucuggcugggcuucaucgccggccugaucgccaucgugaucgugaccaucaugcugugcugcaugaccagcugcuguagcugccugaagggcugcugcagcugcggcagcugcugcaaguucgacgaggacgacagcgagccagugcugaagggcgugaagcugcacuacaccugaggacuagucccuguucccagagcccacuuuuuuuucuuuuuuugaaauaaaauagccugucuuucagaucuaaaaaaaaaaaaaaaaaaaaaaaaaaaaaaaaaaaaaaaaaaaaaaaaaaaaaaaaaaaaaaaaaaaaaaaaaaaaaaaaaaaaaaaaaaaaaaaaaaaa

SEQ ID NO: 25015 - RNA, 4158 nt, Artificial Sequence
  SARS-CoV-2/Wuhan/WIV05/2019__EPI_ISL_402128 spike protein mRNA gc (1-1273)(H69del_V70del_Y144del_N501Y_A570D_D614G_P681H_T716I_S982 A_D1118H)
aggagagggcgcuuggcuugcaaggacccugagcugcggcauugaagcacacccaacccaacucgacugaagucagccucacugaaccggaucugagaaucuucucucucugggcuugccagggcucuccgaaccuagcuagcauccucuucaauuccaacuagaaagcuuaccauguucguguuccuggugcugcugccccuggugagcagccagugcgugaaccugaccacccggacccagcugcccccugccuacaccaacagcuucacccggggcguguacuaccccgacaagguguuccggagcagcgugcugcacagcacccaggaccuguuccugcccuucuucagcaacgugaccugguuccacgccaucagcggcaccaacggcaccaagcgguucgacaacccagugcugcccuucaacgacggcguguacuucgccagcaccgagaagucaaacaucauccggggcuggaucuucggcaccacccuggacagcaagacacagagccugcugaucgugaacaacgccaccaacguggugaucaaggugugcgaguuucaguucugcaacgaccccuuccugggcguguaccacaagaacaacaagagcuggauggagagcgaguuccggguguacagcagcgcuaacaauugcaccuucgaguacgucagccagcccuuccugauggaccucgagggcaagcagggcaacuucaagaaccugcgggaguucguguucaagaacaucgauggcuacuucaagaucuacagcaagcacacccccaucaaccuggugcgggaccugccccagggauucagcgcccuggagccucugguggaccugcccaucggcaucaacaucaccagguuccagacccugcuggcccugcaccggagcuaccugacccccggcgacagcagcagcggcuggaccgccggcgccgccgcauacuacgugggcuaccugcagccacggaccuuccugcugaaguacaacgagaacggcaccaucaccgacgccguggacugcgcccuggacccccugagcgagaccaagugcacccuaaagagcuucaccguggagaagggcaucuaccagaccagcaacuuccgggugcagcccacugagagcaucgugcgguuccccaacauuaccaaccugugucccuucggcgagguguucaacgccacccgguucgccagcguguacgccuggaaccggaagcggaucagcaacugcguggccgacuacagcgugcuguacaacagcgccagcuucagcaccuucaagugcuacggcgugagcccuaccaagcugaacgaccugugcuucaccaacguguacgcugacagcuucgugauccggggcgacgaggugcggcagaucgcccccggccagaccggcaagaucgccgacuacaacuacaagcugcccgacgacuucaccggcugcgugaucgccuggaacagcaacaaccuggacagcaaggugggcggcaacuacaacuaccuguaccggcuguuccguaagagcaaccugaagccauucgagcgggacaucagcaccgagaucuaccaggccggcagcacccccugcaacgguguggagggcuuuaacugcuacuucccccugcagagcuacggcuuccagcccaccuacggcgugggcuaccagcccuaccgggugguggugcugagcuucgagcugcugcacgcccccgccaccgugugcggcccuaaaaagagcaccaaccuggugaagaacaagugcgugaacuucaacuucaauggccugaccggcaccggcgugcugaccgagagcaacaagaaguuccugcccuuccagcaguucggccgggauaucgacgacaccaccgacgccgugcgggacccccagacccuggagauccuggacaucaccccaugcagcuucggcggcgugagcgugaucacccccggcacaaacaccagcaaccaggucgcagugcuguaccagggagugaacugcaccgaggugcccguggccauccacgccgaccagcugacccccaccuggcggguguacagcaccggcagcaacguguuccagacccgggccggcugccugaucggcgccgagcacgugaacaacuccuacgagugcgacauccccaucggcgccggcaucugcgcuagcuaccagacccagaccaacagccaccggcgggcccggagcguggccagccagagcaucaucgccuacaccaugagcuuaggcgccgagaacagcguggccuacagcaacaacagcaucgccauccccaucaacuucaccauaagcgugaccaccgagauccugccugugagcaugaccaagaccagcguggacuguaccauguacaucugcggcgacagcaccgagugcagcaaccugcugcugcaguacggcagcuucugcacccagcugaaccgggcgcugaccggcaucgccguggagcaggacaagaacacccaagagguguucgcccaggugaagcagaucuacaagaccccacccaucaaggacuucggcggcuucaacuucagccagauccugcccgaccccagcaagcccagcaagcggagcuucaucgaggaccugcuguucaacaaggugacucuggccgacgccggcuucaucaagcaguacggcgauugccugggggacaucgccgcccgggaccugaucugcgcucagaaguucaacggccugaccgugcugccuccccugcugaccgacgagaugaucgcccaguacaccagcgcccugcuugccggcaccaucaccagcggcuggaccuucggcgccggcgccgcacugcagauccccuucgccaugcagauggccuaccgguucaacggcaucggcgugacccagaacgugcuguacgagaaccagaagcugaucgccaaccaguucaacagcgccaucggcaagauccaggacagccugagcagcaccgccagcgcccugggcaagcugcaggacguggugaaccagaacgcccaggcucugaacacccuggugaagcagcugagcagcaacuucggcgccaucagcucagugcugaacgacauccuggccaggcuggacaagguggaggccgaggugcagaucgaccggcugaucaccggccggcugcagagccugcagaccuacgugacccagcagcugauccgggccgccgagauucgggccagcgccaaucuggcagccaccaagaugagcgagugcgugcugggccagagcaagcggguggacuuuugcggcaagggcuaccaccugaugagcuucccccagagcgcuccccacggcgugguguuccuccacgugaccuacgucccagcccaggagaagaacuucacaaccgcccccgccaucugccacgacggcaaggcccacuucccccgggagggaguguucgugagcaacggcacccacugguucgugacccagcggaacuucuacgagccccagaucaucaccacccacaacaccuucgugagcggcaacugcgacguggugaucggcaucgugaacaacaccguguacgacccccugcagcccgagcuggacagcuucaaggaggagcuggacaaguacuucaagaaccacaccagcccugacguggaucugggcgacaucagcggcaucaacgccagcguggugaacauccagaaggagaucgaccggcugaacgagguggccaagaaccugaacgagagccugaucgaccugcaggagcugggcaaguacgagcaguacaucaaguggcccugguacaucuggcugggcuucaucgccggccugaucgccaucgugauggugaccaucaugcugugcugcaugaccagcugcuguagcugccugaagggcugcugcagcugcggcagcugcugcaaguucgacgaggacgacagcgagcccgugcugaagggcgugaagcugcacuacaccugaggacuagucccuguucccagagcccacuuuuuuuucuuuuuuugaaauaaaauagccugucuuucagaucuaaaaaaaaaaaaaaaaaaaaaaaaaaaaaaaaaaaaaaaaaaaaaaaaaaaaaaaaaaaaaaaaaaaaaaaaaaaaaaaaaaaaaaaaaaaaaaaaaaaa

SEQ ID NO: 25016 - RNA, 4167 nt, Artificial Sequence
  SARS-CoV-2/Wuhan/WIV05/2019__EPI_ISL_402128 spike protein mRNA gc (1-1273)(K417N_E484K_N501Y_D614G)
aggagagggcgcuuggcuugcaaggacccugagcugcggcauugaagcacacccaacccaacucgacugaagucagccucacugaaccggaucugagaaucuucucucucugggcuugccagggcucuccgaaccuagcuagcauccucuucaauuccaacuagaaagcuuaccauguucguguuccuggugcugcugccccuggugagcagccagugcgugaaccugaccacccggacccagcugcccccugccuacaccaacagcuucacccggggcguguacuaccccgacaagguguuccggagcagcgugcugcacagcacccaggaccuguuccugcccuucuucagcaacgugaccugguuccacgccauccacgugagcggcaccaacggcaccaagcgguucgacaacccagugcugcccuucaacgacggcguguacuucgccagcaccgagaagucaaacaucauccggggcuggaucuucggcaccacccuggacagcaagacacagagccugcugaucgugaacaacgccaccaacguggugaucaaggugugcgaguuucaguucugcaacgaccccuuccugggcguguacuaccacaagaacaacaagagcuggauggagagcgaguuccgggucuacagcagcgcuaacaauugcaccuucgaguacgugagccagcccuuccugauggaccucgagggcaagcagggcaacuucaagaaccugcgggaguucguguucaagaacaucgauggcuacuucaagaucuacagcaagcacacccccaucaaccuggugcgggaccugccccagggauucagcgcccuggagccucugguggaccugcccaucggcaucaacaucaccagguuccagacccugcuggcccugcaccggagcuaccugacccccggcgacagcagcagcggcuggaccgccggcgccgccgcauacuacgugggcuaccugcagccacggaccuuccugcugaaguacaacgagaacggcaccaucaccgacgccguggacugcgcccuggacccccugagcgagaccaagugcacccuaaagagcuucaccguggagaagggcaucuaccagaccagcaacuuccgggugcagcccacugagagcaucgugcgguuccccaacauuaccaaccugugucccuucggcgagguguucaacgccacccgguucgccagcguguacgccuggaaccggaagcggaucagcaacugcguggccgacuacagcgugcuguacaacagcgccagcuucagcaccuucaagugcuacggcgugagcccuaccaagcugaacgaccugugcuucaccaacguguacgcugacagcuucgugauccggggcgacgaggugcggcagaucgcccccggccagaccggcaacaucgccgacuacaacuacaagcugcccgacgacuucaccggcugcgugaucgccuggaacagcaacaaccuggacagcaaggugggcggcaacuacaacuaccuguaccggcuguuccguaagagcaaccugaagccauucgagcgggacaucagcaccgagaucuaccaggccggcagcacccccugcaacggugugaagggcuuuaacugcuacuucccccugcagagcuacggcuuccagcccaccuacggcgugggcuaccagcccuaccgggugguggugcugagcuucgagcugcugcacgcccccgccaccgugugcggcccuaaaaagagcaccaaccuggugaagaacaagugcgugaacuucaauuucaacggccugaccggcaccggcgugcugaccgagagcaacaagaaguuccugcccuuccagcaguucggccgggauaucgccgacaccaccgacgcagugcgggacccccagacccuggagauccuggacaucaccccaugcagcuucggcggcgugagcgucaucacccccggcacaaacaccagcaaccagguggccgugcuguaccagggagugaacugcaccgaggugcccguggccauccacgccgaccagcugacccccaccuggcggguguacagcaccggcagcaacguguuccagacccgggccggcugccugaucggcgccgagcacgugaacaacuccuacgagugcgacauccccaucggcgcuggcaucugcgccagcuaccagacccagaccaacagcccccggcgggcccggagcguggccagccagagcaucaucgccuacaccaugagcuuaggcgccgagaacagcguggccuacagcaacaacagcaucgcgaucccuaccaacuucaccaucagcgugaccaccgagauacugcccgugagcaugaccaagaccagcguggacuguaccauguacaucugcggcgacagcaccgagugcagcaaccugcugcugcaguacggcagcuucugcacccagcugaaccgggcccugaccggcaucgccguggagcaggacaagaacacccaagagguguucgcccaggugaagcagaucuacaagacucccccaaucaaggacuucggcggcuucaacuucagccagauccugcccgaccccagcaagcccagcaagcggagcuucaucgaggaccugcuguucaacaaggugacccuggccgacgccggcuucaucaagcaguacggcgacugccugggggauaucgccgcucgggaccugaucugcgcccagaaguucaacggccugaccgugcugcccccucugcugaccgacgagaugaucgcccaguacaccagcgcccugcuugccggcaccaucaccagcggcuggaccuucggcgccggcgcagcccugcagauccccuucgccaugcagauggccuaccgguucaacggcaucggcgugacccagaacgugcuguacgagaaccagaagcugaucgccaaccaguucaacagcgccaucggcaagauccaggacagccugagcagcaccgccagcgcccugggcaagcugcaggacguggugaaccagaacgcucaggcccugaacacccuggugaagcagcugagcagcaacuucggcgccaucagcucagugcugaaugacauccugagcaggcuggacaagguggaggccgaggugcagaucgaccggcugaucaccggccggcugcagagccugcagaccuacgugacccagcagcugauccgggccgccgagauccgggccagcgccaaccuggcagccaccaagaugagcgagugcgugcugggccagagcaagcggguggacuuuugcggcaagggcuaccaccugaugagcuucccccagagcgccccacacggcgugguguuccuccacgucacauacgugcccgcccaggagaagaacuucaccaccgcccccgccauuugccacgacggcaaggcucacuucccccgggagggaguguucgugagcaacggcacccacugguucgugacccagcggaacuucuacgagccccagaucaucaccaccgacaacaccuucgugagcggcaacugcgacguggugaucggcaucgugaacaacaccguguacgacccccugcagccugagcuggacagcuucaaggaggagcuggacaaguacuucaagaaccacaccagccccgacguggaucugggcgacaucagcggcaucaacgccagcguggugaacauccagaaggagaucgaccggcugaacgagguggccaagaaccugaacgagagccugaucgaccugcaggagcugggcaaguacgagcaguacaucaaguggcccugguacaucuggcugggcuucaucgccggccugaucgccaucgugauggugaccaucaugcugugcugcaugaccagcugcuguagcugccugaagggcugcugcagcugcggcagcugcugcaaguucgacgaggacgacagcgagccagugcugaagggcgugaagcugcacuacaccugaggacuagucccuguucccagagcccacuuuuuuuucuuuuuuugaaauaaaauagccugucuuucagaucuaaaaaaaaaaaaaaaaaaaaaaaaaaaaaaaaaaaaaaaaaaaaaaaaaaaaaaaaaaaaaaaaaaaaaaaaaaaaaaaaaaaaaaaaaaaaaaaaaaaa

SEQ ID NO: 25017 - RNA, 4158 nt, Artificial Sequence
  SARS-CoV-2/Wuhan/WIV05/2019__EPI_ISL_402128 spike protein mRNA gc (1-1273)(L18F_D80A_D215G_L242del_A243del_L244del_R246I_K417N_E484 K_N501Y_D614G_A701V)
aggagagggcgcuuggcuugcaaggacccugagcugcggcauugaagcacacccaacccaacucgacugaagucagccucacugaaccggaucugagaaucuucucucucugggcuugccagggcucuccgaaccuagcuagcauccucuucaauuccaacuagaaagcuuaccauguucguguuccuggugcugcugccccuggugagcagccagugcgugaacuucaccacccggacccagcugcccccugccuacaccaacagcuucacccggggcguguacuaccccgacaagguguuccggagcagcgugcugcacagcacccaggaccuguuccugcccuucuucagcaacgugaccugguuccacgccauccacgugagcggcaccaacggcaccaagcgguucgccaacccagugcugcccuucaacgacggcguguacuucgccagcaccgagaagucaaacaucauccggggcuggaucuuuggcaccacccuggacagcaagacacagagccugcugaucgugaacaacgcuaccaacguggugaucaaggugugcgaguuccaguucugcaacgaccccuuccugggcguguacuaccacaagaacaacaagagcuggauggagagcgaguuccgggucuacagcagcgccaacaauugcaccuucgaguacgugagccagcccuuccugauggaccuggagggcaagcagggcaacuucaagaaccuccgggaguucguguucaagaacaucgacggcuacuucaagaucuacagcaagcacacccccaucaaccuggugcggggacugccccagggcuucagcgcccuggagccucugguggaucugcccaucggcaucaacaucaccagguuccagacccugcacaucagcuaccugacccccggcgacagcagcagcggcuggaccgccggcgccgccgcauacuacgugggcuaccugcagccacggaccuuccugcugaaguacaacgagaacggcaccaucaccgacgccguggacugcgcccuggacccccugagcgagaccaagugcacccuuaagagcuucaccguggagaagggcaucuaccagaccagcaacuuccgggugcagcccacugagagcauugugcgguuccccaacaucaccaaccugugucccuucggcgagguguucaacgccacccgguucgccagcguguacgccuggaaccggaagcggaucagcaacugcguggccgacuacagcgugcuguacaacagcgccagcuucagcaccuucaagugcuacggcgugagcccuaccaagcugaacgaccugugcuucaccaacguguacgcugacagcuucgugauccggggcgacgaggugcggcagaucgcccccggccagaccggcaacaucgccgacuacaacuacaagcugcccgacgacuucaccggcugcgugaucgccuggaacagcaacaaccuggacagcaaggugggcggcaacuacaacuaccuguaccggcuauuccguaagagcaaccugaagccauuugagcgggacaucagcaccgagaucuaccaggccgguagcacccccugcaacggcgugaagggcuucaacugcuacuucccccugcagagcuacggcuuccagcccaccuacggcgugggcuaccagcccuaccgggugguggugcugagcuucgagcugcugcacgcccccgccaccgugugcggcccuaaaaagagcaccaaccuggugaagaacaagugcgugaacuucaauuucaacggccugaccggcaccggcgugcugaccgagagcaacaagaaguuccugcccuuccagcaguucggccgggacaucgccgacaccaccgaugcagugcgggacccccagacccuggagauccuggacaucaccccaugcagcuucggcggcgugagcgucaucacccccggaacaaacaccagcaaccagguggccgugcuguaccagggcgugaacugcaccgaggugcccguggccauccacgccgaccagcugacccccaccuggcggguguacagcaccggcagcaacguguuccagacccgggccggcugccugaucggcgccgagcacgugaacaacuccuacgagugcgacauccccaucggcgcuggcaucugcgccagcuaccagacccagaccaacagcccccggcgggcccggagcguggccagccagagcaucaucgccuacaccaugagccugggcguggagaacagcguggccuacagcaacaacagcaucgccaucccuaccaacuucaccauaagcgugaccaccgagauccugcccgugagcaugaccaagaccagcguggacuguaccauguacaucugcggcgacagcaccgagugcagcaaccuguuacugcaguacggcagcuucugcacccagcugaaccgggcgcugaccggcaucgccguggagcaggacaagaacacccaagagguguucgcccaggugaagcagaucuacaagacucccccaaucaaggacuucggcggcuucaacuucagccagauccugcccgaccccagcaagcccagcaagcggagcuucaucgaggaccugcuguucaacaaggugacccuggccgacgccggcuucaucaagcaguacggggacugccugggcgacaucgccgcccgggaccugaucugcgcucagaaguucaacggccugaccgugcugcccccucugcugaccgaugagaugaucgcccaguacaccagcgcccugcuggccggcaccaucaccagcggcuggaccuucggcgccggcgccgcacugcagauccccuucgccaugcagauggccuaccgguucaacggcaucggcgugacccagaacgugcuguacgagaaccagaagcugaucgccaaccaguucaacagcgccaucggcaagauccaggacagccugagcagcaccgccagcgcccugggcaagcugcaggacguggugaaccagaacgcccaggcucugaacacccuggugaagcagcugagcagcaacuuuggcgccaucagcucagugcugaaugacauccugagccggcuggacaagguggaggccgaggugcagaucgacaggcugaucaccggccggcugcagagccugcagaccuacgugacccagcagcugauccgggccgccgagauucgggccagcgccaaccuggccgcaaccaagaugagcgagugcgugcugggccagagcaagcggguggacuucugcggcaagggcuaccaccugaugagcuucccccagagcgccccacacggcguggucuuccugcacgugacauacgugcccgcccaggagaagaacuucaccaccgcccccgccaucugccacgacggaaaggcccacuucccccgggagggcguguucgugagcaacggcacccacugguucgugacccagcggaacuucuacgagccccagaucaucaccaccgacaacaccuucgugagcggcaacugcgacguggugaucggcaucgugaacaacaccguguacgacccccugcagccugagcuggacagcuucaaggaggagcucgacaaguacuucaagaaccacaccagccccgacguggaccugggcgacaucagcggcaucaacgcuagcguggugaacauccagaaggagaucgaucggcugaacgagguggccaagaaccugaacgagagccugaucgaccugcaggagcugggcaaguacgagcaguacaucaaguggcccugguacaucuggcugggcuucaucgccggccugaucgccaucgugauggugaccaucaugcugugcugcaugaccagcugcuguagcugccugaagggcugcugcagcugcggcagcugcugcaaguucgacgaggacgacagcgagccagugcugaagggcgugaagcugcacuacaccugaggacuagucccuguucccagagcccacuuuuuuuucuuuuuuugaaauaaaauagccugucuuucagaucuaaaaaaaaaaaaaaaaaaaaaaaaaaaaaaaaaaaaaaaaaaaaaaaaaaaaaaaaaaaaaaaaaaaaaaaaaaaaaaaaaaaaaaaaaaaaaaaaaaaa

SEQ ID NO: 25018 - RNA, 4167 nt, Artificial Sequence
  SARS-CoV-2/Wuhan/WIV05/2019__EPI_ISL_402128 spike protein mRNA gc (1-1273)(E484K_D614G)
aggagagggcgcuuggcuugcaaggacccugagcugcggcauugaagcacacccaacccaacucgacugaagucagccucacugaaccggaucugagaaucuucucucucugggcuugccagggcucuccgaaccuagcuagcauccucuucaauuccaacuagaaagcuuaccauguucguguuccuggugcugcugccccuggugagcagccagugcgugaaccugaccacccggacccagcugcccccugccuacaccaacagcuucacccggggcguguacuaccccgacaagguguuccggagcagcgugcugcacagcacccaggaccuguuccugcccuucuucagcaacgugaccugguuccacgccauccacgugagcggcaccaacggcaccaagcgguucgacaacccagugcugcccuucaacgacggcguguacuucgccagcaccgagaagucaaacaucauccggggcuggaucuucggcaccacccuggacagcaagacacagagccugcugaucgugaacaacgccaccaacguggugaucaaggugugcgaguuucaguucugcaacgaccccuuccugggcguguacuaccacaagaacaacaagagcuggauggagagcgaguuccgggucuacagcagcgcuaacaauugcaccuucgaguacgugagccagcccuuccugauggaccucgagggcaagcagggcaacuucaagaaccugcgggaguucguguucaagaacaucgauggcuacuucaagaucuacagcaagcacacccccaucaaccuggugcgggaccugccccagggauucagcgcccuggagccucugguggaccugcccaucggcaucaacaucaccagguuccagacccugcuggcccugcaccggagcuaccugacccccggcgacagcagcagcggcuggaccgccggcgccgccgcauacuacgugggcuaccugcagccacggaccuuccugcugaaguacaacgagaacggcaccaucaccgacgccguggacugcgcccuggacccccugagcgagaccaagugcacccuaaagagcuucaccguggagaagggcaucuaccagaccagcaacuuccgggugcagcccacugagagcaucgugcgguuccccaacauuaccaaccugugucccuucggcgagguguucaacgccacccgguucgccagcguguacgccuggaaccggaagcggaucagcaacugcguggccgacuacagcgugcuguacaacagcgccagcuucagcaccuucaagugcuacggcgugagcccuaccaagcugaacgaccugugcuucaccaacguguacgcugacagcuucgugauccggggcgacgaggugcggcagaucgcccccggccagaccggcaagaucgccgacuacaacuacaagcugcccgacgacuucaccggcugcgugaucgccuggaacagcaacaaccuggacagcaaggugggcggcaacuacaacuaccuguaccggcuguuccguaagagcaaccugaagccauucgagcgggacaucagcaccgagaucuaccaggccggcagcacccccugcaacggugugaagggcuuuaacugcuacuucccccugcagagcuacggcuuccagcccaccaacggcgugggcuaccagcccuaccgggugguggugcugagcuucgagcugcugcacgcccccgccaccgugugcggcccuaaaaagagcaccaaccuggugaagaacaagugcgugaacuucaauuucaacggccugaccggcaccggcgugcugaccgagagcaacaagaaguuccugcccuuccagcaguucggccgggauaucgccgacaccaccgacgcagugcgggacccccagacccuggagauccuggacaucaccccaugcagcuucggcggcgugagcgucaucacccccggcacaaacaccagcaaccagguggccgugcuguaccagggagugaacugcaccgaggugcccguggccauccacgccgaccagcugacccccaccuggcggguguacagcaccggcagcaacguguuccagacccgggccggcugccugaucggcgccgagcacgugaacaacuccuacgagugcgacauccccaucggcgcuggcaucugcgccagcuaccagacccagaccaacagcccccggcgggcccggagcguggccagccagagcaucaucgccuacaccaugagcuuaggcgccgagaacagcguggccuacagcaacaacagcaucgcgaucccuaccaacuucaccaucagcgugaccaccgagauacugcccgugagcaugaccaagaccagcguggacuguaccauguacaucugcggcgacagcaccgagugcagcaaccugcugcugcaguacggcagcuucugcacccagcugaaccgggcccugaccggcaucgccguggagcaggacaagaacacccaagagguguucgcccaggugaagcagaucuacaagacucccccaaucaaggacuucggcggcuucaacuucagccagauccugcccgaccccagcaagcccagcaagcggagcuucaucgaggaccugcuguucaacaaggugacccuggccgacgccggcuucaucaagcaguacggcgacugccugggggauaucgccgcucgggaccugaucugcgcccagaaguucaacggccugaccgugcugcccccucugcugaccgacgagaugaucgcccaguacaccagcgcccugcuugccggcaccaucaccagcggcuggaccuucggcgccggcgcagcccugcagauccccuucgccaugcagauggccuaccgguucaacggcaucggcgugacccagaacgugcuguacgagaaccagaagcugaucgccaaccaguucaacagcgccaucggcaagauccaggacagccugagcagcaccgccagcgcccugggcaagcugcaggacguggugaaccagaacgcucaggcccugaacacccuggugaagcagcugagcagcaacuucggcgccaucagcucagugcugaaugacauccugagcaggcuggacaagguggaggccgaggugcagaucgaccggcugaucaccggccggcugcagagccugcagaccuacgugacccagcagcugauccgggccgccgagauccgggccagcgccaaccuggcagccaccaagaugagcgagugcgugcugggccagagcaagcggguggacuuuugcggcaagggcuaccaccugaugagcuucccccagagcgccccacacggcgugguguuccuccacgucacauacgugcccgcccaggagaagaacuucaccaccgcccccgccauuugccacgacggcaaggcucacuucccccgggagggaguguucgugagcaacggcacccacugguucgugacccagcggaacuucuacgagccccagaucaucaccaccgacaacaccuucgugagcggcaacugcgacguggugaucggcaucgugaacaacaccguguacgacccccugcagccugagcuggacagcuucaaggaggagcuggacaaguacuucaagaaccacaccagccccgacguggaucugggcgacaucagcggcaucaacgccagcguggugaacauccagaaggagaucgaccggcugaacgagguggccaagaaccugaacgagagccugaucgaccugcaggagcugggcaaguacgagcaguacaucaaguggcccugguacaucuggcugggcuucaucgccggccugaucgccaucgugauggugaccaucaugcugugcugcaugaccagcugcuguagcugccugaagggcugcugcagcugcggcagcugcugcaaguucgacgaggacgacagcgagccagugcugaagggcgugaagcugcacuacaccugaggacuagucccuguucccagagcccacuuuuuuuucuuuuuuugaaauaaaauagccugucuuucagaucuaaaaaaaaaaaaaaaaaaaaaaaaaaaaaaaaaaaaaaaaaaaaaaaaaaaaaaaaaaaaaaaaaaaaaaaaaaaaaaaaaaaaaaaaaaaaaaaaaaaa

SEQ ID NO: 25019 - RNA, 4167 nt, Artificial Sequence
  SARS-CoV-2/Wuhan/WIV05/2019__EPI_ISL_402128 spike protein mRNA gc (1-1273)(L18F_T20N_P26S_D138Y_R190S_K417T_E484K_N501Y_D614G_H655Y _T1027I)
aggagagggcgcuuggcuugcaaggacccugagcugcggcauugaagcacacccaacccaacucgacugaagucagccucacugaaccggaucugagaaucuucucucucugggcuugccagggcucuccgaaccuagcuagcauccucuucaauuccaacuagaaagcuuaccauguucguguuccuggugcugcugccccuggugagcagccagugcgugaacuucaccaaccggacccagcugcccagcgccuacaccaacagcuucacccggggcguguacuacccugacaagguguuccggagcagcgugcugcacagcacccaggaccuguuccugcccuucuucagcaacgugaccugguuccacgccauccacgugagcggcaccaacggcaccaagcgguucgacaaccccgugcugccauucaacgacggcguguacuucgccagcaccgagaagucaaacaucauccggggcuggaucuuuggcaccacccuggacagcaagacccagagccugcugaucgugaacaacgccacaaacguggugaucaaggugugcgaguuccaguucugcaacuaccccuuccugggcguguacuaccacaagaacaacaagagcuggauggagagcgaguuccgggucuacagcagcgcuaauaacugcaccuucgaguacgugagccagcccuuccugauggaccuggagggcaagcagggcaacuucaagaaccucagcgaguucguguucaagaacaucgacggcuacuucaagaucuacagcaagcacacccccaucaaccuggugcgggaucugccccagggauucagcgcccuggagccccugguggaccugccuaucggcaucaacaucacccgguuccagacccugcuggcccugcacaggagcuaccugacccccggcgacagcagcagcggcuggaccgccggcgccgccgcauacuacgugggcuaccugcagccccggaccuuccugcugaaguacaacgagaacggcaccaucaccgacgccguggacugcgcccuggacccacugagcgagaccaagugcacccuaaagagcuucaccguggagaagggcaucuaccagaccagcaacuuccgggugcagcccaccgagagcaucgugcgguuccccaacauuacuaaccugugucccuucggcgagguguucaacgccacccgguucgccagcguguacgccuggaaccggaagcggaucagcaacugcguggccgacuacagcgugcuguacaacagcgccagcuucagcaccuucaagugcuacggcgugagccccaccaagcugaacgaccugugcuucaccaacguguacgcugacagcuucgugauccggggcgacgaggugcggcagaucgccccuggccagaccggcaccaucgccgacuacaacuacaagcugcccgacgacuucaccggcugcgugaucgccuggaacagcaacaaccuggacagcaaggugggcggcaacuacaacuaccuguaccggcuguuccguaagagcaaccugaagcccuuugagcgggacaucagcaccgagaucuaccaggccggcagcaccccaugcaacggugugaagggcuucaacugcuacuucccccugcagagcuacggcuuccagcccaccuacggcgugggcuaccagcccuaccgggugguggugcugagcuucgagcugcugcacgcccccgccaccgugugcggccccaaaaagagcaccaaccuggugaagaacaagugcgugaacuucaauuucaacggccugaccggcaccggcgugcugaccgagagcaacaagaaguuccugccuuuccagcaguucggccgggacaucgccgauaccaccgacgcagugcgggacccccagacccuggagauccuggacaucacccccugcagcuucggcggcgugagcgucaucaccccaggcacaaacaccagcaaccagguggccgugcuguaccagggagugaacugcaccgaggugcccguggccauccacgccgaccagcugacccccaccuggcggguguacuccaccggcagcaacguguuccagacccgggccggcugccugaucggcgccgaguacgugaacaacagcuacgagugcgacauccccaucggcgcuggcaucugcgccagcuaccagacccagaccaacagcccccggcgggcccggagcguggccagccagagcaucaucgccuacaccaugagccugggcgccgagaacagcguggccuacagcaacaacagcaucgcgauccccaccaacuucaccaucagcgugaccaccgagauauuaccugugagcaugaccaagaccagcguggacuguaccauguacaucugcggcgacagcaccgagugcagcaaccugcugcugcaguacggcagcuucugcacccagcugaaccgggcccugaccggcaucgccguggagcaggacaagaacacccaagagguguucgcccaggugaagcagaucuacaagacuccacccaucaaggacuucggcggcuucaacuucagccagauccugcccgaccccagcaagcccagcaagcggagcuucaucgaggaccugcuguucaacaaggugacccuggccgacgccggcuucaucaagcaguacggcgacugccugggggacaucgccgcucgggaucugaucugcgcccagaaguucaacggccugaccgugcugccuccccugcugaccgacgagaugaucgcccaguacaccagcgcccugcuggccggcaccaucaccagcggcuggaccuucggcgccggcgcagcccuucagauccccuucgccaugcagauggccuaccgguucaacggcaucggcgugacccagaacgugcuguacgagaaccagaagcugaucgccaaccaguucaacagcgccaucggcaagauccaggacagccugagcagcaccgccagcgcccugggcaagcugcaggacguggugaaccagaacgcucaggcccugaacacccuggugaagcagcugagcucaaacuuuggcgccaucagcagcgugcugaaugacauccugagccggcuggacaagguggaggccgaggugcagaucgacaggcugaucaccggccggcugcagagccugcagaccuacgugacccagcagcugauccgggccgccgagauccgggccagcgccaaccuggcagccauuaagaugagcgagugcgugcugggccagagcaagcggguggacuucugcggcaagggcuaccaccugaugagcuucccccagagcgcuccccacggcgugguguuccugcacgucaccuacgugccagcccaggagaagaacuucacaaccgcccccgccaucugccacgacggcaaggcccacuucccccgggagggaguguucgugagcaacggcacccacugguucgugacccagcggaacuucuacgagccccagaucaucaccaccgacaacaccuucgugagcggcaacugcgacguggugaucggcaucgugaacaacaccguguacgacccccuccagcccgagcuggacagcuucaaggaggagcuggacaaguacuucaagaaccacaccagcccugacguggaccugggcgauaucagcggcaucaacgccagcguggugaacauccagaaggagaucgaccggcugaacgagguggccaagaaccugaacgagagccugaucgaccugcaggagcugggcaaguacgagcaguacaucaaguggcccugguacaucuggcugggcuucaucgccggccugaucgccaucgugauggugaccaucaugcugugcugcaugaccagcugcuguagcugccugaagggcugcugcagcugcggcagcugcugcaaguucgacgaggacgacagcgagcccgugcugaagggcgugaagcugcacuacaccugaggacuagucccuguucccagagcccacuuuuuuuucuuuuuuugaaauaaaauagccugucuuucagaucuaaaaaaaaaaaaaaaaaaaaaaaaaaaaaaaaaaaaaaaaaaaaaaaaaaaaaaaaaaaaaaaaaaaaaaaaaaaaaaaaaaaaaaaaaaaaaaaaaaaa

SEQ ID NO: 25020 - RNA, 4167 nt, Artificial Sequence
  SARS-CoV-2/Wuhan/WIV05/2019__EPI_ISL_402128 spike protein mRNA gc (1-1273)(S13I_W152C_L452R_D614G)
aggagagggcgcuuggcuugcaaggacccugagcugcggcauugaagcacacccaacccaacucgacugaagucagccucacugaaccggaucugagaaucuucucucucugggcuugccagggcucuccgaaccuagcuagcauccucuucaauuccaacuagaaagcuuaccauguucguguuccuggugcugcugccccuggugagcauccagugcgugaaccugaccacccggacccagcugcccccugccuacaccaacagcuucacccggggcguguacuaccccgacaagguguuccggagcagcgugcugcacagcacccaggaccuguuccugcccuucuucagcaacgugaccugguuccacgccauccacgugagcggcaccaacggcaccaagcgguucgacaacccagugcugcccuucaacgacggcguguacuucgccagcaccgagaagucaaacaucauccggggcuggaucuucggcaccacccuggacagcaagacacagagccugcugaucgugaacaacgccaccaacguggugaucaaggugugcgaguuucaguucugcaacgaccccuuccugggcguguacuaccacaagaacaacaagagcugcauggagagcgaguuccgggucuacagcagcgcuaacaauugcaccuucgaguacgugagccagcccuuccugauggaccucgagggcaagcagggcaacuucaagaaccugcgggaguucguguucaagaacaucgauggcuacuucaagaucuacagcaagcacacccccaucaaccuggugcgggaccugccccagggauucagcgcccuggagccucugguggaccugcccaucggcaucaacaucaccagguuccagacccugcuggcccugcaccggagcuaccugacccccggcgacagcagcagcggcuggaccgccggcgccgccgcauacuacgugggcuaccugcagccacggaccuuccugcugaaguacaacgagaacggcaccaucaccgacgccguggacugcgcccuggacccccugagcgagaccaaguguacccuaaagagcuucaccguggagaagggcaucuaccagaccagcaacuuccgggugcagcccacugagagcauugugcgguuccccaacaucaccaaccugugccccuucggcgagguguucaacgccacccgguucgccagcguguacgccuggaaccggaagcggaucagcaacugcguggccgacuacagcgugcuguacaacagcgccagcuucagcaccuucaagugcuacggcgugagcccuaccaagcugaacgaccugugcuucaccaacguguacgcugacagcuucgugauccggggcgacgaggugcggcagaucgcccccggccagaccggcaagaucgccgacuacaacuacaagcugcccgacgacuucaccggcugcgugaucgccuggaacagcaacaaccuggacagcaaggugggcggcaacuacaacuaccgguaccggcuguuccguaagagcaaccugaagccauucgagcgggacaucagcaccgagaucuaccaggccggcagcacccccugcaacgguguggagggcuuuaacugcuacuucccccugcagagcuacggcuuccagcccaccaacggcgugggcuaccagcccuaccgggugguggugcugagcuucgagcugcugcacgcccccgccaccgugugcggcccuaaaaagagcaccaaccuggugaagaacaagugcgugaacuucaauuucaacggccugaccggcaccggcgugcugaccgagagcaacaagaaguuccugcccuuccagcaguucggccgggauaucgccgacaccaccgacgcagugcgggacccccagacccuggagauccuggacaucaccccaugcagcuucggcggcgugagcgucaucacccccggcacaaacaccagcaaccagguggccgugcuguaccagggagugaacugcaccgaggugcccguggccauccacgccgaccagcugacccccaccuggcggguguacagcaccggcagcaacguguuccagacccgggccggcugccugaucggcgccgagcacgugaacaacagcuacgagugcgacauccccaucggcgcuggcaucugugccuccuaccagacccagaccaacagcccccggcgggcccggagcguggccagccagagcaucaucgccuacaccaugagccugggcgccgagaacagcguggccuacagcaacaacagcaucgcgaucccuaccaacuucaccauaagcgugaccaccgagaucuuacccgugagcaugaccaagaccagcguggacugcaccauguacaucugcggcgacagcaccgagugcagcaaccugcugcugcaguacggcagcuucugcacccagcugaaccgggcccugaccggcaucgccguggagcaggacaagaacacccaagagguguucgcccaggugaagcagaucuacaagacucccccaaucaaggacuucggcggcuucaacuucagccagauccugcccgaccccagcaagcccagcaagcggagcuucaucgaggaccugcuguucaacaaggugacccuggccgacgccggcuucaucaagcaguacggcgacugccugggggauaucgccgcucgggaccugaucugcgcccagaaguucaacggccugaccgugcugcccccucugcugaccgacgagaugaucgcccaguacaccagcgcccugcuggccggcaccaucaccagcggcuggaccuucggcgccggcgcagcccuucagauccccuucgccaugcagauggccuacagguucaacggcaucggcgugacccagaacgugcuguacgagaaccagaagcugaucgccaaccaguucaacagcgccaucggcaagauccaggacagccugagcagcaccgccagcgcccugggcaagcugcaggacguggugaaccagaacgcucaggcccugaacacccuggugaagcagcugagcagcaacuucggcgccaucagcagcgugcugaaugacauccugucacggcuggacaagguggaggccgaggugcagaucgaccggcugaucaccggccggcugcagagccugcagaccuacgugacccagcagcugauccgggccgccgagauucgggccagcgccaaccuggcagccaccaagaugagcgagugcgugcugggccagagcaagcggguggacuuuugcggcaagggcuaccaccugaugagcuucccccagagcgccccacacggcgugguguuccugcacgucacauacgugcccgcccaggagaagaacuucaccaccgcccccgccaucugccacgacggcaaggcucacuucccccgggagggaguguucgugagcaacggcacccacugguucgugacccagcggaacuucuacgagccccagaucaucaccaccgacaacaccuucgugagcggcaacugcgacguggugaucggcaucgugaacaacaccguguacgacccccuccagccugagcuggacagcuucaaggaggagcuggacaaguacuucaagaaccacaccagccccgacguggaucugggcgacaucagcggcaucaacgccagcguggugaacauccagaaggagaucgaccggcugaacgagguggccaagaaccugaacgagagccugaucgaccugcaggagcugggcaaguacgagcaguacaucaaguggcccugguacaucuggcugggcuucaucgccggccugaucgccaucgugauggugaccaucaugcugugcugcaugaccagcuguugcagcugccugaagggcugcugcagcugcggcagcugcugcaaguucgacgaggacgacagcgagccagugcugaagggcgugaagcugcacuacaccugaggacuagucccuguucccagagcccacuuuuuuuucuuuuuuugaaauaaaauagccugucuuucagaucuaaaaaaaaaaaaaaaaaaaaaaaaaaaaaaaaaaaaaaaaaaaaaaaaaaaaaaaaaaaaaaaaaaaaaaaaaaaaaaaaaaaaaaaaaaaaaaaaaaaa

SEQ ID NO: 25021 - RNA, 4167 nt, Artificial Sequence
  SARS-CoV-2/Wuhan/WIV05/2019__EPI_ISL_402128 spike protein mRNA gc mod (1-1273)
aggagagggcgcuuggcuugcaaggacccugagcugcggcauugaagcacacccaacccaacucgacugaagucagccucacugaaccggaucugagaaucuucucucucugggcuugccagggcucuccgaaccuagcuagcauccucuucaauuccaacuagaaagcuuaccauguucguguuucuggugcugcugccccugguguccagccagugugugaaccugaccaccagaacacagcugccuccagccuacaccaacagcuucaccagaggcguguacuaccccgacaagguguucagauccagcgugcugcacucuacccaggaccuguuccugccuuucuucagcaacgugaccugguuccacgccauccacguguccggcaccaauggcaccaagagauucgacaaccccgugcugcccuucaacgacgggguguacuuugccagcaccgagaaguccaacaucaucagaggcuggaucuucggcaccacacuggacagcaagacccagagccugcugaucgugaacaacgccaccaacguggucaucaaagugugcgaguuccaguucugcaacgaccccuuccugggcgucuacuaccacaagaacaacaagagcuggauggaaagcgaguuccggguguacagcagcgccaacaacugcaccuucgaguacgugucccagccuuuccugauggaccuggaaggcaagcagggcaacuucaagaaccugcgcgaguucguguucaagaacaucgacggcuacuucaaaaucuacagcaagcacaccccuaucaaccucgugcgggaucugccucagggcuucucugcucuggaaccccugguggaucugcccaucggcaucaacaucacccgguuucagacacugcuggcccugcacagaagcuaccugacaccuggcgauagcagcagcggauggacagcuggugccgccgcuuacuaugugggcuaccugcagccuagaaccuuccugcugaaguacaacgagaacggcaccaucaccgacgccguggauugugcucuggauccucugagcgagacaaagugcacccugaaguccuucaccguggaaaagggcaucuaccagaccagcaacuuccgggugcagcccaccgaauccaucgugcgguuccccaauaucaccaaucugugccccuucggcgagguguucaaugccaccagauucgccucuguguacgccuggaaccggaagcggaucagcaauugcguggccgacuacuccgugcuguacaacuccgccagcuucagcaccuucaagugcuacggcguguccccuaccaagcugaacgaccugugcuucacaaacguguacgccgacagcuucgugauccggggagaugaagugcggcagauugccccuggacagacaggcaagaucgccgacuacaacuacaagcugcccgacgacuucaccggcugugugauugccuggaacagcaacaaccuggacuccaaagucggcggcaacuacaauuaccuguaccggcuguuccggaaguccaaucugaagcccuucgagcgggacaucagcaccgaaaucuaucaggccggcagcaccccuugcaacggcguggaaggcuucaacugcuacuucccacugcaguccuacggcuuucagcccacaaauggcgugggcuaucagcccuacagagugguggugcugagcuucgaacugcugcaugcuccugccacagugugcggcccuaagaaaagcaccaaucucgugaagaacaaaugcgugaacuucaacuucaacggccugaccggcaccggcgugcugacagagagcaacaagaaguuccugccauuccagcaguuuggccgggauaucgccgauaccacagacgccguuagagauccccagacacuggaaauccuggacaucaccccaugcagcuucggcggagugucugugaucaccccuggcaccaacaccagcaaucagguggcagugcuguaccaggacgugaacuguaccgaagugcccguggccauucacgccgaucagcugacaccuacauggcggguguacuccaccggcagcaauguguuucagaccagagccggcugucugaucggagccgagcacgugaacaauagcuacgagugcgacauccccaucggcgcuggcaucugugccagcuaccagacacagacaaacagccccagacgggcuagaagcguggccagccagagcaucauugccuacacaaugucucugggcgccgagaacagcguggccuacuccaacaacucuaucgcuauccccaccaacuucaccaucagcgugaccaccgagauccugccuguguccaugaccaagaccagcguggacugcaccauguacaucugcggcgauuccaccgagugcuccaaccugcugcugcaguacggcagcuucugcacccagcugaauagagcccugacagggaucgccguggaacaggacaagaacacccaagagguguucgcccaagugaagcaaaucuacaagaccccuccuaucaaggacuucggcggcuucaauuucagccagauucugcccgauccuagcaagcccagcaagcggagcuucaucgaggaccugcuguucaacaaagugacacuggccgacgccggcuucaucaagcaguauggcgauugucugggcgacauugccgccagggaucugauuugcgcccagaaguuuaacggacugacagugcugccuccucugcugaccgaugagaugaucgcccaguacacaucugcccugcuggccggcacaaucacaagcggcuggacauuuggagcuggcgccgcucugcagauccccuuugcuaugcagauggccuaccgguucaacggcaucggagugacccagaaugugcuguacgagaaccagaagcugaucgccaaccaguucaacagcgccaucggcaagauccaggacagccugagcagcacagcaagcgcccugggaaagcugcaggacguggucaaccagaaugcccaggcacugaacacccuggucaagcagcuguccuccaacuucggcgccaucagcucugugcugaacgauauccugagcagacuggacaaggucgaggccgaggugcagaucgacagacugaucacaggcagacugcagagccuccagacauacgugacccagcagcugaucagagccgccgagauuagagccucugccaaucuggccgccaccaagaugucugagugugugcugggccagagcaagagaguggacuuuugcggcaagggcuaccaccugaugagcuucccucagucugccccucacggcgugguguuucugcacgugacauaugugcccgcucaagagaagaauuucaccaccgcuccagccaucugccacgacggcaaagcccacuuuccuagagaaggcguguucguguccaacggcacccauugguucgugacacagcggaacuucuacgagccccagaucaucaccaccgacaacaccuucgugucuggcaacugcgacguugugaucggcauugugaacaauaccguguacgacccucugcagcccgagcuggacagcuucaaagaggaacuggacaaguacuuuaagaaccacacaagccccgacguggaccugggcgauaucagcggaaucaaugccagcgucgugaacauccagaaagagaucgaccggcugaacgagguggccaagaaucugaacgagagccugaucgaccugcaagaacuggggaaguacgagcaguacaucaaguggcccugguacaucuggcugggcuuuaucgccggacugauugccaucgugauggucacaaucaugcuguguugcaugaccagcugcuguagcugccugaagggcuguuguagcuguggcagcugcugcaaguucgacgaggacgauucugagcccgugcugaagggcgugaaacugcacuacaccugaggacuagucccuguucccagagcccacuuuuuuuucuuuuuuugaaauaaaauagccugucuuucagaucuaaaaaaaaaaaaaaaaaaaaaaaaaaaaaaaaaaaaaaaaaaaaaaaaaaaaaaaaaaaaaaaaaaaaaaaaaaaaaaaaaaaaaaaaaaaaaaaaaaaa

SEQ ID NO: 25022 - RNA, 4167 nt, Artificial Sequence
  SARS-CoV-2/Wuhan/WIV05/2019__EPI_ISL_402128 spike protein mRNA gc mod (1-1273)(D614G)
aggagagggcgcuuggcuugcaaggacccugagcugcggcauugaagcacacccaacccaacucgacugaagucagccucacugaaccggaucugagaaucuucucucucugggcuugccagggcucuccgaaccuagcuagcauccucuucaauuccaacuagaaagcuuaccauguucguguuucuggugcugcugccccugguguccagccagugugugaaccugaccaccagaacacagcugccuccagccuacaccaacagcuucaccagaggcguguacuaccccgacaagguguucagauccagcgugcugcacucuacccaggaccuguuccugccuuucuucagcaacgugaccugguuccacgccauccacguguccggcaccaauggcaccaagagauucgacaaccccgugcugcccuucaacgacgggguguacuuugccagcaccgagaaguccaacaucaucagaggcuggaucuucggcaccacacuggacagcaagacccagagccugcugaucgugaacaacgccaccaacguggucaucaaagugugcgaguuccaguucugcaacgaccccuuccugggcgucuacuaccacaagaacaacaagagcuggauggaaagcgaguuccggguguacagcagcgccaacaacugcaccuucgaguacgugucccagccuuuccugauggaccuggaaggcaagcagggcaacuucaagaaccugcgcgaguucguguucaagaacaucgacggcuacuucaaaaucuacagcaagcacaccccuaucaaccucgugcgggaucugccucagggcuucucugcucuggaaccccugguggaucugcccaucggcaucaacaucacccgguuucagacacugcuggcccugcacagaagcuaccugacaccuggcgauagcagcagcggauggacagcuggugccgccgcuuacuaugugggcuaccugcagccuagaaccuuccugcugaaguacaacgagaacggcaccaucaccgacgccguggauugugcucuggauccucugagcgagacaaagugcacccugaaguccuucaccguggaaaagggcaucuaccagaccagcaacuuccgggugcagcccaccgaauccaucgugcgguuccccaauaucaccaaucugugccccuucggcgagguguucaaugccaccagauucgccucuguguacgccuggaaccggaagcggaucagcaauugcguggccgacuacuccgugcuguacaacuccgccagcuucagcaccuucaagugcuacggcguguccccuaccaagcugaacgaccugugcuucacaaacguguacgccgacagcuucgugauccggggagaugaagugcggcagauugccccuggacagacaggcaagaucgccgacuacaacuacaagcugcccgacgacuucaccggcugugugauugccuggaacagcaacaaccuggacuccaaagucggcggcaacuacaauuaccuguaccggcuguuccggaaguccaaucugaagcccuucgagcgggacaucagcaccgaaaucuaucaggccggcagcaccccuugcaacggcguggaaggcuucaacugcuacuucccacugcaguccuacggcuuucagcccacaaauggcgugggcuaucagcccuacagagugguggugcugagcuucgaacugcugcaugcuccugccacagugugcggcccuaagaaaagcaccaaucucgugaagaacaaaugcgugaacuucaacuucaacggccugaccggcaccggcgugcugacagagagcaacaagaaguuccugccauuccagcaguuuggccgggauaucgccgauaccacagacgccguuagagauccccagacacuggaaauccuggacaucaccccaugcagcuucggcggagugucugugaucaccccuggcaccaacaccagcaaucagguggcagugcuguaccagggcgugaacuguaccgaagugcccguggccauucacgccgaucagcugacaccuacauggcggguguacuccaccggcagcaauguguuucagaccagagccggcugucugaucggagccgagcacgugaacaauagcuacgagugcgacauccccaucggcgcuggcaucugugccagcuaccagacacagacaaacagccccagacgggcuagaagcguggccagccagagcaucauugccuacacaaugucucugggcgccgagaacagcguggccuacuccaacaacucuaucgcuauccccaccaacuucaccaucagcgugaccaccgagauccugccuguguccaugaccaagaccagcguggacugcaccauguacaucugcggcgauuccaccgagugcuccaaccugcugcugcaguacggcagcuucugcacccagcugaauagagcccugacagggaucgccguggaacaggacaagaacacccaagagguguucgcccaagugaagcaaaucuacaagaccccuccuaucaaggacuucggcggcuucaauuucagccagauucugcccgauccuagcaagcccagcaagcggagcuucaucgaggaccugcuguucaacaaagugacacuggccgacgccggcuucaucaagcaguauggcgauugucugggcgacauugccgccagggaucugauuugcgcccagaaguuuaacggacugacagugcugccuccucugcugaccgaugagaugaucgcccaguacacaucugcccugcuggccggcacaaucacaagcggcuggacauuuggagcuggcgccgcucugcagauccccuuugcuaugcagauggccuaccgguucaacggcaucggagugacccagaaugugcuguacgagaaccagaagcugaucgccaaccaguucaacagcgccaucggcaagauccaggacagccugagcagcacagcaagcgcccugggaaagcugcaggacguggucaaccagaaugcccaggcacugaacacccuggucaagcagcuguccuccaacuucggcgccaucagcucugugcugaacgauauccugagcagacuggacaaggucgaggccgaggugcagaucgacagacugaucacaggcagacugcagagccuccagacauacgugacccagcagcugaucagagccgccgagauuagagccucugccaaucuggccgccaccaagaugucugagugugugcugggccagagcaagagaguggacuuuugcggcaagggcuaccaccugaugagcuucccucagucugccccucacggcgugguguuucugcacgugacauaugugcccgcucaagagaagaauuucaccaccgcuccagccaucugccacgacggcaaagcccacuuuccuagagaaggcguguucguguccaacggcacccauugguucgugacacagcggaacuucuacgagccccagaucaucaccaccgacaacaccuucgugucuggcaacugcgacguugugaucggcauugugaacaauaccguguacgacccucugcagcccgagcuggacagcuucaaagaggaacuggacaaguacuuuaagaaccacacaagccccgacguggaccugggcgauaucagcggaaucaaugccagcgucgugaacauccagaaagagaucgaccggcugaacgagguggccaagaaucugaacgagagccugaucgaccugcaagaacuggggaaguacgagcaguacaucaaguggcccugguacaucuggcugggcuuuaucgccggacugauugccaucgugauggucacaaucaugcuguguugcaugaccagcugcuguagcugccugaagggcuguuguagcuguggcagcugcugcaaguucgacgaggacgauucugagcccgugcugaagggcgugaaacugcacuacaccugaggacuagucccuguucccagagcccacuuuuuuuucuuuuuuugaaauaaaauagccugucuuucagaucuaaaaaaaaaaaaaaaaaaaaaaaaaaaaaaaaaaaaaaaaaaaaaaaaaaaaaaaaaaaaaaaaaaaaaaaaaaaaaaaaaaaaaaaaaaaaaaaaaaaa

SEQ ID NO: 25023 - RNA, 4167 nt, Artificial Sequence
  SARS-CoV-2/Wuhan/WIV05/2019__EPI_ISL_402128 spike protein mRNA gc mod (1-1273)(A222V_D614G)
aggagagggcgcuuggcuugcaaggacccugagcugcggcauugaagcacacccaacccaacucgacugaagucagccucacugaaccggaucugagaaucuucucucucugggcuugccagggcucuccgaaccuagcuagcauccucuucaauuccaacuagaaagcuuaccauguucguguuucuggugcugcugccccugguguccagccagugugugaaccugaccaccagaacacagcugccuccagccuacaccaacagcuucaccagaggcguguacuaccccgacaagguguucagauccagcgugcugcacucuacccaggaccuguuccugccuuucuucagcaacgugaccugguuccacgccauccacguguccggcaccaauggcaccaagagauucgacaaccccgugcugcccuucaacgacgggguguacuuugccagcaccgagaaguccaacaucaucagaggcuggaucuucggcaccacacuggacagcaagacccagagccugcugaucgugaacaacgccaccaacguggucaucaaagugugcgaguuccaguucugcaacgaccccuuccugggcgucuacuaccacaagaacaacaagagcuggauggaaagcgaguuccggguguacagcagcgccaacaacugcaccuucgaguacgugucccagccuuuccugauggaccuggaaggcaagcagggcaacuucaagaaccugcgcgaguucguguucaagaacaucgacggcuacuucaaaaucuacagcaagcacaccccuaucaaccucgugcgggaucugccucagggcuucucugugcuggaaccccugguggaucugcccaucggcaucaacaucacccgguuucagacacugcuggcccugcacagaagcuaccugacaccuggcgauagcagcagcggauggacagcuggugccgccgcuuacuaugugggcuaccugcagccuagaaccuuccugcugaaguacaacgagaacggcaccaucaccgacgccguggauugugcucuggauccucugagcgagacaaagugcacccugaaguccuucaccguggaaaagggcaucuaccagaccagcaacuuccgggugcagcccaccgaauccaucgugcgguuccccaauaucaccaaucugugccccuucggcgagguguucaaugccaccagauucgccucuguguacgccuggaaccggaagcggaucagcaauugcguggccgacuacuccgugcuguacaacuccgccagcuucagcaccuucaagugcuacggcguguccccuaccaagcugaacgaccugugcuucacaaacguguacgccgacagcuucgugauccggggagaugaagugcggcagauugccccuggacagacaggcaagaucgccgacuacaacuacaagcugcccgacgacuucaccggcugugugauugccuggaacagcaacaaccuggacuccaaagucggcggcaacuacaauuaccuguaccggcuguuccggaaguccaaucugaagcccuucgagcgggacaucagcaccgaaaucuaucaggccggcagcaccccuugcaacggcguggaaggcuucaacugcuacuucccacugcaguccuacggcuuucagcccacaaauggcgugggcuaucagcccuacagagugguggugcugagcuucgaacugcugcaugcuccugccacagugugcggcccuaagaaaagcaccaaucucgugaagaacaaaugcgugaacuucaacuucaacggccugaccggcaccggcgugcugacagagagcaacaagaaguuccugccauuccagcaguuuggccgggauaucgccgauaccacagacgccguuagagauccccagacacuggaaauccuggacaucaccccaugcagcuucggcggagugucugugaucaccccuggcaccaacaccagcaaucagguggcagugcuguaccagggcgugaacuguaccgaagugcccguggccauucacgccgaucagcugacaccuacauggcggguguacuccaccggcagcaauguguuucagaccagagccggcugucugaucggagccgagcacgugaacaauagcuacgagugcgacauccccaucggcgcuggcaucugugccagcuaccagacacagacaaacagccccagacgggcuagaagcguggccagccagagcaucauugccuacacaaugucucugggcgccgagaacagcguggccuacuccaacaacucuaucgcuauccccaccaacuucaccaucagcgugaccaccgagauccugccuguguccaugaccaagaccagcguggacugcaccauguacaucugcggcgauuccaccgagugcuccaaccugcugcugcaguacggcagcuucugcacccagcugaauagagcccugacagggaucgccguggaacaggacaagaacacccaagagguguucgcccaagugaagcaaaucuacaagaccccuccuaucaaggacuucggcggcuucaauuucagccagauucugcccgauccuagcaagcccagcaagcggagcuucaucgaggaccugcuguucaacaaagugacacuggccgacgccggcuucaucaagcaguauggcgauugucugggcgacauugccgccagggaucugauuugcgcccagaaguuuaacggacugacagugcugccuccucugcugaccgaugagaugaucgcccaguacacaucugcccugcuggccggcacaaucacaagcggcuggacauuuggagcuggcgccgcucugcagauccccuuugcuaugcagauggccuaccgguucaacggcaucggagugacccagaaugugcuguacgagaaccagaagcugaucgccaaccaguucaacagcgccaucggcaagauccaggacagccugagcagcacagcaagcgcccugggaaagcugcaggacguggucaaccagaaugcccaggcacugaacacccuggucaagcagcuguccuccaacuucggcgccaucagcucugugcugaacgauauccugagcagacuggacaaggucgaggccgaggugcagaucgacagacugaucacaggcagacugcagagccuccagacauacgugacccagcagcugaucagagccgccgagauuagagccucugccaaucuggccgccaccaagaugucugagugugugcugggccagagcaagagaguggacuuuugcggcaagggcuaccaccugaugagcuucccucagucugccccucacggcgugguguuucugcacgugacauaugugcccgcucaagagaagaauuucaccaccgcuccagccaucugccacgacggcaaagcccacuuuccuagagaaggcguguucguguccaacggcacccauugguucgugacacagcggaacuucuacgagccccagaucaucaccaccgacaacaccuucgugucuggcaacugcgacguugugaucggcauugugaacaauaccguguacgacccucugcagcccgagcuggacagcuucaaagaggaacuggacaaguacuuuaagaaccacacaagccccgacguggaccugggcgauaucagcggaaucaaugccagcgucgugaacauccagaaagagaucgaccggcugaacgagguggccaagaaucugaacgagagccugaucgaccugcaagaacuggggaaguacgagcaguacaucaaguggcccugguacaucuggcugggcuuuaucgccggacugauugccaucgugauggucacaaucaugcuguguugcaugaccagcugcuguagcugccugaagggcuguuguagcuguggcagcugcugcaaguucgacgaggacgauucugagcccgugcugaagggcgugaaacugcacuacaccugaggacuagucccuguucccagagcccacuuuuuuuucuuuuuuugaaauaaaauagccugucuuucagaucuaaaaaaaaaaaaaaaaaaaaaaaaaaaaaaaaaaaaaaaaaaaaaaaaaaaaaaaaaaaaaaaaaaaaaaaaaaaaaaaaaaaaaaaaaaaaaaaaaaaa

SEQ ID NO: 25024 - RNA, 4167 nt, Artificial Sequence
  SARS-CoV-2/Wuhan/WIV05/2019__EPI_ISL_402128 spike protein mRNA gc mod (1-1273)(N439K_D614G)
aggagagggcgcuuggcuugcaaggacccugagcugcggcauugaagcacacccaacccaacucgacugaagucagccucacugaaccggaucugagaaucuucucucucugggcuugccagggcucuccgaaccuagcuagcauccucuucaauuccaacuagaaagcuuaccauguucguguuucuggugcugcugccccugguguccagccagugugugaaccugaccaccagaacacagcugccuccagccuacaccaacagcuucaccagaggcguguacuaccccgacaagguguucagauccagcgugcugcacucuacccaggaccuguuccugccuuucuucagcaacgugaccugguuccacgccauccacguguccggcaccaauggcaccaagagauucgacaaccccgugcugcccuucaacgacgggguguacuuugccagcaccgagaaguccaacaucaucagaggcuggaucuucggcaccacacuggacagcaagacccagagccugcugaucgugaacaacgccaccaacguggucaucaaagugugcgaguuccaguucugcaacgaccccuuccugggcgucuacuaccacaagaacaacaagagcuggauggaaagcgaguuccggguguacagcagcgccaacaacugcaccuucgaguacgugucccagccuuuccugauggaccuggaaggcaagcagggcaacuucaagaaccugcgcgaguucguguucaagaacaucgacggcuacuucaaaaucuacagcaagcacaccccuaucaaccucgugcgggaucugccucagggcuucucugcucuggaaccccugguggaucugcccaucggcaucaacaucacccgguuucagacacugcuggcccugcacagaagcuaccugacaccuggcgauagcagcagcggauggacagcuggugccgccgcuuacuaugugggcuaccugcagccuagaaccuuccugcugaaguacaacgagaacggcaccaucaccgacgccguggauugugcucuggauccucugagcgagacaaagugcacccugaaguccuucaccguggaaaagggcaucuaccagaccagcaacuuccgggugcagcccaccgaauccaucgugcgguuccccaauaucaccaaucugugccccuucggcgagguguucaaugccaccagauucgccucuguguacgccuggaaccggaagcggaucagcaauugcguggccgacuacuccgugcuguacaacuccgccagcuucagcaccuucaagugcuacggcguguccccuaccaagcugaacgaccugugcuucacaaacguguacgccgacagcuucgugauccggggagaugaagugcggcagauugccccuggacagacaggcaagaucgccgacuacaacuacaagcugcccgacgacuucaccggcugugugauugccuggaacagcaagaaccuggacuccaaagucggcggcaacuacaauuaccuguaccggcuguuccggaaguccaaucugaagcccuucgagcgggacaucagcaccgaaaucuaucaggccggcagcaccccuugcaacggcguggaaggcuucaacugcuacuucccacugcaguccuacggcuuucagcccacaaauggcgugggcuaucagcccuacagagugguggugcugagcuucgaacugcugcaugcuccugccacagugugcggcccuaagaaaagcaccaaucucgugaagaacaaaugcgugaacuucaacuucaacggccugaccggcaccggcgugcugacagagagcaacaagaaguuccugccauuccagcaguuuggccgggauaucgccgauaccacagacgccguuagagauccccagacacuggaaauccuggacaucaccccaugcagcuucggcggagugucugugaucaccccuggcaccaacaccagcaaucagguggcagugcuguaccagggcgugaacuguaccgaagugcccguggccauucacgccgaucagcugacaccuacauggcggguguacuccaccggcagcaauguguuucagaccagagccggcugucugaucggagccgagcacgugaacaauagcuacgagugcgacauccccaucggcgcuggcaucugugccagcuaccagacacagacaaacagccccagacgggcuagaagcguggccagccagagcaucauugccuacacaaugucucugggcgccgagaacagcguggccuacuccaacaacucuaucgcuauccccaccaacuucaccaucagcgugaccaccgagauccugccuguguccaugaccaagaccagcguggacugcaccauguacaucugcggcgauuccaccgagugcuccaaccugcugcugcaguacggcagcuucugcacccagcugaauagagcccugacagggaucgccguggaacaggacaagaacacccaagagguguucgcccaagugaagcaaaucuacaagaccccuccuaucaaggacuucggcggcuucaauuucagccagauucugcccgauccuagcaagcccagcaagcggagcuucaucgaggaccugcuguucaacaaagugacacuggccgacgccggcuucaucaagcaguauggcgauugucugggcgacauugccgccagggaucugauuugcgcccagaaguuuaacggacugacagugcugccuccucugcugaccgaugagaugaucgcccaguacacaucugcccugcuggccggcacaaucacaagcggcuggacauuuggagcuggcgccgcucugcagauccccuuugcuaugcagauggccuaccgguucaacggcaucggagugacccagaaugugcuguacgagaaccagaagcugaucgccaaccaguucaacagcgccaucggcaagauccaggacagccugagcagcacagcaagcgcccugggaaagcugcaggacguggucaaccagaaugcccaggcacugaacacccuggucaagcagcuguccuccaacuucggcgccaucagcucugugcugaacgauauccugagcagacuggacaaggucgaggccgaggugcagaucgacagacugaucacaggcagacugcagagccuccagacauacgugacccagcagcugaucagagccgccgagauuagagccucugccaaucuggccgccaccaagaugucugagugugugcugggccagagcaagagaguggacuuuugcggcaagggcuaccaccugaugagcuucccucagucugccccucacggcgugguguuucugcacgugacauaugugcccgcucaagagaagaauuucaccaccgcuccagccaucugccacgacggcaaagcccacuuuccuagagaaggcguguucguguccaacggcacccauugguucgugacacagcggaacuucuacgagccccagaucaucaccaccgacaacaccuucgugucuggcaacugcgacguugugaucggcauugugaacaauaccguguacgacccucugcagcccgagcuggacagcuucaaagaggaacuggacaaguacuuuaagaaccacacaagccccgacguggaccugggcgauaucagcggaaucaaugccagcgucgugaacauccagaaagagaucgaccggcugaacgagguggccaagaaucugaacgagagccugaucgaccugcaagaacuggggaaguacgagcaguacaucaaguggcccugguacaucuggcugggcuuuaucgccggacugauugccaucgugauggucacaaucaugcuguguugcaugaccagcugcuguagcugccugaagggcuguuguagcuguggcagcugcugcaaguucgacgaggacgauucugagcccgugcugaagggcgugaaacugcacuacaccugaggacuagucccuguucccagagcccacuuuuuuuucuuuuuuugaaauaaaauagccugucuuucagaucuaaaaaaaaaaaaaaaaaaaaaaaaaaaaaaaaaaaaaaaaaaaaaaaaaaaaaaaaaaaaaaaaaaaaaaaaaaaaaaaaaaaaaaaaaaaaaaaaaaaa

SEQ ID NO: 25025 - RNA, 4167 nt, Artificial Sequence
  SARS-CoV-2/Wuhan/WIV05/2019__EPI_ISL_402128 spike protein mRNA gc mod (1-1273)(S477N_D614G)
aggagagggcgcuuggcuugcaaggacccugagcugcggcauugaagcacacccaacccaacucgacugaagucagccucacugaaccggaucugagaaucuucucucucugggcuugccagggcucuccgaaccuagcuagcauccucuucaauuccaacuagaaagcuuaccauguucguguuucuggugcugcugccccugguguccagccagugugugaaccugaccaccagaacacagcugccuccagccuacaccaacagcuucaccagaggcguguacuaccccgacaagguguucagauccagcgugcugcacucuacccaggaccuguuccugccuuucuucagcaacgugaccugguuccacgccauccacguguccggcaccaauggcaccaagagauucgacaaccccgugcugcccuucaacgacgggguguacuuugccagcaccgagaaguccaacaucaucagaggcuggaucuucggcaccacacuggacagcaagacccagagccugcugaucgugaacaacgccaccaacguggucaucaaagugugcgaguuccaguucugcaacgaccccuuccugggcgucuacuaccacaagaacaacaagagcuggauggaaagcgaguuccggguguacagcagcgccaacaacugcaccuucgaguacgugucccagccuuuccugauggaccuggaaggcaagcagggcaacuucaagaaccugcgcgaguucguguucaagaacaucgacggcuacuucaaaaucuacagcaagcacaccccuaucaaccucgugcgggaucugccucagggcuucucugcucuggaaccccugguggaucugcccaucggcaucaacaucacccgguuucagacacugcuggcccugcacagaagcuaccugacaccuggcgauagcagcagcggauggacagcuggugccgccgcuuacuaugugggcuaccugcagccuagaaccuuccugcugaaguacaacgagaacggcaccaucaccgacgccguggauugugcucuggauccucugagcgagacaaagugcacccugaaguccuucaccguggaaaagggcaucuaccagaccagcaacuuccgggugcagcccaccgaauccaucgugcgguuccccaauaucaccaaucugugccccuucggcgagguguucaaugccaccagauucgccucuguguacgccuggaaccggaagcggaucagcaauugcguggccgacuacuccgugcuguacaacuccgccagcuucagcaccuucaagugcuacggcguguccccuaccaagcugaacgaccugugcuucacaaacguguacgccgacagcuucgugauccggggagaugaagugcggcagauugccccuggacagacaggcaagaucgccgacuacaacuacaagcugcccgacgacuucaccggcugugugauugccuggaacagcaacaaccuggacuccaaagucggcggcaacuacaauuaccuguaccggcuguuccggaaguccaaucugaagcccuucgagcgggacaucagcaccgaaaucuaucaggccggcaacaccccuugcaacggcguggaaggcuucaacugcuacuucccacugcaguccuacggcuuucagcccacaaauggcgugggcuaucagcccuacagagugguggugcugagcuucgaacugcugcaugcuccugccacagugugcggcccuaagaaaagcaccaaucucgugaagaacaaaugcgugaacuucaacuucaacggccugaccggcaccggcgugcugacagagagcaacaagaaguuccugccauuccagcaguuuggccgggauaucgccgauaccacagacgccguuagagauccccagacacuggaaauccuggacaucaccccaugcagcuucggcggagugucugugaucaccccuggcaccaacaccagcaaucagguggcagugcuguaccagggcgugaacuguaccgaagugcccguggccauucacgccgaucagcugacaccuacauggcggguguacuccaccggcagcaauguguuucagaccagagccggcugucugaucggagccgagcacgugaacaauagcuacgagugcgacauccccaucggcgcuggcaucugugccagcuaccagacacagacaaacagccccagacgggcuagaagcguggccagccagagcaucauugccuacacaaugucucugggcgccgagaacagcguggccuacuccaacaacucuaucgcuauccccaccaacuucaccaucagcgugaccaccgagauccugccuguguccaugaccaagaccagcguggacugcaccauguacaucugcggcgauuccaccgagugcuccaaccugcugcugcaguacggcagcuucugcacccagcugaauagagcccugacagggaucgccguggaacaggacaagaacacccaagagguguucgcccaagugaagcaaaucuacaagaccccuccuaucaaggacuucggcggcuucaauuucagccagauucugcccgauccuagcaagcccagcaagcggagcuucaucgaggaccugcuguucaacaaagugacacuggccgacgccggcuucaucaagcaguauggcgauugucugggcgacauugccgccagggaucugauuugcgcccagaaguuuaacggacugacagugcugccuccucugcugaccgaugagaugaucgcccaguacacaucugcccugcuggccggcacaaucacaagcggcuggacauuuggagcuggcgccgcucugcagauccccuuugcuaugcagauggccuaccgguucaacggcaucggagugacccagaaugugcuguacgagaaccagaagcugaucgccaaccaguucaacagcgccaucggcaagauccaggacagccugagcagcacagcaagcgcccugggaaagcugcaggacguggucaaccagaaugcccaggcacugaacacccuggucaagcagcuguccuccaacuucggcgccaucagcucugugcugaacgauauccugagcagacuggacaaggucgaggccgaggugcagaucgacagacugaucacaggcagacugcagagccuccagacauacgugacccagcagcugaucagagccgccgagauuagagccucugccaaucuggccgccaccaagaugucugagugugugcugggccagagcaagagaguggacuuuugcggcaagggcuaccaccugaugagcuucccucagucugccccucacggcgugguguuucugcacgugacauaugugcccgcucaagagaagaauuucaccaccgcuccagccaucugccacgacggcaaagcccacuuuccuagagaaggcguguucguguccaacggcacccauugguucgugacacagcggaacuucuacgagccccagaucaucaccaccgacaacaccuucgugucuggcaacugcgacguugugaucggcauugugaacaauaccguguacgacccucugcagcccgagcuggacagcuucaaagaggaacuggacaaguacuuuaagaaccacacaagccccgacguggaccugggcgauaucagcggaaucaaugccagcgucgugaacauccagaaagagaucgaccggcugaacgagguggccaagaaucugaacgagagccugaucgaccugcaagaacuggggaaguacgagcaguacaucaaguggcccugguacaucuggcugggcuuuaucgccggacugauugccaucgugauggucacaaucaugcuguguugcaugaccagcugcuguagcugccugaagggcuguuguagcuguggcagcugcugcaaguucgacgaggacgauucugagcccgugcugaagggcgugaaacugcacuacaccugaggacuagucccuguucccagagcccacuuuuuuuucuuuuuuugaaauaaaauagccugucuuucagaucuaaaaaaaaaaaaaaaaaaaaaaaaaaaaaaaaaaaaaaaaaaaaaaaaaaaaaaaaaaaaaaaaaaaaaaaaaaaaaaaaaaaaaaaaaaaaaaaaaaaa

SEQ ID NO: 25026 - RNA, 4167 nt, Artificial Sequence
  SARS-CoV-2/Wuhan/WIV05/2019__EPI_ISL_402128 spike protein mRNA gc mod (1-1273)(N501Y_D614G)
aggagagggcgcuuggcuugcaaggacccugagcugcggcauugaagcacacccaacccaacucgacugaagucagccucacugaaccggaucugagaaucuucucucucugggcuugccagggcucuccgaaccuagcuagcauccucuucaauuccaacuagaaagcuuaccauguucguguuucuggugcugcugccccugguguccagccagugugugaaccugaccaccagaacacagcugccuccagccuacaccaacagcuucaccagaggcguguacuaccccgacaagguguucagauccagcgugcugcacucuacccaggaccuguuccugccuuucuucagcaacgugaccugguuccacgccauccacguguccggcaccaauggcaccaagagauucgacaaccccgugcugcccuucaacgacgggguguacuuugccagcaccgagaaguccaacaucaucagaggcuggaucuucggcaccacacuggacagcaagacccagagccugcugaucgugaacaacgccaccaacguggucaucaaagugugcgaguuccaguucugcaacgaccccuuccugggcgucuacuaccacaagaacaacaagagcuggauggaaagcgaguuccggguguacagcagcgccaacaacugcaccuucgaguacgugucccagccuuuccugauggaccuggaaggcaagcagggcaacuucaagaaccugcgcgaguucguguucaagaacaucgacggcuacuucaaaaucuacagcaagcacaccccuaucaaccucgugcgggaucugccucagggcuucucugcucuggaaccccugguggaucugcccaucggcaucaacaucacccgguuucagacacugcuggcccugcacagaagcuaccugacaccuggcgauagcagcagcggauggacagcuggugccgccgcuuacuaugugggcuaccugcagccuagaaccuuccugcugaaguacaacgagaacggcaccaucaccgacgccguggauugugcucuggauccucugagcgagacaaagugcacccugaaguccuucaccguggaaaagggcaucuaccagaccagcaacuuccgggugcagcccaccgaauccaucgugcgguuccccaauaucaccaaucugugccccuucggcgagguguucaaugccaccagauucgccucuguguacgccuggaaccggaagcggaucagcaauugcguggccgacuacuccgugcuguacaacuccgccagcuucagcaccuucaagugcuacggcguguccccuaccaagcugaacgaccugugcuucacaaacguguacgccgacagcuucgugauccggggagaugaagugcggcagauugccccuggacagacaggcaagaucgccgacuacaacuacaagcugcccgacgacuucaccggcugugugauugccuggaacagcaacaaccuggacuccaaagucggcggcaacuacaauuaccuguaccggcuguuccggaaguccaaucugaagcccuucgagcgggacaucagcaccgaaaucuaucaggccggcagcaccccuugcaacggcguggaaggcuucaacugcuacuucccacugcaguccuacggcuuucagcccacauacggcgugggcuaucagcccuacagagugguggugcugagcuucgaacugcugcaugcuccugccacagugugcggcccuaagaaaagcaccaaucucgugaagaacaaaugcgugaacuucaacuucaacggccugaccggcaccggcgugcugacagagagcaacaagaaguuccugccauuccagcaguuuggccgggauaucgccgauaccacagacgccguuagagauccccagacacuggaaauccuggacaucaccccaugcagcuucggcggagugucugugaucaccccuggcaccaacaccagcaaucagguggcagugcuguaccagggcgugaacuguaccgaagugcccguggccauucacgccgaucagcugacaccuacauggcggguguacuccaccggcagcaauguguuucagaccagagccggcugucugaucggagccgagcacgugaacaauagcuacgagugcgacauccccaucggcgcuggcaucugugccagcuaccagacacagacaaacagccccagacgggcuagaagcguggccagccagagcaucauugccuacacaaugucucugggcgccgagaacagcguggccuacuccaacaacucuaucgcuauccccaccaacuucaccaucagcgugaccaccgagauccugccuguguccaugaccaagaccagcguggacugcaccauguacaucugcggcgauuccaccgagugcuccaaccugcugcugcaguacggcagcuucugcacccagcugaauagagcccugacagggaucgccguggaacaggacaagaacacccaagagguguucgcccaagugaagcaaaucuacaagaccccuccuaucaaggacuucggcggcuucaauuucagccagauucugcccgauccuagcaagcccagcaagcggagcuucaucgaggaccugcuguucaacaaagugacacuggccgacgccggcuucaucaagcaguauggcgauugucugggcgacauugccgccagggaucugauuugcgcccagaaguuuaacggacugacagugcugccuccucugcugaccgaugagaugaucgcccaguacacaucugcccugcuggccggcacaaucacaagcggcuggacauuuggagcuggcgccgcucugcagauccccuuugcuaugcagauggccuaccgguucaacggcaucggagugacccagaaugugcuguacgagaaccagaagcugaucgccaaccaguucaacagcgccaucggcaagauccaggacagccugagcagcacagcaagcgcccugggaaagcugcaggacguggucaaccagaaugcccaggcacugaacacccuggucaagcagcuguccuccaacuucggcgccaucagcucugugcugaacgauauccugagcagacuggacaaggucgaggccgaggugcagaucgacagacugaucacaggcagacugcagagccuccagacauacgugacccagcagcugaucagagccgccgagauuagagccucugccaaucuggccgccaccaagaugucugagugugugcugggccagagcaagagaguggacuuuugcggcaagggcuaccaccugaugagcuucccucagucugccccucacggcgugguguuucugcacgugacauaugugcccgcucaagagaagaauuucaccaccgcuccagccaucugccacgacggcaaagcccacuuuccuagagaaggcguguucguguccaacggcacccauugguucgugacacagcggaacuucuacgagccccagaucaucaccaccgacaacaccuucgugucuggcaacugcgacguugugaucggcauugugaacaauaccguguacgacccucugcagcccgagcuggacagcuucaaagaggaacuggacaaguacuuuaagaaccacacaagccccgacguggaccugggcgauaucagcggaaucaaugccagcgucgugaacauccagaaagagaucgaccggcugaacgagguggccaagaaucugaacgagagccugaucgaccugcaagaacuggggaaguacgagcaguacaucaaguggcccugguacaucuggcugggcuuuaucgccggacugauugccaucgugauggucacaaucaugcuguguugcaugaccagcugcuguagcugccugaagggcuguuguagcuguggcagcugcugcaaguucgacgaggacgauucugagcccgugcugaagggcgugaaacugcacuacaccugaggacuagucccuguucccagagcccacuuuuuuuucuuuuuuugaaauaaaauagccugucuuucagaucuaaaaaaaaaaaaaaaaaaaaaaaaaaaaaaaaaaaaaaaaaaaaaaaaaaaaaaaaaaaaaaaaaaaaaaaaaaaaaaaaaaaaaaaaaaaaaaaaaaaa

SEQ ID NO: 25027 - RNA, 4161 nt, Artificial Sequence
  SARS-CoV-2/Wuhan/WIV05/2019__EPI_ISL_402128 spike protein mRNA gc mod (1-1273)(H69del_V70del_D614G)
aggagagggcgcuuggcuugcaaggacccugagcugcggcauugaagcacacccaacccaacucgacugaagucagccucacugaaccggaucugagaaucuucucucucugggcuugccagggcucuccgaaccuagcuagcauccucuucaauuccaacuagaaagcuuaccauguucguguuucuggugcugcugccccugguguccagccagugugugaaccugaccaccagaacacagcugccuccagccuacaccaacagcuucaccagaggcguguacuaccccgacaagguguucagauccagcgugcugcacucuacccaggaccuguuccugccuuucuucagcaacgugaccugguuccacgccaucuccggcaccaauggcaccaagagauucgacaaccccgugcugcccuucaacgacgggguguacuuugccagcaccgagaaguccaacaucaucagaggcuggaucuucggcaccacacuggacagcaagacccagagccugcugaucgugaacaacgccaccaacguggucaucaaagugugcgaguuccaguucugcaacgaccccuuccugggcgucuacuaccacaagaacaacaagagcuggauggaaagcgaguuccggguguacagcagcgccaacaacugcaccuucgaguacgugucccagccuuuccugauggaccuggaaggcaagcagggcaacuucaagaaccugcgcgaguucguguucaagaacaucgacggcuacuucaaaaucuacagcaagcacaccccuaucaaccucgugcgggaucugccucagggcuucucugcucuggaaccccugguggaucugcccaucggcaucaacaucacccgguuucagacacugcuggcccugcacagaagcuaccugacaccuggcgauagcagcagcggauggacagcuggugccgccgcuuacuaugugggcuaccugcagccuagaaccuuccugcugaaguacaacgagaacggcaccaucaccgacgccguggauugugcucuggauccucugagcgagacaaagugcacccugaaguccuucaccguggaaaagggcaucuaccagaccagcaacuuccgggugcagcccaccgaauccaucgugcgguuccccaauaucaccaaucugugccccuucggcgagguguucaaugccaccagauucgccucuguguacgccuggaaccggaagcggaucagcaauugcguggccgacuacuccgugcuguacaacuccgccagcuucagcaccuucaagugcuacggcguguccccuaccaagcugaacgaccugugcuucacaaacguguacgccgacagcuucgugauccggggagaugaagugcggcagauugccccuggacagacaggcaagaucgccgacuacaacuacaagcugcccgacgacuucaccggcugugugauugccuggaacagcaacaaccuggacuccaaagucggcggcaacuacaauuaccuguaccggcuguuccggaaguccaaucugaagcccuucgagcgggacaucagcaccgaaaucuaucaggccggcagcaccccuugcaacggcguggaaggcuucaacugcuacuucccacugcaguccuacggcuuucagcccacaaauggcgugggcuaucagcccuacagagugguggugcugagcuucgaacugcugcaugcuccugccacagugugcggcccuaagaaaagcaccaaucucgugaagaacaaaugcgugaacuucaacuucaacggccugaccggcaccggcgugcugacagagagcaacaagaaguuccugccauuccagcaguuuggccgggauaucgccgauaccacagacgccguuagagauccccagacacuggaaauccuggacaucaccccaugcagcuucggcggagugucugugaucaccccuggcaccaacaccagcaaucagguggcagugcuguaccagggcgugaacuguaccgaagugcccguggccauucacgccgaucagcugacaccuacauggcggguguacuccaccggcagcaauguguuucagaccagagccggcugucugaucggagccgagcacgugaacaauagcuacgagugcgacauccccaucggcgcuggcaucugugccagcuaccagacacagacaaacagccccagacgggcuagaagcguggccagccagagcaucauugccuacacaaugucucugggcgccgagaacagcguggccuacuccaacaacucuaucgcuauccccaccaacuucaccaucagcgugaccaccgagauccugccuguguccaugaccaagaccagcguggacugcaccauguacaucugcggcgauuccaccgagugcuccaaccugcugcugcaguacggcagcuucugcacccagcugaauagagcccugacagggaucgccguggaacaggacaagaacacccaagagguguucgcccaagugaagcaaaucuacaagaccccuccuaucaaggacuucggcggcuucaauuucagccagauucugcccgauccuagcaagcccagcaagcggagcuucaucgaggaccugcuguucaacaaagugacacuggccgacgccggcuucaucaagcaguauggcgauugucugggcgacauugccgccagggaucugauuugcgcccagaaguuuaacggacugacagugcugccuccucugcugaccgaugagaugaucgcccaguacacaucugcccugcuggccggcacaaucacaagcggcuggacauuuggagcuggcgccgcucugcagauccccuuugcuaugcagauggccuaccgguucaacggcaucggagugacccagaaugugcuguacgagaaccagaagcugaucgccaaccaguucaacagcgccaucggcaagauccaggacagccugagcagcacagcaagcgcccugggaaagcugcaggacguggucaaccagaaugcccaggcacugaacacccuggucaagcagcuguccuccaacuucggcgccaucagcucugugcugaacgauauccugagcagacuggacaaggucgaggccgaggugcagaucgacagacugaucacaggcagacugcagagccuccagacauacgugacccagcagcugaucagagccgccgagauuagagccucugccaaucuggccgccaccaagaugucugagugugugcugggccagagcaagagaguggacuuuugcggcaagggcuaccaccugaugagcuucccucagucugccccucacggcgugguguuucugcacgugacauaugugcccgcucaagagaagaauuucaccaccgcuccagccaucugccacgacggcaaagcccacuuuccuagagaaggcguguucguguccaacggcacccauugguucgugacacagcggaacuucuacgagccccagaucaucaccaccgacaacaccuucgugucuggcaacugcgacguugugaucggcauugugaacaauaccguguacgacccucugcagcccgagcuggacagcuucaaagaggaacuggacaaguacuuuaagaaccacacaagccccgacguggaccugggcgauaucagcggaaucaaugccagcgucgugaacauccagaaagagaucgaccggcugaacgagguggccaagaaucugaacgagagccugaucgaccugcaagaacuggggaaguacgagcaguacaucaaguggcccugguacaucuggcugggcuuuaucgccggacugauugccaucgugauggucacaaucaugcuguguugcaugaccagcugcuguagcugccugaagggcuguuguagcuguggcagcugcugcaaguucgacgaggacgauucugagcccgugcugaagggcgugaaacugcacuacaccugaggacuagucccuguucccagagcccacuuuuuuuucuuuuuuugaaauaaaauagccugucuuucagaucuaaaaaaaaaaaaaaaaaaaaaaaaaaaaaaaaaaaaaaaaaaaaaaaaaaaaaaaaaaaaaaaaaaaaaaaaaaaaaaaaaaaaaaaaaaaaaaaaaaaa

SEQ ID NO: 25028 - RNA, 4167 nt, Artificial Sequence
  SARS-CoV-2/Wuhan/WIV05/2019__EPI_ISL_402128 spike protein mRNA gc mod (1-1273)(Y453F_D614G)
aggagagggcgcuuggcuugcaaggacccugagcugcggcauugaagcacacccaacccaacucgacugaagucagccucacugaaccggaucugagaaucuucucucucugggcuugccagggcucuccgaaccuagcuagcauccucuucaauuccaacuagaaagcuuaccauguucguguuucuggugcugcugccccugguguccagccagugugugaaccugaccaccagaacacagcugccuccagccuacaccaacagcuucaccagaggcguguacuaccccgacaagguguucagauccagcgugcugcacucuacccaggaccuguuccugccuuucuucagcaacgugaccugguuccacgccauccacguguccggcaccaauggcaccaagagauucgacaaccccgugcugcccuucaacgacgggguguacuuugccagcaccgagaaguccaacaucaucagaggcuggaucuucggcaccacacuggacagcaagacccagagccugcugaucgugaacaacgccaccaacguggucaucaaagugugcgaguuccaguucugcaacgaccccuuccugggcgucuacuaccacaagaacaacaagagcuggauggaaagcgaguuccggguguacagcagcgccaacaacugcaccuucgaguacgugucccagccuuuccugauggaccuggaaggcaagcagggcaacuucaagaaccugcgcgaguucguguucaagaacaucgacggcuacuucaaaaucuacagcaagcacaccccuaucaaccucgugcgggaucugccucagggcuucucugcucuggaaccccugguggaucugcccaucggcaucaacaucacccgguuucagacacugcuggcccugcacagaagcuaccugacaccuggcgauagcagcagcggauggacagcuggugccgccgcuuacuaugugggcuaccugcagccuagaaccuuccugcugaaguacaacgagaacggcaccaucaccgacgccguggauugugcucuggauccucugagcgagacaaagugcacccugaaguccuucaccguggaaaagggcaucuaccagaccagcaacuuccgggugcagcccaccgaauccaucgugcgguuccccaauaucaccaaucugugccccuucggcgagguguucaaugccaccagauucgccucuguguacgccuggaaccggaagcggaucagcaauugcguggccgacuacuccgugcuguacaacuccgccagcuucagcaccuucaagugcuacggcguguccccuaccaagcugaacgaccugugcuucacaaacguguacgccgacagcuucgugauccggggagaugaagugcggcagauugccccuggacagacaggcaagaucgccgacuacaacuacaagcugcccgacgacuucaccggcugugugauugccuggaacagcaacaaccuggacuccaaagucggcggcaacuacaauuaccuguuccggcuguuccggaaguccaaucugaagcccuucgagcgggacaucagcaccgaaaucuaucaggccggcagcaccccuugcaacggcguggaaggcuucaacugcuacuucccacugcaguccuacggcuuucagcccacaaauggcgugggcuaucagcccuacagagugguggugcugagcuucgaacugcugcaugcuccugccacagugugcggcccuaagaaaagcaccaaucucgugaagaacaaaugcgugaacuucaacuucaacggccugaccggcaccggcgugcugacagagagcaacaagaaguuccugccauuccagcaguuuggccgggauaucgccgauaccacagacgccguuagagauccccagacacuggaaauccuggacaucaccccaugcagcuucggcggagugucugugaucaccccuggcaccaacaccagcaaucagguggcagugcuguaccagggcgugaacuguaccgaagugcccguggccauucacgccgaucagcugacaccuacauggcggguguacuccaccggcagcaauguguuucagaccagagccggcugucugaucggagccgagcacgugaacaauagcuacgagugcgacauccccaucggcgcuggcaucugugccagcuaccagacacagacaaacagccccagacgggcuagaagcguggccagccagagcaucauugccuacacaaugucucugggcgccgagaacagcguggccuacuccaacaacucuaucgcuauccccaccaacuucaccaucagcgugaccaccgagauccugccuguguccaugaccaagaccagcguggacugcaccauguacaucugcggcgauuccaccgagugcuccaaccugcugcugcaguacggcagcuucugcacccagcugaauagagcccugacagggaucgccguggaacaggacaagaacacccaagagguguucgcccaagugaagcaaaucuacaagaccccuccuaucaaggacuucggcggcuucaauuucagccagauucugcccgauccuagcaagcccagcaagcggagcuucaucgaggaccugcuguucaacaaagugacacuggccgacgccggcuucaucaagcaguauggcgauugucugggcgacauugccgccagggaucugauuugcgcccagaaguuuaacggacugacagugcugccuccucugcugaccgaugagaugaucgcccaguacacaucugcccugcuggccggcacaaucacaagcggcuggacauuuggagcuggcgccgcucugcagauccccuuugcuaugcagauggccuaccgguucaacggcaucggagugacccagaaugugcuguacgagaaccagaagcugaucgccaaccaguucaacagcgccaucggcaagauccaggacagccugagcagcacagcaagcgcccugggaaagcugcaggacguggucaaccagaaugcccaggcacugaacacccuggucaagcagcuguccuccaacuucggcgccaucagcucugugcugaacgauauccugagcagacuggacaaggucgaggccgaggugcagaucgacagacugaucacaggcagacugcagagccuccagacauacgugacccagcagcugaucagagccgccgagauuagagccucugccaaucuggccgccaccaagaugucugagugugugcugggccagagcaagagaguggacuuuugcggcaagggcuaccaccugaugagcuucccucagucugccccucacggcgugguguuucugcacgugacauaugugcccgcucaagagaagaauuucaccaccgcuccagccaucugccacgacggcaaagcccacuuuccuagagaaggcguguucguguccaacggcacccauugguucgugacacagcggaacuucuacgagccccagaucaucaccaccgacaacaccuucgugucuggcaacugcgacguugugaucggcauugugaacaauaccguguacgacccucugcagcccgagcuggacagcuucaaagaggaacuggacaaguacuuuaagaaccacacaagccccgacguggaccugggcgauaucagcggaaucaaugccagcgucgugaacauccagaaagagaucgaccggcugaacgagguggccaagaaucugaacgagagccugaucgaccugcaagaacuggggaaguacgagcaguacaucaaguggcccugguacaucuggcugggcuuuaucgccggacugauugccaucgugauggucacaaucaugcuguguugcaugaccagcugcuguagcugccugaagggcuguuguagcuguggcagcugcugcaaguucgacgaggacgauucugagcccgugcugaagggcgugaaacugcacuacaccugaggacuagucccuguucccagagcccacuuuuuuuucuuuuuuugaaauaaaauagccugucuuucagaucuaaaaaaaaaaaaaaaaaaaaaaaaaaaaaaaaaaaaaaaaaaaaaaaaaaaaaaaaaaaaaaaaaaaaaaaaaaaaaaaaaaaaaaaaaaaaaaaaaaaa

SEQ ID NO: 25029 - RNA, 4167 nt, Artificial Sequence
  SARS-CoV-2/Wuhan/WIV05/2019__EPI_ISL_402128 spike protein mRNA gc mod (1-1273)(D614G_I692V)
aggagagggcgcuuggcuugcaaggacccugagcugcggcauugaagcacacccaacccaacucgacugaagucagccucacugaaccggaucugagaaucuucucucucugggcuugccagggcucuccgaaccuagcuagcauccucuucaauuccaacuagaaagcuuaccauguucguguuucuggugcugcugccccugguguccagccagugugugaaccugaccaccagaacacagcugccuccagccuacaccaacagcuucaccagaggcguguacuaccccgacaagguguucagauccagcgugcugcacucuacccaggaccuguuccugccuuucuucagcaacgugaccugguuccacgccauccacguguccggcaccaauggcaccaagagauucgacaaccccgugcugcccuucaacgacgggguguacuuugccagcaccgagaaguccaacaucaucagaggcuggaucuucggcaccacacuggacagcaagacccagagccugcugaucgugaacaacgccaccaacguggucaucaaagugugcgaguuccaguucugcaacgaccccuuccugggcgucuacuaccacaagaacaacaagagcuggauggaaagcgaguuccggguguacagcagcgccaacaacugcaccuucgaguacgugucccagccuuuccugauggaccuggaaggcaagcagggcaacuucaagaaccugcgcgaguucguguucaagaacaucgacggcuacuucaaaaucuacagcaagcacaccccuaucaaccucgugcgggaucugccucagggcuucucugcucuggaaccccugguggaucugcccaucggcaucaacaucacccgguuucagacacugcuggcccugcacagaagcuaccugacaccuggcgauagcagcagcggauggacagcuggugccgccgcuuacuaugugggcuaccugcagccuagaaccuuccugcugaaguacaacgagaacggcaccaucaccgacgccguggauugugcucuggauccucugagcgagacaaagugcacccugaaguccuucaccguggaaaagggcaucuaccagaccagcaacuuccgggugcagcccaccgaauccaucgugcgguuccccaauaucaccaaucugugccccuucggcgagguguucaaugccaccagauucgccucuguguacgccuggaaccggaagcggaucagcaauugcguggccgacuacuccgugcuguacaacuccgccagcuucagcaccuucaagugcuacggcguguccccuaccaagcugaacgaccugugcuucacaaacguguacgccgacagcuucgugauccggggagaugaagugcggcagauugccccuggacagacaggcaagaucgccgacuacaacuacaagcugcccgacgacuucaccggcugugugauugccuggaacagcaacaaccuggacuccaaagucggcggcaacuacaauuaccuguaccggcuguuccggaaguccaaucugaagcccuucgagcgggacaucagcaccgaaaucuaucaggccggcagcaccccuugcaacggcguggaaggcuucaacugcuacuucccacugcaguccuacggcuuucagcccacaaauggcgugggcuaucagcccuacagagugguggugcugagcuucgaacugcugcaugcuccugccacagugugcggcccuaagaaaagcaccaaucucgugaagaacaaaugcgugaacuucaacuucaacggccugaccggcaccggcgugcugacagagagcaacaagaaguuccugccauuccagcaguuuggccgggauaucgccgauaccacagacgccguuagagauccccagacacuggaaauccuggacaucaccccaugcagcuucggcggagugucugugaucaccccuggcaccaacaccagcaaucagguggcagugcuguaccagggcgugaacuguaccgaagugcccguggccauucacgccgaucagcugacaccuacauggcggguguacuccaccggcagcaauguguuucagaccagagccggcugucugaucggagccgagcacgugaacaauagcuacgagugcgacauccccaucggcgcuggcaucugugccagcuaccagacacagacaaacagccccagacgggcuagaagcguggccagccagagcgugauugccuacacaaugucucugggcgccgagaacagcguggccuacuccaacaacucuaucgcuauccccaccaacuucaccaucagcgugaccaccgagauccugccuguguccaugaccaagaccagcguggacugcaccauguacaucugcggcgauuccaccgagugcuccaaccugcugcugcaguacggcagcuucugcacccagcugaauagagcccugacagggaucgccguggaacaggacaagaacacccaagagguguucgcccaagugaagcaaaucuacaagaccccuccuaucaaggacuucggcggcuucaauuucagccagauucugcccgauccuagcaagcccagcaagcggagcuucaucgaggaccugcuguucaacaaagugacacuggccgacgccggcuucaucaagcaguauggcgauugucugggcgacauugccgccagggaucugauuugcgcccagaaguuuaacggacugacagugcugccuccucugcugaccgaugagaugaucgcccaguacacaucugcccugcuggccggcacaaucacaagcggcuggacauuuggagcuggcgccgcucugcagauccccuuugcuaugcagauggccuaccgguucaacggcaucggagugacccagaaugugcuguacgagaaccagaagcugaucgccaaccaguucaacagcgccaucggcaagauccaggacagccugagcagcacagcaagcgcccugggaaagcugcaggacguggucaaccagaaugcccaggcacugaacacccuggucaagcagcuguccuccaacuucggcgccaucagcucugugcugaacgauauccugagcagacuggacaaggucgaggccgaggugcagaucgacagacugaucacaggcagacugcagagccuccagacauacgugacccagcagcugaucagagccgccgagauuagagccucugccaaucuggccgccaccaagaugucugagugugugcugggccagagcaagagaguggacuuuugcggcaagggcuaccaccugaugagcuucccucagucugccccucacggcgugguguuucugcacgugacauaugugcccgcucaagagaagaauuucaccaccgcuccagccaucugccacgacggcaaagcccacuuuccuagagaaggcguguucguguccaacggcacccauugguucgugacacagcggaacuucuacgagccccagaucaucaccaccgacaacaccuucgugucuggcaacugcgacguugugaucggcauugugaacaauaccguguacgacccucugcagcccgagcuggacagcuucaaagaggaacuggacaaguacuuuaagaaccacacaagccccgacguggaccugggcgauaucagcggaaucaaugccagcgucgugaacauccagaaagagaucgaccggcugaacgagguggccaagaaucugaacgagagccugaucgaccugcaagaacuggggaaguacgagcaguacaucaaguggcccugguacaucuggcugggcuuuaucgccggacugauugccaucgugauggucacaaucaugcuguguugcaugaccagcugcuguagcugccugaagggcuguuguagcuguggcagcugcugcaaguucgacgaggacgauucugagcccgugcugaagggcgugaaacugcacuacaccugaggacuagucccuguucccagagcccacuuuuuuuucuuuuuuugaaauaaaauagccugucuuucagaucuaaaaaaaaaaaaaaaaaaaaaaaaaaaaaaaaaaaaaaaaaaaaaaaaaaaaaaaaaaaaaaaaaaaaaaaaaaaaaaaaaaaaaaaaaaaaaaaaaaaa

SEQ ID NO: 25030 - RNA, 4167 nt, Artificial Sequence
  SARS-CoV-2/Wuhan/WIV05/2019__EPI_ISL_402128 spike protein mRNA gc mod (1-1273)(D614G_M1229I)
aggagagggcgcuuggcuugcaaggacccugagcugcggcauugaagcacacccaacccaacucgacugaagucagccucacugaaccggaucugagaaucuucucucucugggcuugccagggcucuccgaaccuagcuagcauccucuucaauuccaacuagaaagcuuaccauguucguguuucuggugcugcugccccugguguccagccagugugugaaccugaccaccagaacacagcugccuccagccuacaccaacagcuucaccagaggcguguacuaccccgacaagguguucagauccagcgugcugcacucuacccaggaccuguuccugccuuucuucagcaacgugaccugguuccacgccauccacguguccggcaccaauggcaccaagagauucgacaaccccgugcugcccuucaacgacgggguguacuuugccagcaccgagaaguccaacaucaucagaggcuggaucuucggcaccacacuggacagcaagacccagagccugcugaucgugaacaacgccaccaacguggucaucaaagugugcgaguuccaguucugcaacgaccccuuccugggcgucuacuaccacaagaacaacaagagcuggauggaaagcgaguuccggguguacagcagcgccaacaacugcaccuucgaguacgugucccagccuuuccugauggaccuggaaggcaagcagggcaacuucaagaaccugcgcgaguucguguucaagaacaucgacggcuacuucaaaaucuacagcaagcacaccccuaucaaccucgugcgggaucugccucagggcuucucugcucuggaaccccugguggaucugcccaucggcaucaacaucacccgguuucagacacugcuggcccugcacagaagcuaccugacaccuggcgauagcagcagcggauggacagcuggugccgccgcuuacuaugugggcuaccugcagccuagaaccuuccugcugaaguacaacgagaacggcaccaucaccgacgccguggauugugcucuggauccucugagcgagacaaagugcacccugaaguccuucaccguggaaaagggcaucuaccagaccagcaacuuccgggugcagcccaccgaauccaucgugcgguuccccaauaucaccaaucugugccccuucggcgagguguucaaugccaccagauucgccucuguguacgccuggaaccggaagcggaucagcaauugcguggccgacuacuccgugcuguacaacuccgccagcuucagcaccuucaagugcuacggcguguccccuaccaagcugaacgaccugugcuucacaaacguguacgccgacagcuucgugauccggggagaugaagugcggcagauugccccuggacagacaggcaagaucgccgacuacaacuacaagcugcccgacgacuucaccggcugugugauugccuggaacagcaacaaccuggacuccaaagucggcggcaacuacaauuaccuguaccggcuguuccggaaguccaaucugaagcccuucgagcgggacaucagcaccgaaaucuaucaggccggcagcaccccuugcaacggcguggaaggcuucaacugcuacuucccacugcaguccuacggcuuucagcccacaaauggcgugggcuaucagcccuacagagugguggugcugagcuucgaacugcugcaugcuccugccacagugugcggcccuaagaaaagcaccaaucucgugaagaacaaaugcgugaacuucaacuucaacggccugaccggcaccggcgugcugacagagagcaacaagaaguuccugccauuccagcaguuuggccgggauaucgccgauaccacagacgccguuagagauccccagacacuggaaauccuggacaucaccccaugcagcuucggcggagugucugugaucaccccuggcaccaacaccagcaaucagguggcagugcuguaccagggcgugaacuguaccgaagugcccguggccauucacgccgaucagcugacaccuacauggcggguguacuccaccggcagcaauguguuucagaccagagccggcugucugaucggagccgagcacgugaacaauagcuacgagugcgacauccccaucggcgcuggcaucugugccagcuaccagacacagacaaacagccccagacgggcuagaagcguggccagccagagcaucauugccuacacaaugucucugggcgccgagaacagcguggccuacuccaacaacucuaucgcuauccccaccaacuucaccaucagcgugaccaccgagauccugccuguguccaugaccaagaccagcguggacugcaccauguacaucugcggcgauuccaccgagugcuccaaccugcugcugcaguacggcagcuucugcacccagcugaauagagcccugacagggaucgccguggaacaggacaagaacacccaagagguguucgcccaagugaagcaaaucuacaagaccccuccuaucaaggacuucggcggcuucaauuucagccagauucugcccgauccuagcaagcccagcaagcggagcuucaucgaggaccugcuguucaacaaagugacacuggccgacgccggcuucaucaagcaguauggcgauugucugggcgacauugccgccagggaucugauuugcgcccagaaguuuaacggacugacagugcugccuccucugcugaccgaugagaugaucgcccaguacacaucugcccugcuggccggcacaaucacaagcggcuggacauuuggagcuggcgccgcucugcagauccccuuugcuaugcagauggccuaccgguucaacggcaucggagugacccagaaugugcuguacgagaaccagaagcugaucgccaaccaguucaacagcgccaucggcaagauccaggacagccugagcagcacagcaagcgcccugggaaagcugcaggacguggucaaccagaaugcccaggcacugaacacccuggucaagcagcuguccuccaacuucggcgccaucagcucugugcugaacgauauccugagcagacuggacaaggucgaggccgaggugcagaucgacagacugaucacaggcagacugcagagccuccagacauacgugacccagcagcugaucagagccgccgagauuagagccucugccaaucuggccgccaccaagaugucugagugugugcugggccagagcaagagaguggacuuuugcggcaagggcuaccaccugaugagcuucccucagucugccccucacggcgugguguuucugcacgugacauaugugcccgcucaagagaagaauuucaccaccgcuccagccaucugccacgacggcaaagcccacuuuccuagagaaggcguguucguguccaacggcacccauugguucgugacacagcggaacuucuacgagccccagaucaucaccaccgacaacaccuucgugucuggcaacugcgacguugugaucggcauugugaacaauaccguguacgacccucugcagcccgagcuggacagcuucaaagaggaacuggacaaguacuuuaagaaccacacaagccccgacguggaccugggcgauaucagcggaaucaaugccagcgucgugaacauccagaaagagaucgaccggcugaacgagguggccaagaaucugaacgagagccugaucgaccugcaagaacuggggaaguacgagcaguacaucaaguggcccugguacaucuggcugggcuuuaucgccggacugauugccaucgugaucgucacaaucaugcuguguugcaugaccagcugcuguagcugccugaagggcuguuguagcuguggcagcugcugcaaguucgacgaggacgauucugagcccgugcugaagggcgugaaacugcacuacaccugaggacuagucccuguucccagagcccacuuuuuuuucuuuuuuugaaauaaaauagccugucuuucagaucuaaaaaaaaaaaaaaaaaaaaaaaaaaaaaaaaaaaaaaaaaaaaaaaaaaaaaaaaaaaaaaaaaaaaaaaaaaaaaaaaaaaaaaaaaaaaaaaaaaaa

SEQ ID NO: 25031 - RNA, 4161 nt, Artificial Sequence
  SARS-CoV-2/Wuhan/WIV05/2019__EPI_ISL_402128 spike protein mRNA gc mod (1-1273)(H69del_V70del_A222V_Y453F_S477N_D614G_I692V)
aggagagggcgcuuggcuugcaaggacccugagcugcggcauugaagcacacccaacccaacucgacugaagucagccucacugaaccggaucugagaaucuucucucucugggcuugccagggcucuccgaaccuagcuagcauccucuucaauuccaacuagaaagcuuaccauguucguguuucuggugcugcugccccugguguccagccagugugugaaccugaccaccagaacacagcugccuccagccuacaccaacagcuucaccagaggcguguacuaccccgacaagguguucagauccagcgugcugcacucuacccaggaccuguuccugccuuucuucagcaacgugaccugguuccacgccaucuccggcaccaauggcaccaagagauucgacaaccccgugcugcccuucaacgacgggguguacuuugccagcaccgagaaguccaacaucaucagaggcuggaucuucggcaccacacuggacagcaagacccagagccugcugaucgugaacaacgccaccaacguggucaucaaagugugcgaguuccaguucugcaacgaccccuuccugggcgucuacuaccacaagaacaacaagagcuggauggaaagcgaguuccggguguacagcagcgccaacaacugcaccuucgaguacgugucccagccuuuccugauggaccuggaaggcaagcagggcaacuucaagaaccugcgcgaguucguguucaagaacaucgacggcuacuucaaaaucuacagcaagcacaccccuaucaaccucgugcgggaucugccucagggcuucucugugcuggaaccccugguggaucugcccaucggcaucaacaucacccgguuucagacacugcuggcccugcacagaagcuaccugacaccuggcgauagcagcagcggauggacagcuggugccgccgcuuacuaugugggcuaccugcagccuagaaccuuccugcugaaguacaacgagaacggcaccaucaccgacgccguggauugugcucuggauccucugagcgagacaaagugcacccugaaguccuucaccguggaaaagggcaucuaccagaccagcaacuuccgggugcagcccaccgaauccaucgugcgguuccccaauaucaccaaucugugccccuucggcgagguguucaaugccaccagauucgccucuguguacgccuggaaccggaagcggaucagcaauugcguggccgacuacuccgugcuguacaacuccgccagcuucagcaccuucaagugcuacggcguguccccuaccaagcugaacgaccugugcuucacaaacguguacgccgacagcuucgugauccggggagaugaagugcggcagauugccccuggacagacaggcaagaucgccgacuacaacuacaagcugcccgacgacuucaccggcugugugauugccuggaacagcaacaaccuggacuccaaagucggcggcaacuacaauuaccuguuccggcuguuccggaaguccaaucugaagcccuucgagcgggacaucagcaccgaaaucuaucaggccggcaacaccccuugcaacggcguggaaggcuucaacugcuacuucccacugcaguccuacggcuuucagcccacaaauggcgugggcuaucagcccuacagagugguggugcugagcuucgaacugcugcaugcuccugccacagugugcggcccuaagaaaagcaccaaucucgugaagaacaaaugcgugaacuucaacuucaacggccugaccggcaccggcgugcugacagagagcaacaagaaguuccugccauuccagcaguuuggccgggauaucgccgauaccacagacgccguuagagauccccagacacuggaaauccuggacaucaccccaugcagcuucggcggagugucugugaucaccccuggcaccaacaccagcaaucagguggcagugcuguaccagggcgugaacuguaccgaagugcccguggccauucacgccgaucagcugacaccuacauggcggguguacuccaccggcagcaauguguuucagaccagagccggcugucugaucggagccgagcacgugaacaauagcuacgagugcgacauccccaucggcgcuggcaucugugccagcuaccagacacagacaaacagccccagacgggcuagaagcguggccagccagagcgugauugccuacacaaugucucugggcgccgagaacagcguggccuacuccaacaacucuaucgcuauccccaccaacuucaccaucagcgugaccaccgagauccugccuguguccaugaccaagaccagcguggacugcaccauguacaucugcggcgauuccaccgagugcuccaaccugcugcugcaguacggcagcuucugcacccagcugaauagagcccugacagggaucgccguggaacaggacaagaacacccaagagguguucgcccaagugaagcaaaucuacaagaccccuccuaucaaggacuucggcggcuucaauuucagccagauucugcccgauccuagcaagcccagcaagcggagcuucaucgaggaccugcuguucaacaaagugacacuggccgacgccggcuucaucaagcaguauggcgauugucugggcgacauugccgccagggaucugauuugcgcccagaaguuuaacggacugacagugcugccuccucugcugaccgaugagaugaucgcccaguacacaucugcccugcuggccggcacaaucacaagcggcuggacauuuggagcuggcgccgcucugcagauccccuuugcuaugcagauggccuaccgguucaacggcaucggagugacccagaaugugcuguacgagaaccagaagcugaucgccaaccaguucaacagcgccaucggcaagauccaggacagccugagcagcacagcaagcgcccugggaaagcugcaggacguggucaaccagaaugcccaggcacugaacacccuggucaagcagcuguccuccaacuucggcgccaucagcucugugcugaacgauauccugagcagacuggacaaggucgaggccgaggugcagaucgacagacugaucacaggcagacugcagagccuccagacauacgugacccagcagcugaucagagccgccgagauuagagccucugccaaucuggccgccaccaagaugucugagugugugcugggccagagcaagagaguggacuuuugcggcaagggcuaccaccugaugagcuucccucagucugccccucacggcgugguguuucugcacgugacauaugugcccgcucaagagaagaauuucaccaccgcuccagccaucugccacgacggcaaagcccacuuuccuagagaaggcguguucguguccaacggcacccauugguucgugacacagcggaacuucuacgagccccagaucaucaccaccgacaacaccuucgugucuggcaacugcgacguugugaucggcauugugaacaauaccguguacgacccucugcagcccgagcuggacagcuucaaagaggaacuggacaaguacuuuaagaaccacacaagccccgacguggaccugggcgauaucagcggaaucaaugccagcgucgugaacauccagaaagagaucgaccggcugaacgagguggccaagaaucugaacgagagccugaucgaccugcaagaacuggggaaguacgagcaguacaucaaguggcccugguacaucuggcugggcuuuaucgccggacugauugccaucgugauggucacaaucaugcuguguugcaugaccagcugcuguagcugccugaagggcuguuguagcuguggcagcugcugcaaguucgacgaggacgauucugagcccgugcugaagggcgugaaacugcacuacaccugaggacuagucccuguucccagagcccacuuuuuuuucuuuuuuugaaauaaaauagccugucuuucagaucuaaaaaaaaaaaaaaaaaaaaaaaaaaaaaaaaaaaaaaaaaaaaaaaaaaaaaaaaaaaaaaaaaaaaaaaaaaaaaaaaaaaaaaaaaaaaaaaaaaaa

SEQ ID NO: 25032 - RNA, 4161 nt, Artificial Sequence
  SARS-CoV-2/Wuhan/WIV05/2019__EPI_ISL_402128 spike protein mRNA gc mod (1-1273)(H69del_V70del_Y453F_D614G_I692V_M1229I)
aggagagggcgcuuggcuugcaaggacccugagcugcggcauugaagcacacccaacccaacucgacugaagucagccucacugaaccggaucugagaaucuucucucucugggcuugccagggcucuccgaaccuagcuagcauccucuucaauuccaacuagaaagcuuaccauguucguguuucuggugcugcugccccugguguccagccagugugugaaccugaccaccagaacacagcugccuccagccuacaccaacagcuucaccagaggcguguacuaccccgacaagguguucagauccagcgugcugcacucuacccaggaccuguuccugccuuucuucagcaacgugaccugguuccacgccaucuccggcaccaauggcaccaagagauucgacaaccccgugcugcccuucaacgacgggguguacuuugccagcaccgagaaguccaacaucaucagaggcuggaucuucggcaccacacuggacagcaagacccagagccugcugaucgugaacaacgccaccaacguggucaucaaagugugcgaguuccaguucugcaacgaccccuuccugggcgucuacuaccacaagaacaacaagagcuggauggaaagcgaguuccggguguacagcagcgccaacaacugcaccuucgaguacgugucccagccuuuccugauggaccuggaaggcaagcagggcaacuucaagaaccugcgcgaguucguguucaagaacaucgacggcuacuucaaaaucuacagcaagcacaccccuaucaaccucgugcgggaucugccucagggcuucucugcucuggaaccccugguggaucugcccaucggcaucaacaucacccgguuucagacacugcuggcccugcacagaagcuaccugacaccuggcgauagcagcagcggauggacagcuggugccgccgcuuacuaugugggcuaccugcagccuagaaccuuccugcugaaguacaacgagaacggcaccaucaccgacgccguggauugugcucuggauccucugagcgagacaaagugcacccugaaguccuucaccguggaaaagggcaucuaccagaccagcaacuuccgggugcagcccaccgaauccaucgugcgguuccccaauaucaccaaucugugccccuucggcgagguguucaaugccaccagauucgccucuguguacgccuggaaccggaagcggaucagcaauugcguggccgacuacuccgugcuguacaacuccgccagcuucagcaccuucaagugcuacggcguguccccuaccaagcugaacgaccugugcuucacaaacguguacgccgacagcuucgugauccggggagaugaagugcggcagauugccccuggacagacaggcaagaucgccgacuacaacuacaagcugcccgacgacuucaccggcugugugauugccuggaacagcaacaaccuggacuccaaagucggcggcaacuacaauuaccuguuccggcuguuccggaaguccaaucugaagcccuucgagcgggacaucagcaccgaaaucuaucaggccggcagcaccccuugcaacggcguggaaggcuucaacugcuacuucccacugcaguccuacggcuuucagcccacaaauggcgugggcuaucagcccuacagagugguggugcugagcuucgaacugcugcaugcuccugccacagugugcggcccuaagaaaagcaccaaucucgugaagaacaaaugcgugaacuucaacuucaacggccugaccggcaccggcgugcugacagagagcaacaagaaguuccugccauuccagcaguuuggccgggauaucgccgauaccacagacgccguuagagauccccagacacuggaaauccuggacaucaccccaugcagcuucggcggagugucugugaucaccccuggcaccaacaccagcaaucagguggcagugcuguaccagggcgugaacuguaccgaagugcccguggccauucacgccgaucagcugacaccuacauggcggguguacuccaccggcagcaauguguuucagaccagagccggcugucugaucggagccgagcacgugaacaauagcuacgagugcgacauccccaucggcgcuggcaucugugccagcuaccagacacagacaaacagccccagacgggcuagaagcguggccagccagagcgugauugccuacacaaugucucugggcgccgagaacagcguggccuacuccaacaacucuaucgcuauccccaccaacuucaccaucagcgugaccaccgagauccugccuguguccaugaccaagaccagcguggacugcaccauguacaucugcggcgauuccaccgagugcuccaaccugcugcugcaguacggcagcuucugcacccagcugaauagagcccugacagggaucgccguggaacaggacaagaacacccaagagguguucgcccaagugaagcaaaucuacaagaccccuccuaucaaggacuucggcggcuucaauuucagccagauucugcccgauccuagcaagcccagcaagcggagcuucaucgaggaccugcuguucaacaaagugacacuggccgacgccggcuucaucaagcaguauggcgauugucugggcgacauugccgccagggaucugauuugcgcccagaaguuuaacggacugacagugcugccuccucugcugaccgaugagaugaucgcccaguacacaucugcccugcuggccggcacaaucacaagcggcuggacauuuggagcuggcgccgcucugcagauccccuuugcuaugcagauggccuaccgguucaacggcaucggagugacccagaaugugcuguacgagaaccagaagcugaucgccaaccaguucaacagcgccaucggcaagauccaggacagccugagcagcacagcaagcgcccugggaaagcugcaggacguggucaaccagaaugcccaggcacugaacacccuggucaagcagcuguccuccaacuucggcgccaucagcucugugcugaacgauauccugagcagacuggacaaggucgaggccgaggugcagaucgacagacugaucacaggcagacugcagagccuccagacauacgugacccagcagcugaucagagccgccgagauuagagccucugccaaucuggccgccaccaagaugucugagugugugcugggccagagcaagagaguggacuuuugcggcaagggcuaccaccugaugagcuucccucagucugccccucacggcgugguguuucugcacgugacauaugugcccgcucaagagaagaauuucaccaccgcuccagccaucugccacgacggcaaagcccacuuuccuagagaaggcguguucguguccaacggcacccauugguucgugacacagcggaacuucuacgagccccagaucaucaccaccgacaacaccuucgugucuggcaacugcgacguugugaucggcauugugaacaauaccguguacgacccucugcagcccgagcuggacagcuucaaagaggaacuggacaaguacuuuaagaaccacacaagccccgacguggaccugggcgauaucagcggaaucaaugccagcgucgugaacauccagaaagagaucgaccggcugaacgagguggccaagaaucugaacgagagccugaucgaccugcaagaacuggggaaguacgagcaguacaucaaguggcccugguacaucuggcugggcuuuaucgccggacugauugccaucgugaucgucacaaucaugcuguguugcaugaccagcugcuguagcugccugaagggcuguuguagcuguggcagcugcugcaaguucgacgaggacgauucugagcccgugcugaagggcgugaaacugcacuacaccugaggacuagucccuguucccagagcccacuuuuuuuucuuuuuuugaaauaaaauagccugucuuucagaucuaaaaaaaaaaaaaaaaaaaaaaaaaaaaaaaaaaaaaaaaaaaaaaaaaaaaaaaaaaaaaaaaaaaaaaaaaaaaaaaaaaaaaaaaaaaaaaaaaaaa

SEQ ID NO: 25033 - RNA, 4158 nt, Artificial Sequence
  SARS-CoV-2/Wuhan/WIV05/2019__EPI_ISL_402128 spike protein mRNA gc mod (1-1273)(H69del_V70del_Y144del_N501Y_A570D_D614G_P681H_T716I_S982 A_D1118H)
aggagagggcgcuuggcuugcaaggacccugagcugcggcauugaagcacacccaacccaacucgacugaagucagccucacugaaccggaucugagaaucuucucucucugggcuugccagggcucuccgaaccuagcuagcauccucuucaauuccaacuagaaagcuuaccauguucguguuucuggugcugcugccccugguguccagccagugugugaaccugaccaccagaacacagcugccuccagccuacaccaacagcuucaccagaggcguguacuaccccgacaagguguucagauccagcgugcugcacucuacccaggaccuguuccugccuuucuucagcaacgugaccugguuccacgccaucuccggcaccaauggcaccaagagauucgacaaccccgugcugcccuucaacgacgggguguacuuugccagcaccgagaaguccaacaucaucagaggcuggaucuucggcaccacacuggacagcaagacccagagccugcugaucgugaacaacgccaccaacguggucaucaaagugugcgaguuccaguucugcaacgaccccuuccugggcgucuaccacaagaacaacaagagcuggauggaaagcgaguuccggguguacagcagcgccaacaacugcaccuucgaguacgugucccagccuuuccugauggaccuggaaggcaagcagggcaacuucaagaaccugcgcgaguucguguucaagaacaucgacggcuacuucaaaaucuacagcaagcacaccccuaucaaccucgugcgggaucugccucagggcuucucugcucuggaaccccugguggaucugcccaucggcaucaacaucacccgguuucagacacugcuggcccugcacagaagcuaccugacaccuggcgauagcagcagcggauggacagcuggugccgccgcuuacuaugugggcuaccugcagccuagaaccuuccugcugaaguacaacgagaacggcaccaucaccgacgccguggauugugcucuggauccucugagcgagacaaagugcacccugaaguccuucaccguggaaaagggcaucuaccagaccagcaacuuccgggugcagcccaccgaauccaucgugcgguuccccaauaucaccaaucugugccccuucggcgagguguucaaugccaccagauucgccucuguguacgccuggaaccggaagcggaucagcaauugcguggccgacuacuccgugcuguacaacuccgccagcuucagcaccuucaagugcuacggcguguccccuaccaagcugaacgaccugugcuucacaaacguguacgccgacagcuucgugauccggggagaugaagugcggcagauugccccuggacagacaggcaagaucgccgacuacaacuacaagcugcccgacgacuucaccggcugugugauugccuggaacagcaacaaccuggacuccaaagucggcggcaacuacaauuaccuguaccggcuguuccggaaguccaaucugaagcccuucgagcgggacaucagcaccgaaaucuaucaggccggcagcaccccuugcaacggcguggaaggcuucaacugcuacuucccacugcaguccuacggcuuucagcccacauacggcgugggcuaucagcccuacagagugguggugcugagcuucgaacugcugcaugcuccugccacagugugcggcccuaagaaaagcaccaaucucgugaagaacaaaugcgugaacuucaacuucaacggccugaccggcaccggcgugcugacagagagcaacaagaaguuccugccauuccagcaguuuggccgggauaucgacgauaccacagacgccguuagagauccccagacacuggaaauccuggacaucaccccaugcagcuucggcggagugucugugaucaccccuggcaccaacaccagcaaucagguggcagugcuguaccagggcgugaacuguaccgaagugcccguggccauucacgccgaucagcugacaccuacauggcggguguacuccaccggcagcaauguguuucagaccagagccggcugucugaucggagccgagcacgugaacaauagcuacgagugcgacauccccaucggcgcuggcaucugugccagcuaccagacacagacaaacagccacagacgggcuagaagcguggccagccagagcaucauugccuacacaaugucucugggcgccgagaacagcguggccuacuccaacaacucuaucgcuauccccaucaacuucaccaucagcgugaccaccgagauccugccuguguccaugaccaagaccagcguggacugcaccauguacaucugcggcgauuccaccgagugcuccaaccugcugcugcaguacggcagcuucugcacccagcugaauagagcccugacagggaucgccguggaacaggacaagaacacccaagagguguucgcccaagugaagcaaaucuacaagaccccuccuaucaaggacuucggcggcuucaauuucagccagauucugcccgauccuagcaagcccagcaagcggagcuucaucgaggaccugcuguucaacaaagugacacuggccgacgccggcuucaucaagcaguauggcgauugucugggcgacauugccgccagggaucugauuugcgcccagaaguuuaacggacugacagugcugccuccucugcugaccgaugagaugaucgcccaguacacaucugcccugcuggccggcacaaucacaagcggcuggacauuuggagcuggcgccgcucugcagauccccuuugcuaugcagauggccuaccgguucaacggcaucggagugacccagaaugugcuguacgagaaccagaagcugaucgccaaccaguucaacagcgccaucggcaagauccaggacagccugagcagcacagcaagcgcccugggaaagcugcaggacguggucaaccagaaugcccaggcacugaacacccuggucaagcagcuguccuccaacuucggcgccaucagcucugugcugaacgauauccuggccagacuggacaaggucgaggccgaggugcagaucgacagacugaucacaggcagacugcagagccuccagacauacgugacccagcagcugaucagagccgccgagauuagagccucugccaaucuggccgccaccaagaugucugagugugugcugggccagagcaagagaguggacuuuugcggcaagggcuaccaccugaugagcuucccucagucugccccucacggcgugguguuucugcacgugacauaugugcccgcucaagagaagaauuucaccaccgcuccagccaucugccacgacggcaaagcccacuuuccuagagaaggcguguucguguccaacggcacccauugguucgugacacagcggaacuucuacgagccccagaucaucaccacccacaacaccuucgugucuggcaacugcgacguugugaucggcauugugaacaauaccguguacgacccucugcagcccgagcuggacagcuucaaagaggaacuggacaaguacuuuaagaaccacacaagccccgacguggaccugggcgauaucagcggaaucaaugccagcgucgugaacauccagaaagagaucgaccggcugaacgagguggccaagaaucugaacgagagccugaucgaccugcaagaacuggggaaguacgagcaguacaucaaguggcccugguacaucuggcugggcuuuaucgccggacugauugccaucgugauggucacaaucaugcuguguugcaugaccagcugcuguagcugccugaagggcuguuguagcuguggcagcugcugcaaguucgacgaggacgauucugagcccgugcugaagggcgugaaacugcacuacaccugaggacuagucccuguucccagagcccacuuuuuuuucuuuuuuugaaauaaaauagccugucuuucagaucuaaaaaaaaaaaaaaaaaaaaaaaaaaaaaaaaaaaaaaaaaaaaaaaaaaaaaaaaaaaaaaaaaaaaaaaaaaaaaaaaaaaaaaaaaaaaaaaaaaaa

SEQ ID NO: 25034 - RNA, 4167 nt, Artificial Sequence
  SARS-CoV-2/Wuhan/WIV05/2019__EPI_ISL_402128 spike protein mRNA gc mod (1-1273)(K417N_E484K_N501Y_D614G)
aggagagggcgcuuggcuugcaaggacccugagcugcggcauugaagcacacccaacccaacucgacugaagucagccucacugaaccggaucugagaaucuucucucucugggcuugccagggcucuccgaaccuagcuagcauccucuucaauuccaacuagaaagcuuaccauguucguguuucuggugcugcugccccugguguccagccagugugugaaccugaccaccagaacacagcugccuccagccuacaccaacagcuucaccagaggcguguacuaccccgacaagguguucagauccagcgugcugcacucuacccaggaccuguuccugccuuucuucagcaacgugaccugguuccacgccauccacguguccggcaccaauggcaccaagagauucgacaaccccgugcugcccuucaacgacgggguguacuuugccagcaccgagaaguccaacaucaucagaggcuggaucuucggcaccacacuggacagcaagacccagagccugcugaucgugaacaacgccaccaacguggucaucaaagugugcgaguuccaguucugcaacgaccccuuccugggcgucuacuaccacaagaacaacaagagcuggauggaaagcgaguuccggguguacagcagcgccaacaacugcaccuucgaguacgugucccagccuuuccugauggaccuggaaggcaagcagggcaacuucaagaaccugcgcgaguucguguucaagaacaucgacggcuacuucaaaaucuacagcaagcacaccccuaucaaccucgugcgggaucugccucagggcuucucugcucuggaaccccugguggaucugcccaucggcaucaacaucacccgguuucagacacugcuggcccugcacagaagcuaccugacaccuggcgauagcagcagcggauggacagcuggugccgccgcuuacuaugugggcuaccugcagccuagaaccuuccugcugaaguacaacgagaacggcaccaucaccgacgccguggauugugcucuggauccucugagcgagacaaagugcacccugaaguccuucaccguggaaaagggcaucuaccagaccagcaacuuccgggugcagcccaccgaauccaucgugcgguuccccaauaucaccaaucugugccccuucggcgagguguucaaugccaccagauucgccucuguguacgccuggaaccggaagcggaucagcaauugcguggccgacuacuccgugcuguacaacuccgccagcuucagcaccuucaagugcuacggcguguccccuaccaagcugaacgaccugugcuucacaaacguguacgccgacagcuucgugauccggggagaugaagugcggcagauugccccuggacagacaggcaacaucgccgacuacaacuacaagcugcccgacgacuucaccggcugugugauugccuggaacagcaacaaccuggacuccaaagucggcggcaacuacaauuaccuguaccggcuguuccggaaguccaaucugaagcccuucgagcgggacaucagcaccgaaaucuaucaggccggcagcaccccuugcaacggcgugaagggcuucaacugcuacuucccacugcaguccuacggcuuucagcccacauacggcgugggcuaucagcccuacagagugguggugcugagcuucgaacugcugcaugcuccugccacagugugcggcccuaagaaaagcaccaaucucgugaagaacaaaugcgugaacuucaacuucaacggccugaccggcaccggcgugcugacagagagcaacaagaaguuccugccauuccagcaguuuggccgggauaucgccgauaccacagacgccguuagagauccccagacacuggaaauccuggacaucaccccaugcagcuucggcggagugucugugaucaccccuggcaccaacaccagcaaucagguggcagugcuguaccagggcgugaacuguaccgaagugcccguggccauucacgccgaucagcugacaccuacauggcggguguacuccaccggcagcaauguguuucagaccagagccggcugucugaucggagccgagcacgugaacaauagcuacgagugcgacauccccaucggcgcuggcaucugugccagcuaccagacacagacaaacagccccagacgggcuagaagcguggccagccagagcaucauugccuacacaaugucucugggcgccgagaacagcguggccuacuccaacaacucuaucgcuauccccaccaacuucaccaucagcgugaccaccgagauccugccuguguccaugaccaagaccagcguggacugcaccauguacaucugcggcgauuccaccgagugcuccaaccugcugcugcaguacggcagcuucugcacccagcugaauagagcccugacagggaucgccguggaacaggacaagaacacccaagagguguucgcccaagugaagcaaaucuacaagaccccuccuaucaaggacuucggcggcuucaauuucagccagauucugcccgauccuagcaagcccagcaagcggagcuucaucgaggaccugcuguucaacaaagugacacuggccgacgccggcuucaucaagcaguauggcgauugucugggcgacauugccgccagggaucugauuugcgcccagaaguuuaacggacugacagugcugccuccucugcugaccgaugagaugaucgcccaguacacaucugcccugcuggccggcacaaucacaagcggcuggacauuuggagcuggcgccgcucugcagauccccuuugcuaugcagauggccuaccgguucaacggcaucggagugacccagaaugugcuguacgagaaccagaagcugaucgccaaccaguucaacagcgccaucggcaagauccaggacagccugagcagcacagcaagcgcccugggaaagcugcaggacguggucaaccagaaugcccaggcacugaacacccuggucaagcagcuguccuccaacuucggcgccaucagcucugugcugaacgauauccugagcagacuggacaaggucgaggccgaggugcagaucgacagacugaucacaggcagacugcagagccuccagacauacgugacccagcagcugaucagagccgccgagauuagagccucugccaaucuggccgccaccaagaugucugagugugugcugggccagagcaagagaguggacuuuugcggcaagggcuaccaccugaugagcuucccucagucugccccucacggcgugguguuucugcacgugacauaugugcccgcucaagagaagaauuucaccaccgcuccagccaucugccacgacggcaaagcccacuuuccuagagaaggcguguucguguccaacggcacccauugguucgugacacagcggaacuucuacgagccccagaucaucaccaccgacaacaccuucgugucuggcaacugcgacguugugaucggcauugugaacaauaccguguacgacccucugcagcccgagcuggacagcuucaaagaggaacuggacaaguacuuuaagaaccacacaagccccgacguggaccugggcgauaucagcggaaucaaugccagcgucgugaacauccagaaagagaucgaccggcugaacgagguggccaagaaucugaacgagagccugaucgaccugcaagaacuggggaaguacgagcaguacaucaaguggcccugguacaucuggcugggcuuuaucgccggacugauugccaucgugauggucacaaucaugcuguguugcaugaccagcugcuguagcugccugaagggcuguuguagcuguggcagcugcugcaaguucgacgaggacgauucugagcccgugcugaagggcgugaaacugcacuacaccugaggacuagucccuguucccagagcccacuuuuuuuucuuuuuuugaaauaaaauagccugucuuucagaucuaaaaaaaaaaaaaaaaaaaaaaaaaaaaaaaaaaaaaaaaaaaaaaaaaaaaaaaaaaaaaaaaaaaaaaaaaaaaaaaaaaaaaaaaaaaaaaaaaaaa

SEQ ID NO: 25035 - RNA, 4158 nt, Artificial Sequence
  SARS-CoV-2/Wuhan/WIV05/2019__EPI_ISL_402128 spike protein mRNA gc mod (1-1273)(L18F_D80A_D215G_L242del_A243del_L244del_R246I_K417N_E484 K_N501Y_D614G_A701V)
aggagagggcgcuuggcuugcaaggacccugagcugcggcauugaagcacacccaacccaacucgacugaagucagccucacugaaccggaucugagaaucuucucucucugggcuugccagggcucuccgaaccuagcuagcauccucuucaauuccaacuagaaagcuuaccauguucguguuucuggugcugcugccccugguguccagccagugugugaacuucaccaccagaacacagcugccuccagccuacaccaacagcuucaccagaggcguguacuaccccgacaagguguucagauccagcgugcugcacucuacccaggaccuguuccugccuuucuucagcaacgugaccugguuccacgccauccacguguccggcaccaauggcaccaagagauucgccaaccccgugcugcccuucaacgacgggguguacuuugccagcaccgagaaguccaacaucaucagaggcuggaucuucggcaccacacuggacagcaagacccagagccugcugaucgugaacaacgccaccaacguggucaucaaagugugcgaguuccaguucugcaacgaccccuuccugggcgucuacuaccacaagaacaacaagagcuggauggaaagcgaguuccggguguacagcagcgccaacaacugcaccuucgaguacgugucccagccuuuccugauggaccuggaaggcaagcagggcaacuucaagaaccugcgcgaguucguguucaagaacaucgacggcuacuucaaaaucuacagcaagcacaccccuaucaaccucgugcggggccugccucagggcuucucugcucuggaaccccugguggaucugcccaucggcaucaacaucacccgguuucagacacugcacaucagcuaccugacaccuggcgauagcagcagcggauggacagcuggugccgccgcuuacuaugugggcuaccugcagccuagaaccuuccugcugaaguacaacgagaacggcaccaucaccgacgccguggauugugcucuggauccucugagcgagacaaagugcacccugaaguccuucaccguggaaaagggcaucuaccagaccagcaacuuccgggugcagcccaccgaauccaucgugcgguuccccaauaucaccaaucugugccccuucggcgagguguucaaugccaccagauucgccucuguguacgccuggaaccggaagcggaucagcaauugcguggccgacuacuccgugcuguacaacuccgccagcuucagcaccuucaagugcuacggcguguccccuaccaagcugaacgaccugugcuucacaaacguguacgccgacagcuucgugauccggggagaugaagugcggcagauugccccuggacagacaggcaacaucgccgacuacaacuacaagcugcccgacgacuucaccggcugugugauugccuggaacagcaacaaccuggacuccaaagucggcggcaacuacaauuaccuguaccggcuguuccggaaguccaaucugaagcccuucgagcgggacaucagcaccgaaaucuaucaggccggcagcaccccuugcaacggcgugaagggcuucaacugcuacuucccacugcaguccuacggcuuucagcccacauacggcgugggcuaucagcccuacagagugguggugcugagcuucgaacugcugcaugcuccugccacagugugcggcccuaagaaaagcaccaaucucgugaagaacaaaugcgugaacuucaacuucaacggccugaccggcaccggcgugcugacagagagcaacaagaaguuccugccauuccagcaguuuggccgggauaucgccgauaccacagacgccguuagagauccccagacacuggaaauccuggacaucaccccaugcagcuucggcggagugucugugaucaccccuggcaccaacaccagcaaucagguggcagugcuguaccagggcgugaacuguaccgaagugcccguggccauucacgccgaucagcugacaccuacauggcggguguacuccaccggcagcaauguguuucagaccagagccggcugucugaucggagccgagcacgugaacaauagcuacgagugcgacauccccaucggcgcuggcaucugugccagcuaccagacacagacaaacagccccagacgggcuagaagcguggccagccagagcaucauugccuacacaaugucucugggcguggagaacagcguggccuacuccaacaacucuaucgcuauccccaccaacuucaccaucagcgugaccaccgagauccugccuguguccaugaccaagaccagcguggacugcaccauguacaucugcggcgauuccaccgagugcuccaaccugcugcugcaguacggcagcuucugcacccagcugaauagagcccugacagggaucgccguggaacaggacaagaacacccaagagguguucgcccaagugaagcaaaucuacaagaccccuccuaucaaggacuucggcggcuucaauuucagccagauucugcccgauccuagcaagcccagcaagcggagcuucaucgaggaccugcuguucaacaaagugacacuggccgacgccggcuucaucaagcaguauggcgauugucugggcgacauugccgccagggaucugauuugcgcccagaaguuuaacggacugacagugcugccuccucugcugaccgaugagaugaucgcccaguacacaucugcccugcuggccggcacaaucacaagcggcuggacauuuggagcuggcgccgcucugcagauccccuuugcuaugcagauggccuaccgguucaacggcaucggagugacccagaaugugcuguacgagaaccagaagcugaucgccaaccaguucaacagcgccaucggcaagauccaggacagccugagcagcacagcaagcgcccugggaaagcugcaggacguggucaaccagaaugcccaggcacugaacacccuggucaagcagcuguccuccaacuucggcgccaucagcucugugcugaacgauauccugagcagacuggacaaggucgaggccgaggugcagaucgacagacugaucacaggcagacugcagagccuccagacauacgugacccagcagcugaucagagccgccgagauuagagccucugccaaucuggccgccaccaagaugucugagugugugcugggccagagcaagagaguggacuuuugcggcaagggcuaccaccugaugagcuucccucagucugccccucacggcgugguguuucugcacgugacauaugugcccgcucaagagaagaauuucaccaccgcuccagccaucugccacgacggcaaagcccacuuuccuagagaaggcguguucguguccaacggcacccauugguucgugacacagcggaacuucuacgagccccagaucaucaccaccgacaacaccuucgugucuggcaacugcgacguugugaucggcauugugaacaauaccguguacgacccucugcagcccgagcuggacagcuucaaagaggaacuggacaaguacuuuaagaaccacacaagccccgacguggaccugggcgauaucagcggaaucaaugccagcgucgugaacauccagaaagagaucgaccggcugaacgagguggccaagaaucugaacgagagccugaucgaccugcaagaacuggggaaguacgagcaguacaucaaguggcccugguacaucuggcugggcuuuaucgccggacugauugccaucgugauggucacaaucaugcuguguugcaugaccagcugcuguagcugccugaagggcuguuguagcuguggcagcugcugcaaguucgacgaggacgauucugagcccgugcugaagggcgugaaacugcacuacaccugaggacuagucccuguucccagagcccacuuuuuuuucuuuuuuugaaauaaaauagccugucuuucagaucuaaaaaaaaaaaaaaaaaaaaaaaaaaaaaaaaaaaaaaaaaaaaaaaaaaaaaaaaaaaaaaaaaaaaaaaaaaaaaaaaaaaaaaaaaaaaaaaaaaaa

SEQ ID NO: 25036 - RNA, 4167 nt, Artificial Sequence
  SARS-CoV-2/Wuhan/WIV05/2019__EPI_ISL_402128 spike protein mRNA gc mod (1-1273)(E484K_D614G)
aggagagggcgcuuggcuugcaaggacccugagcugcggcauugaagcacacccaacccaacucgacugaagucagccucacugaaccggaucugagaaucuucucucucugggcuugccagggcucuccgaaccuagcuagcauccucuucaauuccaacuagaaagcuuaccauguucguguuucuggugcugcugccccugguguccagccagugugugaaccugaccaccagaacacagcugccuccagccuacaccaacagcuucaccagaggcguguacuaccccgacaagguguucagauccagcgugcugcacucuacccaggaccuguuccugccuuucuucagcaacgugaccugguuccacgccauccacguguccggcaccaauggcaccaagagauucgacaaccccgugcugcccuucaacgacgggguguacuuugccagcaccgagaaguccaacaucaucagaggcuggaucuucggcaccacacuggacagcaagacccagagccugcugaucgugaacaacgccaccaacguggucaucaaagugugcgaguuccaguucugcaacgaccccuuccugggcgucuacuaccacaagaacaacaagagcuggauggaaagcgaguuccggguguacagcagcgccaacaacugcaccuucgaguacgugucccagccuuuccugauggaccuggaaggcaagcagggcaacuucaagaaccugcgcgaguucguguucaagaacaucgacggcuacuucaaaaucuacagcaagcacaccccuaucaaccucgugcgggaucugccucagggcuucucugcucuggaaccccugguggaucugcccaucggcaucaacaucacccgguuucagacacugcuggcccugcacagaagcuaccugacaccuggcgauagcagcagcggauggacagcuggugccgccgcuuacuaugugggcuaccugcagccuagaaccuuccugcugaaguacaacgagaacggcaccaucaccgacgccguggauugugcucuggauccucugagcgagacaaagugcacccugaaguccuucaccguggaaaagggcaucuaccagaccagcaacuuccgggugcagcccaccgaauccaucgugcgguuccccaauaucaccaaucugugccccuucggcgagguguucaaugccaccagauucgccucuguguacgccuggaaccggaagcggaucagcaauugcguggccgacuacuccgugcuguacaacuccgccagcuucagcaccuucaagugcuacggcguguccccuaccaagcugaacgaccugugcuucacaaacguguacgccgacagcuucgugauccggggagaugaagugcggcagauugccccuggacagacaggcaagaucgccgacuacaacuacaagcugcccgacgacuucaccggcugugugauugccuggaacagcaacaaccuggacuccaaagucggcggcaacuacaauuaccuguaccggcuguuccggaaguccaaucugaagcccuucgagcgggacaucagcaccgaaaucuaucaggccggcagcaccccuugcaacggcgugaagggcuucaacugcuacuucccacugcaguccuacggcuuucagcccacaaauggcgugggcuaucagcccuacagagugguggugcugagcuucgaacugcugcaugcuccugccacagugugcggcccuaagaaaagcaccaaucucgugaagaacaaaugcgugaacuucaacuucaacggccugaccggcaccggcgugcugacagagagcaacaagaaguuccugccauuccagcaguuuggccgggauaucgccgauaccacagacgccguuagagauccccagacacuggaaauccuggacaucaccccaugcagcuucggcggagugucugugaucaccccuggcaccaacaccagcaaucagguggcagugcuguaccagggcgugaacuguaccgaagugcccguggccauucacgccgaucagcugacaccuacauggcggguguacuccaccggcagcaauguguuucagaccagagccggcugucugaucggagccgagcacgugaacaauagcuacgagugcgacauccccaucggcgcuggcaucugugccagcuaccagacacagacaaacagccccagacgggcuagaagcguggccagccagagcaucauugccuacacaaugucucugggcgccgagaacagcguggccuacuccaacaacucuaucgcuauccccaccaacuucaccaucagcgugaccaccgagauccugccuguguccaugaccaagaccagcguggacugcaccauguacaucugcggcgauuccaccgagugcuccaaccugcugcugcaguacggcagcuucugcacccagcugaauagagcccugacagggaucgccguggaacaggacaagaacacccaagagguguucgcccaagugaagcaaaucuacaagaccccuccuaucaaggacuucggcggcuucaauuucagccagauucugcccgauccuagcaagcccagcaagcggagcuucaucgaggaccugcuguucaacaaagugacacuggccgacgccggcuucaucaagcaguauggcgauugucugggcgacauugccgccagggaucugauuugcgcccagaaguuuaacggacugacagugcugccuccucugcugaccgaugagaugaucgcccaguacacaucugcccugcuggccggcacaaucacaagcggcuggacauuuggagcuggcgccgcucugcagauccccuuugcuaugcagauggccuaccgguucaacggcaucggagugacccagaaugugcuguacgagaaccagaagcugaucgccaaccaguucaacagcgccaucggcaagauccaggacagccugagcagcacagcaagcgcccugggaaagcugcaggacguggucaaccagaaugcccaggcacugaacacccuggucaagcagcuguccuccaacuucggcgccaucagcucugugcugaacgauauccugagcagacuggacaaggucgaggccgaggugcagaucgacagacugaucacaggcagacugcagagccuccagacauacgugacccagcagcugaucagagccgccgagauuagagccucugccaaucuggccgccaccaagaugucugagugugugcugggccagagcaagagaguggacuuuugcggcaagggcuaccaccugaugagcuucccucagucugccccucacggcgugguguuucugcacgugacauaugugcccgcucaagagaagaauuucaccaccgcuccagccaucugccacgacggcaaagcccacuuuccuagagaaggcguguucguguccaacggcacccauugguucgugacacagcggaacuucuacgagccccagaucaucaccaccgacaacaccuucgugucuggcaacugcgacguugugaucggcauugugaacaauaccguguacgacccucugcagcccgagcuggacagcuucaaagaggaacuggacaaguacuuuaagaaccacacaagccccgacguggaccugggcgauaucagcggaaucaaugccagcgucgugaacauccagaaagagaucgaccggcugaacgagguggccaagaaucugaacgagagccugaucgaccugcaagaacuggggaaguacgagcaguacaucaaguggcccugguacaucuggcugggcuuuaucgccggacugauugccaucgugauggucacaaucaugcuguguugcaugaccagcugcuguagcugccugaagggcuguuguagcuguggcagcugcugcaaguucgacgaggacgauucugagcccgugcugaagggcgugaaacugcacuacaccugaggacuagucccuguucccagagcccacuuuuuuuucuuuuuuugaaauaaaauagccugucuuucagaucuaaaaaaaaaaaaaaaaaaaaaaaaaaaaaaaaaaaaaaaaaaaaaaaaaaaaaaaaaaaaaaaaaaaaaaaaaaaaaaaaaaaaaaaaaaaaaaaaaaaa

SEQ ID NO: 25037 - RNA, 4167 nt, Artificial Sequence
  SARS-CoV-2/Wuhan/WIV05/2019__EPI_ISL_402128 spike protein mRNA gc mod (1-1273)(L18F_T20N_P26S_D138Y_R190S_K417T_E484K_N501Y_D614G_H655Y _T1027I)
aggagagggcgcuuggcuugcaaggacccugagcugcggcauugaagcacacccaacccaacucgacugaagucagccucacugaaccggaucugagaaucuucucucucugggcuugccagggcucuccgaaccuagcuagcauccucuucaauuccaacuagaaagcuuaccauguucguguuucuggugcugcugccccugguguccagccagugugugaacuucaccaacagaacacagcugccuagcgccuacaccaacagcuucaccagaggcguguacuaccccgacaagguguucagauccagcgugcugcacucuacccaggaccuguuccugccuuucuucagcaacgugaccugguuccacgccauccacguguccggcaccaauggcaccaagagauucgacaaccccgugcugcccuucaacgacgggguguacuuugccagcaccgagaaguccaacaucaucagaggcuggaucuucggcaccacacuggacagcaagacccagagccugcugaucgugaacaacgccaccaacguggucaucaaagugugcgaguuccaguucugcaacuaccccuuccugggcgucuacuaccacaagaacaacaagagcuggauggaaagcgaguuccggguguacagcagcgccaacaacugcaccuucgaguacgugucccagccuuuccugauggaccuggaaggcaagcagggcaacuucaagaaccugagcgaguucguguucaagaacaucgacggcuacuucaaaaucuacagcaagcacaccccuaucaaccucgugcgggaucugccucagggcuucucugcucuggaaccccugguggaucugcccaucggcaucaacaucacccgguuucagacacugcuggcccugcacagaagcuaccugacaccuggcgauagcagcagcggauggacagcuggugccgccgcuuacuaugugggcuaccugcagccuagaaccuuccugcugaaguacaacgagaacggcaccaucaccgacgccguggauugugcucuggauccucugagcgagacaaagugcacccugaaguccuucaccguggaaaagggcaucuaccagaccagcaacuuccgggugcagcccaccgaauccaucgugcgguuccccaauaucaccaaucugugccccuucggcgagguguucaaugccaccagauucgccucuguguacgccuggaaccggaagcggaucagcaauugcguggccgacuacuccgugcuguacaacuccgccagcuucagcaccuucaagugcuacggcguguccccuaccaagcugaacgaccugugcuucacaaacguguacgccgacagcuucgugauccggggagaugaagugcggcagauugccccuggacagacaggcaccaucgccgacuacaacuacaagcugcccgacgacuucaccggcugugugauugccuggaacagcaacaaccuggacuccaaagucggcggcaacuacaauuaccuguaccggcuguuccggaaguccaaucugaagcccuucgagcgggacaucagcaccgaaaucuaucaggccggcagcaccccuugcaacggcgugaagggcuucaacugcuacuucccacugcaguccuacggcuuucagcccacauacggcgugggcuaucagcccuacagagugguggugcugagcuucgaacugcugcaugcuccugccacagugugcggcccuaagaaaagcaccaaucucgugaagaacaaaugcgugaacuucaacuucaacggccugaccggcaccggcgugcugacagagagcaacaagaaguuccugccauuccagcaguuuggccgggauaucgccgauaccacagacgccguuagagauccccagacacuggaaauccuggacaucaccccaugcagcuucggcggagugucugugaucaccccuggcaccaacaccagcaaucagguggcagugcuguaccagggcgugaacuguaccgaagugcccguggccauucacgccgaucagcugacaccuacauggcggguguacuccaccggcagcaauguguuucagaccagagccggcugucugaucggagccgaguacgugaacaauagcuacgagugcgacauccccaucggcgcuggcaucugugccagcuaccagacacagacaaacagccccagacgggcuagaagcguggccagccagagcaucauugccuacacaaugucucugggcgccgagaacagcguggccuacuccaacaacucuaucgcuauccccaccaacuucaccaucagcgugaccaccgagauccugccuguguccaugaccaagaccagcguggacugcaccauguacaucugcggcgauuccaccgagugcuccaaccugcugcugcaguacggcagcuucugcacccagcugaauagagcccugacagggaucgccguggaacaggacaagaacacccaagagguguucgcccaagugaagcaaaucuacaagaccccuccuaucaaggacuucggcggcuucaauuucagccagauucugcccgauccuagcaagcccagcaagcggagcuucaucgaggaccugcuguucaacaaagugacacuggccgacgccggcuucaucaagcaguauggcgauugucugggcgacauugccgccagggaucugauuugcgcccagaaguuuaacggacugacagugcugccuccucugcugaccgaugagaugaucgcccaguacacaucugcccugcuggccggcacaaucacaagcggcuggacauuuggagcuggcgccgcucugcagauccccuuugcuaugcagauggccuaccgguucaacggcaucggagugacccagaaugugcuguacgagaaccagaagcugaucgccaaccaguucaacagcgccaucggcaagauccaggacagccugagcagcacagcaagcgcccugggaaagcugcaggacguggucaaccagaaugcccaggcacugaacacccuggucaagcagcuguccuccaacuucggcgccaucagcucugugcugaacgauauccugagcagacuggacaaggucgaggccgaggugcagaucgacagacugaucacaggcagacugcagagccuccagacauacgugacccagcagcugaucagagccgccgagauuagagccucugccaaucuggccgccaucaagaugucugagugugugcugggccagagcaagagaguggacuuuugcggcaagggcuaccaccugaugagcuucccucagucugccccucacggcgugguguuucugcacgugacauaugugcccgcucaagagaagaauuucaccaccgcuccagccaucugccacgacggcaaagcccacuuuccuagagaaggcguguucguguccaacggcacccauugguucgugacacagcggaacuucuacgagccccagaucaucaccaccgacaacaccuucgugucuggcaacugcgacguugugaucggcauugugaacaauaccguguacgacccucugcagcccgagcuggacagcuucaaagaggaacuggacaaguacuuuaagaaccacacaagccccgacguggaccugggcgauaucagcggaaucaaugccagcgucgugaacauccagaaagagaucgaccggcugaacgagguggccaagaaucugaacgagagccugaucgaccugcaagaacuggggaaguacgagcaguacaucaaguggcccugguacaucuggcugggcuuuaucgccggacugauugccaucgugauggucacaaucaugcuguguugcaugaccagcugcuguagcugccugaagggcuguuguagcuguggcagcugcugcaaguucgacgaggacgauucugagcccgugcugaagggcgugaaacugcacuacaccugaggacuagucccuguucccagagcccacuuuuuuuucuuuuuuugaaauaaaauagccugucuuucagaucuaaaaaaaaaaaaaaaaaaaaaaaaaaaaaaaaaaaaaaaaaaaaaaaaaaaaaaaaaaaaaaaaaaaaaaaaaaaaaaaaaaaaaaaaaaaaaaaaaaaa

SEQ ID NO: 25038 - RNA, 4167 nt, Artificial Sequence
  SARS-CoV-2/Wuhan/WIV05/2019__EPI_ISL_402128 spike protein mRNA gc mod (1-1273)(S13I_W152C_L452R_D614G)
aggagagggcgcuuggcuugcaaggacccugagcugcggcauugaagcacacccaacccaacucgacugaagucagccucacugaaccggaucugagaaucuucucucucugggcuugccagggcucuccgaaccuagcuagcauccucuucaauuccaacuagaaagcuuaccauguucguguuucuggugcugcugccccugguguccauccagugugugaaccugaccaccagaacacagcugccuccagccuacaccaacagcuucaccagaggcguguacuaccccgacaagguguucagauccagcgugcugcacucuacccaggaccuguuccugccuuucuucagcaacgugaccugguuccacgccauccacguguccggcaccaauggcaccaagagauucgacaaccccgugcugcccuucaacgacgggguguacuuugccagcaccgagaaguccaacaucaucagaggcuggaucuucggcaccacacuggacagcaagacccagagccugcugaucgugaacaacgccaccaacguggucaucaaagugugcgaguuccaguucugcaacgaccccuuccugggcgucuacuaccacaagaacaacaagagcugcauggaaagcgaguuccggguguacagcagcgccaacaacugcaccuucgaguacgugucccagccuuuccugauggaccuggaaggcaagcagggcaacuucaagaaccugcgcgaguucguguucaagaacaucgacggcuacuucaaaaucuacagcaagcacaccccuaucaaccucgugcgggaucugccucagggcuucucugcucuggaaccccugguggaucugcccaucggcaucaacaucacccgguuucagacacugcuggcccugcacagaagcuaccugacaccuggcgauagcagcagcggauggacagcuggugccgccgcuuacuaugugggcuaccugcagccuagaaccuuccugcugaaguacaacgagaacggcaccaucaccgacgccguggauugugcucuggauccucugagcgagacaaagugcacccugaaguccuucaccguggaaaagggcaucuaccagaccagcaacuuccgggugcagcccaccgaauccaucgugcgguuccccaauaucaccaaucugugccccuucggcgagguguucaaugccaccagauucgccucuguguacgccuggaaccggaagcggaucagcaauugcguggccgacuacuccgugcuguacaacuccgccagcuucagcaccuucaagugcuacggcguguccccuaccaagcugaacgaccugugcuucacaaacguguacgccgacagcuucgugauccggggagaugaagugcggcagauugccccuggacagacaggcaagaucgccgacuacaacuacaagcugcccgacgacuucaccggcugugugauugccuggaacagcaacaaccuggacuccaaagucggcggcaacuacaauuaccgcuaccggcuguuccggaaguccaaucugaagcccuucgagcgggacaucagcaccgaaaucuaucaggccggcagcaccccuugcaacggcguggaaggcuucaacugcuacuucccacugcaguccuacggcuuucagcccacaaauggcgugggcuaucagcccuacagagugguggugcugagcuucgaacugcugcaugcuccugccacagugugcggcccuaagaaaagcaccaaucucgugaagaacaaaugcgugaacuucaacuucaacggccugaccggcaccggcgugcugacagagagcaacaagaaguuccugccauuccagcaguuuggccgggauaucgccgauaccacagacgccguuagagauccccagacacuggaaauccuggacaucaccccaugcagcuucggcggagugucugugaucaccccuggcaccaacaccagcaaucagguggcagugcuguaccagggcgugaacuguaccgaagugcccguggccauucacgccgaucagcugacaccuacauggcggguguacuccaccggcagcaauguguuucagaccagagccggcugucugaucggagccgagcacgugaacaauagcuacgagugcgacauccccaucggcgcuggcaucugugccagcuaccagacacagacaaacagccccagacgggcuagaagcguggccagccagagcaucauugccuacacaaugucucugggcgccgagaacagcguggccuacuccaacaacucuaucgcuauccccaccaacuucaccaucagcgugaccaccgagauccugccuguguccaugaccaagaccagcguggacugcaccauguacaucugcggcgauuccaccgagugcuccaaccugcugcugcaguacggcagcuucugcacccagcugaauagagcccugacagggaucgccguggaacaggacaagaacacccaagagguguucgcccaagugaagcaaaucuacaagaccccuccuaucaaggacuucggcggcuucaauuucagccagauucugcccgauccuagcaagcccagcaagcggagcuucaucgaggaccugcuguucaacaaagugacacuggccgacgccggcuucaucaagcaguauggcgauugucugggcgacauugccgccagggaucugauuugcgcccagaaguuuaacggacugacagugcugccuccucugcugaccgaugagaugaucgcccaguacacaucugcccugcuggccggcacaaucacaagcggcuggacauuuggagcuggcgccgcucugcagauccccuuugcuaugcagauggccuaccgguucaacggcaucggagugacccagaaugugcuguacgagaaccagaagcugaucgccaaccaguucaacagcgccaucggcaagauccaggacagccugagcagcacagcaagcgcccugggaaagcugcaggacguggucaaccagaaugcccaggcacugaacacccuggucaagcagcuguccuccaacuucggcgccaucagcucugugcugaacgauauccugagcagacuggacaaggucgaggccgaggugcagaucgacagacugaucacaggcagacugcagagccuccagacauacgugacccagcagcugaucagagccgccgagauuagagccucugccaaucuggccgccaccaagaugucugagugugugcugggccagagcaagagaguggacuuuugcggcaagggcuaccaccugaugagcuucccucagucugccccucacggcgugguguuucugcacgugacauaugugcccgcucaagagaagaauuucaccaccgcuccagccaucugccacgacggcaaagcccacuuuccuagagaaggcguguucguguccaacggcacccauugguucgugacacagcggaacuucuacgagccccagaucaucaccaccgacaacaccuucgugucuggcaacugcgacguugugaucggcauugugaacaauaccguguacgacccucugcagcccgagcuggacagcuucaaagaggaacuggacaaguacuuuaagaaccacacaagccccgacguggaccugggcgauaucagcggaaucaaugccagcgucgugaacauccagaaagagaucgaccggcugaacgagguggccaagaaucugaacgagagccugaucgaccugcaagaacuggggaaguacgagcaguacaucaaguggcccugguacaucuggcugggcuuuaucgccggacugauugccaucgugauggucacaaucaugcuguguugcaugaccagcugcuguagcugccugaagggcuguuguagcuguggcagcugcugcaaguucgacgaggacgauucugagcccgugcugaagggcgugaaacugcacuacaccugaggacuagucccuguucccagagcccacuuuuuuuucuuuuuuugaaauaaaauagccugucuuucagaucuaaaaaaaaaaaaaaaaaaaaaaaaaaaaaaaaaaaaaaaaaaaaaaaaaaaaaaaaaaaaaaaaaaaaaaaaaaaaaaaaaaaaaaaaaaaaaaaaaaaa

SEQ ID NO: 25039 - RNA, 4167 nt, Artificial Sequence
  SARS-CoV-2/Wuhan/WIV05/2019__EPI_ISL_402128 spike protein mRNA gc mod (1-1273)
aggagagggcgcuuggcuugcaaggacccugagcugcggcauugaagcacacccaacccaacucgacugaagucagccucacugaaccggaucugagaaucuucucucucugggcuugccagggcucuccgaaccuagcuagcauccucuucaauuccaacuagaaagcuuaccauguucguguuccuggugcugcugccucugguguccagccagugugugaaccugaccaccagaacacagcugccuccagccuacaccaacagcuuuaccagaggcguguacuaccccgacaagguguucagauccagcgugcugcacucuacccaggaccuguuccugccuuucuucagcaacgugaccugguuccacgccauccacguguccggcaccaauggcaccaagagauucgacaaccccgugcugcccuucaacgacgggguguacuuugccagcaccgagaaguccaacaucaucagaggcuggaucuucggcaccacacuggacagcaagacccagagccugcugaucgugaacaacgccaccaacguggucaucaaagugugcgaguuccaguucugcaacgaccccuuccugggcgucuacuaccacaagaacaacaagagcuggauggaaagcgaguuccggguguacagcagcgccaacaacugcaccuucgaguacgugucccagccuuuccugauggaccuggaaggcaagcagggcaacuucaagaaccugcgcgaguucguguuuaagaacaucgacggcuacuucaagaucuacagcaagcacaccccuaucaaccucgugcgggaucugccucagggcuucucugcucuggaaccccugguggaucugcccaucggcaucaacaucacccgguuucagacacugcuggcccugcacagaagcuaccugacaccuggcgauagcagcagcggauggacagcuggugccgccgcuuacuaugugggcuaccugcagccuagaaccuuccugcugaaguacaacgagaacggcaccaucaccgacgccguggauugugcucuggauccucugagcgagacaaagugcacccugaaguccuucaccguggaaaagggcaucuaccagaccagcaacuuccgggugcagcccaccgaauccaucgugcgguuccccaauaucaccaaucugugccccuucggcgagguguucaaugccaccagauucgccucuguguacgccuggaaccggaagcggaucagcaauugcguggccgacuacuccgugcuguacaacuccgccagcuucagcaccuucaagugcuacggcguguccccuaccaagcugaacgaccugugcuucacaaacguguacgccgacagcuucgugauccggggagaugaagugcggcagauugccccuggacagacaggcaagaucgccgacuacaacuacaagcugcccgacgacuucaccggcugugugauugccuggaacagcaacaaccuggacuccaaagucggcggcaacuacaauuaccuguaccggcuguuccggaaguccaaucugaagcccuucgagcgggacaucuccaccgagaucuaucaggccggcagcaccccuuguaacggcguggaaggcuucaacugcuacuucccacugcaguccuacggcuuucagcccacaaauggcgugggcuaucagcccuacagagugguggugcugagcuucgaacugcugcaugccccugccacagugugcggcccuaagaaaagcaccaaucucgugaagaacaaaugcgugaacuucaacuucaacggccugaccggcaccggcgugcugacagagagcaacaagaaguuccugccauuccagcaguuuggccgggauaucgccgauaccacagacgccguuagagauccccagacacuggaaauccuggacaucaccccuugcagcuucggcggagugucugugaucaccccuggcaccaacaccagcaaucagguggcagugcuguaccaggacgugaacuguaccgaagugcccguggccauucacgccgaucagcugacaccuacauggcggguguacuccaccggcagcaauguguuucagaccagagccggcugucugaucggagccgagcacgugaacaauagcuacgagugcgacauccccaucggcgcuggaaucugcgccagcuaccagacacagacaaacagcccucggagagccagaagcguggccagccagagcaucauugccuacacaaugucucugggcgccgagaacagcguggccuacuccaacaacucuaucgcuauccccaccaacuucaccaucagcgugaccacagagauccugccuguguccaugaccaagaccagcguggacugcaccauguacaucugcggcgauuccaccgagugcuccaaccugcugcugcaguacggcagcuucugcacccagcugaauagagcccugacagggaucgccguggaacaggacaagaacacccaagagguguucgcccaagugaagcagaucuacaagaccccuccuaucaaggacuucggcggcuucaauuucagccagauucugcccgauccuagcaagcccagcaagcggagcuucaucgaggaccugcuguucaacaaagugacacuggccgacgccggcuucaucaagcaguauggcgauugucugggcgacauugccgccagggaucugauuugcgcccagaaguuuaacggacugacagugcugccuccucugcugaccgaugagaugaucgcccaguacacaucugcccugcuggccggcacaaucacaagcggcuggacauuuggagcaggcgccgcucugcagauccccuuugcuaugcagauggccuaccgguucaacggcaucggagugacccagaaugugcuguacgagaaccagaagcugaucgccaaccaguucaacagcgccaucggcaagauccaggacagccugagcagcacagcaagcgcccugggaaagcugcaggacguggucaaccagaaugcccaggcacugaacacccuggucaagcagcuguccuccaacuucggcgccaucagcucugugcugaacgauauccugagcagacuggacaaggucgaggccgaggugcagaucgacagacugaucacaggcagacugcagagccuccagacauacgugacccagcagcugaucagagccgccgagauuagagccucugccaaucuggccgccaccaagaugucugagugugugcugggccagagcaagagaguggacuuuugcggcaagggcuaccaccugaugagcuucccucagucugccccucacggcgugguguuucugcacgugacauaugugcccgcucaagagaagaauuucaccaccgcuccagccaucugccacgacggcaaagcccacuuuccuagagaaggcguguucguguccaacggcacccauugguucgugacacagcggaacuucuacgagccccagaucaucaccaccgacaacaccuucgugucuggcaacugcgacgucgugaucggcauugugaacaauaccguguacgacccucugcagcccgagcuggacagcuucaaagaggaacuggacaaguacuuuaagaaccacacaagccccgacguggaccugggcgauaucagcggaaucaaugccagcgucgugaacauccagaaagagaucgaccggcugaacgagguggccaagaaucugaacgagagccugaucgaccugcaagaacuggggaaguacgagcaguacaucaaguggcccugguacaucuggcugggcuuuaucgccggacugauugccaucgugauggucacaaucaugcuguguugcaugaccagcugcuguagcugccugaagggcuguuguagcuguggcagcugcugcaaguucgacgaggacgauucugagcccgugcugaagggcgugaaacugcacuacacaugaggacuagucccuguucccagagcccacuuuuuuuucuuuuuuugaaauaaaauagccugucuuucagaucuaaaaaaaaaaaaaaaaaaaaaaaaaaaaaaaaaaaaaaaaaaaaaaaaaaaaaaaaaaaaaaaaaaaaaaaaaaaaaaaaaaaaaaaaaaaaaaaaaaaa

SEQ ID NO: 25040 - RNA, 4167 nt, Artificial Sequence
  SARS-CoV-2/Wuhan/WIV05/2019__EPI_ISL_402128 spike protein mRNA gc mod (1-1273)(D614G)
aggagagggcgcuuggcuugcaaggacccugagcugcggcauugaagcacacccaacccaacucgacugaagucagccucacugaaccggaucugagaaucuucucucucugggcuugccagggcucuccgaaccuagcuagcauccucuucaauuccaacuagaaagcuuaccauguucguguuccuggugcugcugccucugguguccagccagugugugaaccugaccaccagaacacagcugccuccagccuacaccaacagcuuuaccagaggcguguacuaccccgacaagguguucagauccagcgugcugcacucuacccaggaccuguuccugccuuucuucagcaacgugaccugguuccacgccauccacguguccggcaccaauggcaccaagagauucgacaaccccgugcugcccuucaacgacgggguguacuuugccagcaccgagaaguccaacaucaucagaggcuggaucuucggcaccacacuggacagcaagacccagagccugcugaucgugaacaacgccaccaacguggucaucaaagugugcgaguuccaguucugcaacgaccccuuccugggcgucuacuaccacaagaacaacaagagcuggauggaaagcgaguuccggguguacagcagcgccaacaacugcaccuucgaguacgugucccagccuuuccugauggaccuggaaggcaagcagggcaacuucaagaaccugcgcgaguucguguuuaagaacaucgacggcuacuucaagaucuacagcaagcacaccccuaucaaccucgugcgggaucugccucagggcuucucugcucuggaaccccugguggaucugcccaucggcaucaacaucacccgguuucagacacugcuggcccugcacagaagcuaccugacaccuggcgauagcagcagcggauggacagcuggugccgccgcuuacuaugugggcuaccugcagccuagaaccuuccugcugaaguacaacgagaacggcaccaucaccgacgccguggauugugcucuggauccucugagcgagacaaagugcacccugaaguccuucaccguggaaaagggcaucuaccagaccagcaacuuccgggugcagcccaccgaauccaucgugcgguuccccaauaucaccaaucugugccccuucggcgagguguucaaugccaccagauucgccucuguguacgccuggaaccggaagcggaucagcaauugcguggccgacuacuccgugcuguacaacuccgccagcuucagcaccuucaagugcuacggcguguccccuaccaagcugaacgaccugugcuucacaaacguguacgccgacagcuucgugauccggggagaugaagugcggcagauugccccuggacagacaggcaagaucgccgacuacaacuacaagcugcccgacgacuucaccggcugugugauugccuggaacagcaacaaccuggacuccaaagucggcggcaacuacaauuaccuguaccggcuguuccggaaguccaaucugaagcccuucgagcgggacaucuccaccgagaucuaucaggccggcagcaccccuuguaacggcguggaaggcuucaacugcuacuucccacugcaguccuacggcuuucagcccacaaauggcgugggcuaucagcccuacagagugguggugcugagcuucgaacugcugcaugccccugccacagugugcggcccuaagaaaagcaccaaucucgugaagaacaaaugcgugaacuucaacuucaacggccugaccggcaccggcgugcugacagagagcaacaagaaguuccugccauuccagcaguuuggccgggauaucgccgauaccacagacgccguuagagauccccagacacuggaaauccuggacaucaccccuugcagcuucggcggagugucugugaucaccccuggcaccaacaccagcaaucagguggcagugcuguaccagggcgugaacuguaccgaagugcccguggccauucacgccgaucagcugacaccuacauggcggguguacuccaccggcagcaauguguuucagaccagagccggcugucugaucggagccgagcacgugaacaauagcuacgagugcgacauccccaucggcgcuggaaucugcgccagcuaccagacacagacaaacagcccucggagagccagaagcguggccagccagagcaucauugccuacacaaugucucugggcgccgagaacagcguggccuacuccaacaacucuaucgcuauccccaccaacuucaccaucagcgugaccacagagauccugccuguguccaugaccaagaccagcguggacugcaccauguacaucugcggcgauuccaccgagugcuccaaccugcugcugcaguacggcagcuucugcacccagcugaauagagcccugacagggaucgccguggaacaggacaagaacacccaagagguguucgcccaagugaagcagaucuacaagaccccuccuaucaaggacuucggcggcuucaauuucagccagauucugcccgauccuagcaagcccagcaagcggagcuucaucgaggaccugcuguucaacaaagugacacuggccgacgccggcuucaucaagcaguauggcgauugucugggcgacauugccgccagggaucugauuugcgcccagaaguuuaacggacugacagugcugccuccucugcugaccgaugagaugaucgcccaguacacaucugcccugcuggccggcacaaucacaagcggcuggacauuuggagcaggcgccgcucugcagauccccuuugcuaugcagauggccuaccgguucaacggcaucggagugacccagaaugugcuguacgagaaccagaagcugaucgccaaccaguucaacagcgccaucggcaagauccaggacagccugagcagcacagcaagcgcccugggaaagcugcaggacguggucaaccagaaugcccaggcacugaacacccuggucaagcagcuguccuccaacuucggcgccaucagcucugugcugaacgauauccugagcagacuggacaaggucgaggccgaggugcagaucgacagacugaucacaggcagacugcagagccuccagacauacgugacccagcagcugaucagagccgccgagauuagagccucugccaaucuggccgccaccaagaugucugagugugugcugggccagagcaagagaguggacuuuugcggcaagggcuaccaccugaugagcuucccucagucugccccucacggcgugguguuucugcacgugacauaugugcccgcucaagagaagaauuucaccaccgcuccagccaucugccacgacggcaaagcccacuuuccuagagaaggcguguucguguccaacggcacccauugguucgugacacagcggaacuucuacgagccccagaucaucaccaccgacaacaccuucgugucuggcaacugcgacgucgugaucggcauugugaacaauaccguguacgacccucugcagcccgagcuggacagcuucaaagaggaacuggacaaguacuuuaagaaccacacaagccccgacguggaccugggcgauaucagcggaaucaaugccagcgucgugaacauccagaaagagaucgaccggcugaacgagguggccaagaaucugaacgagagccugaucgaccugcaagaacuggggaaguacgagcaguacaucaaguggcccugguacaucuggcugggcuuuaucgccggacugauugccaucgugauggucacaaucaugcuguguugcaugaccagcugcuguagcugccugaagggcuguuguagcuguggcagcugcugcaaguucgacgaggacgauucugagcccgugcugaagggcgugaaacugcacuacacaugaggacuagucccuguucccagagcccacuuuuuuuucuuuuuuugaaauaaaauagccugucuuucagaucuaaaaaaaaaaaaaaaaaaaaaaaaaaaaaaaaaaaaaaaaaaaaaaaaaaaaaaaaaaaaaaaaaaaaaaaaaaaaaaaaaaaaaaaaaaaaaaaaaaaa

SEQ ID NO: 25041 - RNA, 4167 nt, Artificial Sequence
  SARS-CoV-2/Wuhan/WIV05/2019__EPI_ISL_402128 spike protein mRNA gc mod (1-1273)(A222V_D614G)
aggagagggcgcuuggcuugcaaggacccugagcugcggcauugaagcacacccaacccaacucgacugaagucagccucacugaaccggaucugagaaucuucucucucugggcuugccagggcucuccgaaccuagcuagcauccucuucaauuccaacuagaaagcuuaccauguucguguuccuggugcugcugccucugguguccagccagugugugaaccugaccaccagaacacagcugccuccagccuacaccaacagcuuuaccagaggcguguacuaccccgacaagguguucagauccagcgugcugcacucuacccaggaccuguuccugccuuucuucagcaacgugaccugguuccacgccauccacguguccggcaccaauggcaccaagagauucgacaaccccgugcugcccuucaacgacgggguguacuuugccagcaccgagaaguccaacaucaucagaggcuggaucuucggcaccacacuggacagcaagacccagagccugcugaucgugaacaacgccaccaacguggucaucaaagugugcgaguuccaguucugcaacgaccccuuccugggcgucuacuaccacaagaacaacaagagcuggauggaaagcgaguuccggguguacagcagcgccaacaacugcaccuucgaguacgugucccagccuuuccugauggaccuggaaggcaagcagggcaacuucaagaaccugcgcgaguucguguuuaagaacaucgacggcuacuucaagaucuacagcaagcacaccccuaucaaccucgugcgggaucugccucagggcuucucugugcuggaaccccugguggaucugcccaucggcaucaacaucacccgguuucagacacugcuggcccugcacagaagcuaccugacaccuggcgauagcagcagcggauggacagcuggugccgccgcuuacuaugugggcuaccugcagccuagaaccuuccugcugaaguacaacgagaacggcaccaucaccgacgccguggauugugcucuggauccucugagcgagacaaagugcacccugaaguccuucaccguggaaaagggcaucuaccagaccagcaacuuccgggugcagcccaccgaauccaucgugcgguuccccaauaucaccaaucugugccccuucggcgagguguucaaugccaccagauucgccucuguguacgccuggaaccggaagcggaucagcaauugcguggccgacuacuccgugcuguacaacuccgccagcuucagcaccuucaagugcuacggcguguccccuaccaagcugaacgaccugugcuucacaaacguguacgccgacagcuucgugauccggggagaugaagugcggcagauugccccuggacagacaggcaagaucgccgacuacaacuacaagcugcccgacgacuucaccggcugugugauugccuggaacagcaacaaccuggacuccaaagucggcggcaacuacaauuaccuguaccggcuguuccggaaguccaaucugaagcccuucgagcgggacaucuccaccgagaucuaucaggccggcagcaccccuuguaacggcguggaaggcuucaacugcuacuucccacugcaguccuacggcuuucagcccacaaauggcgugggcuaucagcccuacagagugguggugcugagcuucgaacugcugcaugccccugccacagugugcggcccuaagaaaagcaccaaucucgugaagaacaaaugcgugaacuucaacuucaacggccugaccggcaccggcgugcugacagagagcaacaagaaguuccugccauuccagcaguuuggccgggauaucgccgauaccacagacgccguuagagauccccagacacuggaaauccuggacaucaccccuugcagcuucggcggagugucugugaucaccccuggcaccaacaccagcaaucagguggcagugcuguaccagggcgugaacuguaccgaagugcccguggccauucacgccgaucagcugacaccuacauggcggguguacuccaccggcagcaauguguuucagaccagagccggcugucugaucggagccgagcacgugaacaauagcuacgagugcgacauccccaucggcgcuggaaucugcgccagcuaccagacacagacaaacagcccucggagagccagaagcguggccagccagagcaucauugccuacacaaugucucugggcgccgagaacagcguggccuacuccaacaacucuaucgcuauccccaccaacuucaccaucagcgugaccacagagauccugccuguguccaugaccaagaccagcguggacugcaccauguacaucugcggcgauuccaccgagugcuccaaccugcugcugcaguacggcagcuucugcacccagcugaauagagcccugacagggaucgccguggaacaggacaagaacacccaagagguguucgcccaagugaagcagaucuacaagaccccuccuaucaaggacuucggcggcuucaauuucagccagauucugcccgauccuagcaagcccagcaagcggagcuucaucgaggaccugcuguucaacaaagugacacuggccgacgccggcuucaucaagcaguauggcgauugucugggcgacauugccgccagggaucugauuugcgcccagaaguuuaacggacugacagugcugccuccucugcugaccgaugagaugaucgcccaguacacaucugcccugcuggccggcacaaucacaagcggcuggacauuuggagcaggcgccgcucugcagauccccuuugcuaugcagauggccuaccgguucaacggcaucggagugacccagaaugugcuguacgagaaccagaagcugaucgccaaccaguucaacagcgccaucggcaagauccaggacagccugagcagcacagcaagcgcccugggaaagcugcaggacguggucaaccagaaugcccaggcacugaacacccuggucaagcagcuguccuccaacuucggcgccaucagcucugugcugaacgauauccugagcagacuggacaaggucgaggccgaggugcagaucgacagacugaucacaggcagacugcagagccuccagacauacgugacccagcagcugaucagagccgccgagauuagagccucugccaaucuggccgccaccaagaugucugagugugugcugggccagagcaagagaguggacuuuugcggcaagggcuaccaccugaugagcuucccucagucugccccucacggcgugguguuucugcacgugacauaugugcccgcucaagagaagaauuucaccaccgcuccagccaucugccacgacggcaaagcccacuuuccuagagaaggcguguucguguccaacggcacccauugguucgugacacagcggaacuucuacgagccccagaucaucaccaccgacaacaccuucgugucuggcaacugcgacgucgugaucggcauugugaacaauaccguguacgacccucugcagcccgagcuggacagcuucaaagaggaacuggacaaguacuuuaagaaccacacaagccccgacguggaccugggcgauaucagcggaaucaaugccagcgucgugaacauccagaaagagaucgaccggcugaacgagguggccaagaaucugaacgagagccugaucgaccugcaagaacuggggaaguacgagcaguacaucaaguggcccugguacaucuggcugggcuuuaucgccggacugauugccaucgugauggucacaaucaugcuguguugcaugaccagcugcuguagcugccugaagggcuguuguagcuguggcagcugcugcaaguucgacgaggacgauucugagcccgugcugaagggcgugaaacugcacuacacaugaggacuagucccuguucccagagcccacuuuuuuuucuuuuuuugaaauaaaauagccugucuuucagaucuaaaaaaaaaaaaaaaaaaaaaaaaaaaaaaaaaaaaaaaaaaaaaaaaaaaaaaaaaaaaaaaaaaaaaaaaaaaaaaaaaaaaaaaaaaaaaaaaaaaa

SEQ ID NO: 25042 - RNA, 4167 nt, Artificial Sequence
  SARS-CoV-2/Wuhan/WIV05/2019__EPI_ISL_402128 spike protein mRNA gc mod (1-1273)(N439K_D614G)
aggagagggcgcuuggcuugcaaggacccugagcugcggcauugaagcacacccaacccaacucgacugaagucagccucacugaaccggaucugagaaucuucucucucugggcuugccagggcucuccgaaccuagcuagcauccucuucaauuccaacuagaaagcuuaccauguucguguuccuggugcugcugccucugguguccagccagugugugaaccugaccaccagaacacagcugccuccagccuacaccaacagcuuuaccagaggcguguacuaccccgacaagguguucagauccagcgugcugcacucuacccaggaccuguuccugccuuucuucagcaacgugaccugguuccacgccauccacguguccggcaccaauggcaccaagagauucgacaaccccgugcugcccuucaacgacgggguguacuuugccagcaccgagaaguccaacaucaucagaggcuggaucuucggcaccacacuggacagcaagacccagagccugcugaucgugaacaacgccaccaacguggucaucaaagugugcgaguuccaguucugcaacgaccccuuccugggcgucuacuaccacaagaacaacaagagcuggauggaaagcgaguuccggguguacagcagcgccaacaacugcaccuucgaguacgugucccagccuuuccugauggaccuggaaggcaagcagggcaacuucaagaaccugcgcgaguucguguuuaagaacaucgacggcuacuucaagaucuacagcaagcacaccccuaucaaccucgugcgggaucugccucagggcuucucugcucuggaaccccugguggaucugcccaucggcaucaacaucacccgguuucagacacugcuggcccugcacagaagcuaccugacaccuggcgauagcagcagcggauggacagcuggugccgccgcuuacuaugugggcuaccugcagccuagaaccuuccugcugaaguacaacgagaacggcaccaucaccgacgccguggauugugcucuggauccucugagcgagacaaagugcacccugaaguccuucaccguggaaaagggcaucuaccagaccagcaacuuccgggugcagcccaccgaauccaucgugcgguuccccaauaucaccaaucugugccccuucggcgagguguucaaugccaccagauucgccucuguguacgccuggaaccggaagcggaucagcaauugcguggccgacuacuccgugcuguacaacuccgccagcuucagcaccuucaagugcuacggcguguccccuaccaagcugaacgaccugugcuucacaaacguguacgccgacagcuucgugauccggggagaugaagugcggcagauugccccuggacagacaggcaagaucgccgacuacaacuacaagcugcccgacgacuucaccggcugugugauugccuggaacagcaagaaccuggacuccaaagucggcggcaacuacaauuaccuguaccggcuguuccggaaguccaaucugaagcccuucgagcgggacaucuccaccgagaucuaucaggccggcagcaccccuuguaacggcguggaaggcuucaacugcuacuucccacugcaguccuacggcuuucagcccacaaauggcgugggcuaucagcccuacagagugguggugcugagcuucgaacugcugcaugccccugccacagugugcggcccuaagaaaagcaccaaucucgugaagaacaaaugcgugaacuucaacuucaacggccugaccggcaccggcgugcugacagagagcaacaagaaguuccugccauuccagcaguuuggccgggauaucgccgauaccacagacgccguuagagauccccagacacuggaaauccuggacaucaccccuugcagcuucggcggagugucugugaucaccccuggcaccaacaccagcaaucagguggcagugcuguaccagggcgugaacuguaccgaagugcccguggccauucacgccgaucagcugacaccuacauggcggguguacuccaccggcagcaauguguuucagaccagagccggcugucugaucggagccgagcacgugaacaauagcuacgagugcgacauccccaucggcgcuggaaucugcgccagcuaccagacacagacaaacagcccucggagagccagaagcguggccagccagagcaucauugccuacacaaugucucugggcgccgagaacagcguggccuacuccaacaacucuaucgcuauccccaccaacuucaccaucagcgugaccacagagauccugccuguguccaugaccaagaccagcguggacugcaccauguacaucugcggcgauuccaccgagugcuccaaccugcugcugcaguacggcagcuucugcacccagcugaauagagcccugacagggaucgccguggaacaggacaagaacacccaagagguguucgcccaagugaagcagaucuacaagaccccuccuaucaaggacuucggcggcuucaauuucagccagauucugcccgauccuagcaagcccagcaagcggagcuucaucgaggaccugcuguucaacaaagugacacuggccgacgccggcuucaucaagcaguauggcgauugucugggcgacauugccgccagggaucugauuugcgcccagaaguuuaacggacugacagugcugccuccucugcugaccgaugagaugaucgcccaguacacaucugcccugcuggccggcacaaucacaagcggcuggacauuuggagcaggcgccgcucugcagauccccuuugcuaugcagauggccuaccgguucaacggcaucggagugacccagaaugugcuguacgagaaccagaagcugaucgccaaccaguucaacagcgccaucggcaagauccaggacagccugagcagcacagcaagcgcccugggaaagcugcaggacguggucaaccagaaugcccaggcacugaacacccuggucaagcagcuguccuccaacuucggcgccaucagcucugugcugaacgauauccugagcagacuggacaaggucgaggccgaggugcagaucgacagacugaucacaggcagacugcagagccuccagacauacgugacccagcagcugaucagagccgccgagauuagagccucugccaaucuggccgccaccaagaugucugagugugugcugggccagagcaagagaguggacuuuugcggcaagggcuaccaccugaugagcuucccucagucugccccucacggcgugguguuucugcacgugacauaugugcccgcucaagagaagaauuucaccaccgcuccagccaucugccacgacggcaaagcccacuuuccuagagaaggcguguucguguccaacggcacccauugguucgugacacagcggaacuucuacgagccccagaucaucaccaccgacaacaccuucgugucuggcaacugcgacgucgugaucggcauugugaacaauaccguguacgacccucugcagcccgagcuggacagcuucaaagaggaacuggacaaguacuuuaagaaccacacaagccccgacguggaccugggcgauaucagcggaaucaaugccagcgucgugaacauccagaaagagaucgaccggcugaacgagguggccaagaaucugaacgagagccugaucgaccugcaagaacuggggaaguacgagcaguacaucaaguggcccugguacaucuggcugggcuuuaucgccggacugauugccaucgugauggucacaaucaugcuguguugcaugaccagcugcuguagcugccugaagggcuguuguagcuguggcagcugcugcaaguucgacgaggacgauucugagcccgugcugaagggcgugaaacugcacuacacaugaggacuagucccuguucccagagcccacuuuuuuuucuuuuuuugaaauaaaauagccugucuuucagaucuaaaaaaaaaaaaaaaaaaaaaaaaaaaaaaaaaaaaaaaaaaaaaaaaaaaaaaaaaaaaaaaaaaaaaaaaaaaaaaaaaaaaaaaaaaaaaaaaaaaa

SEQ ID NO: 25043 - RNA, 4167 nt, Artificial Sequence
  SARS-CoV-2/Wuhan/WIV05/2019__EPI_ISL_402128 spike protein mRNA gc mod (1-1273)(S477N_D614G)
aggagagggcgcuuggcuugcaaggacccugagcugcggcauugaagcacacccaacccaacucgacugaagucagccucacugaaccggaucugagaaucuucucucucugggcuugccagggcucuccgaaccuagcuagcauccucuucaauuccaacuagaaagcuuaccauguucguguuccuggugcugcugccucugguguccagccagugugugaaccugaccaccagaacacagcugccuccagccuacaccaacagcuuuaccagaggcguguacuaccccgacaagguguucagauccagcgugcugcacucuacccaggaccuguuccugccuuucuucagcaacgugaccugguuccacgccauccacguguccggcaccaauggcaccaagagauucgacaaccccgugcugcccuucaacgacgggguguacuuugccagcaccgagaaguccaacaucaucagaggcuggaucuucggcaccacacuggacagcaagacccagagccugcugaucgugaacaacgccaccaacguggucaucaaagugugcgaguuccaguucugcaacgaccccuuccugggcgucuacuaccacaagaacaacaagagcuggauggaaagcgaguuccggguguacagcagcgccaacaacugcaccuucgaguacgugucccagccuuuccugauggaccuggaaggcaagcagggcaacuucaagaaccugcgcgaguucguguuuaagaacaucgacggcuacuucaagaucuacagcaagcacaccccuaucaaccucgugcgggaucugccucagggcuucucugcucuggaaccccugguggaucugcccaucggcaucaacaucacccgguuucagacacugcuggcccugcacagaagcuaccugacaccuggcgauagcagcagcggauggacagcuggugccgccgcuuacuaugugggcuaccugcagccuagaaccuuccugcugaaguacaacgagaacggcaccaucaccgacgccguggauugugcucuggauccucugagcgagacaaagugcacccugaaguccuucaccguggaaaagggcaucuaccagaccagcaacuuccgggugcagcccaccgaauccaucgugcgguuccccaauaucaccaaucugugccccuucggcgagguguucaaugccaccagauucgccucuguguacgccuggaaccggaagcggaucagcaauugcguggccgacuacuccgugcuguacaacuccgccagcuucagcaccuucaagugcuacggcguguccccuaccaagcugaacgaccugugcuucacaaacguguacgccgacagcuucgugauccggggagaugaagugcggcagauugccccuggacagacaggcaagaucgccgacuacaacuacaagcugcccgacgacuucaccggcugugugauugccuggaacagcaacaaccuggacuccaaagucggcggcaacuacaauuaccuguaccggcuguuccggaaguccaaucugaagcccuucgagcgggacaucuccaccgagaucuaucaggccggcaacaccccuuguaacggcguggaaggcuucaacugcuacuucccacugcaguccuacggcuuucagcccacaaauggcgugggcuaucagcccuacagagugguggugcugagcuucgaacugcugcaugccccugccacagugugcggcccuaagaaaagcaccaaucucgugaagaacaaaugcgugaacuucaacuucaacggccugaccggcaccggcgugcugacagagagcaacaagaaguuccugccauuccagcaguuuggccgggauaucgccgauaccacagacgccguuagagauccccagacacuggaaauccuggacaucaccccuugcagcuucggcggagugucugugaucaccccuggcaccaacaccagcaaucagguggcagugcuguaccagggcgugaacuguaccgaagugcccguggccauucacgccgaucagcugacaccuacauggcggguguacuccaccggcagcaauguguuucagaccagagccggcugucugaucggagccgagcacgugaacaauagcuacgagugcgacauccccaucggcgcuggaaucugcgccagcuaccagacacagacaaacagcccucggagagccagaagcguggccagccagagcaucauugccuacacaaugucucugggcgccgagaacagcguggccuacuccaacaacucuaucgcuauccccaccaacuucaccaucagcgugaccacagagauccugccuguguccaugaccaagaccagcguggacugcaccauguacaucugcggcgauuccaccgagugcuccaaccugcugcugcaguacggcagcuucugcacccagcugaauagagcccugacagggaucgccguggaacaggacaagaacacccaagagguguucgcccaagugaagcagaucuacaagaccccuccuaucaaggacuucggcggcuucaauuucagccagauucugcccgauccuagcaagcccagcaagcggagcuucaucgaggaccugcuguucaacaaagugacacuggccgacgccggcuucaucaagcaguauggcgauugucugggcgacauugccgccagggaucugauuugcgcccagaaguuuaacggacugacagugcugccuccucugcugaccgaugagaugaucgcccaguacacaucugcccugcuggccggcacaaucacaagcggcuggacauuuggagcaggcgccgcucugcagauccccuuugcuaugcagauggccuaccgguucaacggcaucggagugacccagaaugugcuguacgagaaccagaagcugaucgccaaccaguucaacagcgccaucggcaagauccaggacagccugagcagcacagcaagcgcccugggaaagcugcaggacguggucaaccagaaugcccaggcacugaacacccuggucaagcagcuguccuccaacuucggcgccaucagcucugugcugaacgauauccugagcagacuggacaaggucgaggccgaggugcagaucgacagacugaucacaggcagacugcagagccuccagacauacgugacccagcagcugaucagagccgccgagauuagagccucugccaaucuggccgccaccaagaugucugagugugugcugggccagagcaagagaguggacuuuugcggcaagggcuaccaccugaugagcuucccucagucugccccucacggcgugguguuucugcacgugacauaugugcccgcucaagagaagaauuucaccaccgcuccagccaucugccacgacggcaaagcccacuuuccuagagaaggcguguucguguccaacggcacccauugguucgugacacagcggaacuucuacgagccccagaucaucaccaccgacaacaccuucgugucuggcaacugcgacgucgugaucggcauugugaacaauaccguguacgacccucugcagcccgagcuggacagcuucaaagaggaacuggacaaguacuuuaagaaccacacaagccccgacguggaccugggcgauaucagcggaaucaaugccagcgucgugaacauccagaaagagaucgaccggcugaacgagguggccaagaaucugaacgagagccugaucgaccugcaagaacuggggaaguacgagcaguacaucaaguggcccugguacaucuggcugggcuuuaucgccggacugauugccaucgugauggucacaaucaugcuguguugcaugaccagcugcuguagcugccugaagggcuguuguagcuguggcagcugcugcaaguucgacgaggacgauucugagcccgugcugaagggcgugaaacugcacuacacaugaggacuagucccuguucccagagcccacuuuuuuuucuuuuuuugaaauaaaauagccugucuuucagaucuaaaaaaaaaaaaaaaaaaaaaaaaaaaaaaaaaaaaaaaaaaaaaaaaaaaaaaaaaaaaaaaaaaaaaaaaaaaaaaaaaaaaaaaaaaaaaaaaaaaa

SEQ ID NO: 25044 - RNA, 4167 nt, Artificial Sequence
  SARS-CoV-2/Wuhan/WIV05/2019__EPI_ISL_402128 spike protein mRNA gc mod (1-1273)(N501Y_D614G)
aggagagggcgcuuggcuugcaaggacccugagcugcggcauugaagcacacccaacccaacucgacugaagucagccucacugaaccggaucugagaaucuucucucucugggcuugccagggcucuccgaaccuagcuagcauccucuucaauuccaacuagaaagcuuaccauguucguguuccuggugcugcugccucugguguccagccagugugugaaccugaccaccagaacacagcugccuccagccuacaccaacagcuuuaccagaggcguguacuaccccgacaagguguucagauccagcgugcugcacucuacccaggaccuguuccugccuuucuucagcaacgugaccugguuccacgccauccacguguccggcaccaauggcaccaagagauucgacaaccccgugcugcccuucaacgacgggguguacuuugccagcaccgagaaguccaacaucaucagaggcuggaucuucggcaccacacuggacagcaagacccagagccugcugaucgugaacaacgccaccaacguggucaucaaagugugcgaguuccaguucugcaacgaccccuuccugggcgucuacuaccacaagaacaacaagagcuggauggaaagcgaguuccggguguacagcagcgccaacaacugcaccuucgaguacgugucccagccuuuccugauggaccuggaaggcaagcagggcaacuucaagaaccugcgcgaguucguguuuaagaacaucgacggcuacuucaagaucuacagcaagcacaccccuaucaaccucgugcgggaucugccucagggcuucucugcucuggaaccccugguggaucugcccaucggcaucaacaucacccgguuucagacacugcuggcccugcacagaagcuaccugacaccuggcgauagcagcagcggauggacagcuggugccgccgcuuacuaugugggcuaccugcagccuagaaccuuccugcugaaguacaacgagaacggcaccaucaccgacgccguggauugugcucuggauccucugagcgagacaaagugcacccugaaguccuucaccguggaaaagggcaucuaccagaccagcaacuuccgggugcagcccaccgaauccaucgugcgguuccccaauaucaccaaucugugccccuucggcgagguguucaaugccaccagauucgccucuguguacgccuggaaccggaagcggaucagcaauugcguggccgacuacuccgugcuguacaacuccgccagcuucagcaccuucaagugcuacggcguguccccuaccaagcugaacgaccugugcuucacaaacguguacgccgacagcuucgugauccggggagaugaagugcggcagauugccccuggacagacaggcaagaucgccgacuacaacuacaagcugcccgacgacuucaccggcugugugauugccuggaacagcaacaaccuggacuccaaagucggcggcaacuacaauuaccuguaccggcuguuccggaaguccaaucugaagcccuucgagcgggacaucuccaccgagaucuaucaggccggcagcaccccuuguaacggcguggaaggcuucaacugcuacuucccacugcaguccuacggcuuucagcccacauacggcgugggcuaucagcccuacagagugguggugcugagcuucgaacugcugcaugccccugccacagugugcggcccuaagaaaagcaccaaucucgugaagaacaaaugcgugaacuucaacuucaacggccugaccggcaccggcgugcugacagagagcaacaagaaguuccugccauuccagcaguuuggccgggauaucgccgauaccacagacgccguuagagauccccagacacuggaaauccuggacaucaccccuugcagcuucggcggagugucugugaucaccccuggcaccaacaccagcaaucagguggcagugcuguaccagggcgugaacuguaccgaagugcccguggccauucacgccgaucagcugacaccuacauggcggguguacuccaccggcagcaauguguuucagaccagagccggcugucugaucggagccgagcacgugaacaauagcuacgagugcgacauccccaucggcgcuggaaucugcgccagcuaccagacacagacaaacagcccucggagagccagaagcguggccagccagagcaucauugccuacacaaugucucugggcgccgagaacagcguggccuacuccaacaacucuaucgcuauccccaccaacuucaccaucagcgugaccacagagauccugccuguguccaugaccaagaccagcguggacugcaccauguacaucugcggcgauuccaccgagugcuccaaccugcugcugcaguacggcagcuucugcacccagcugaauagagcccugacagggaucgccguggaacaggacaagaacacccaagagguguucgcccaagugaagcagaucuacaagaccccuccuaucaaggacuucggcggcuucaauuucagccagauucugcccgauccuagcaagcccagcaagcggagcuucaucgaggaccugcuguucaacaaagugacacuggccgacgccggcuucaucaagcaguauggcgauugucugggcgacauugccgccagggaucugauuugcgcccagaaguuuaacggacugacagugcugccuccucugcugaccgaugagaugaucgcccaguacacaucugcccugcuggccggcacaaucacaagcggcuggacauuuggagcaggcgccgcucugcagauccccuuugcuaugcagauggccuaccgguucaacggcaucggagugacccagaaugugcuguacgagaaccagaagcugaucgccaaccaguucaacagcgccaucggcaagauccaggacagccugagcagcacagcaagcgcccugggaaagcugcaggacguggucaaccagaaugcccaggcacugaacacccuggucaagcagcuguccuccaacuucggcgccaucagcucugugcugaacgauauccugagcagacuggacaaggucgaggccgaggugcagaucgacagacugaucacaggcagacugcagagccuccagacauacgugacccagcagcugaucagagccgccgagauuagagccucugccaaucuggccgccaccaagaugucugagugugugcugggccagagcaagagaguggacuuuugcggcaagggcuaccaccugaugagcuucccucagucugccccucacggcgugguguuucugcacgugacauaugugcccgcucaagagaagaauuucaccaccgcuccagccaucugccacgacggcaaagcccacuuuccuagagaaggcguguucguguccaacggcacccauugguucgugacacagcggaacuucuacgagccccagaucaucaccaccgacaacaccuucgugucuggcaacugcgacgucgugaucggcauugugaacaauaccguguacgacccucugcagcccgagcuggacagcuucaaagaggaacuggacaaguacuuuaagaaccacacaagccccgacguggaccugggcgauaucagcggaaucaaugccagcgucgugaacauccagaaagagaucgaccggcugaacgagguggccaagaaucugaacgagagccugaucgaccugcaagaacuggggaaguacgagcaguacaucaaguggcccugguacaucuggcugggcuuuaucgccggacugauugccaucgugauggucacaaucaugcuguguugcaugaccagcugcuguagcugccugaagggcuguuguagcuguggcagcugcugcaaguucgacgaggacgauucugagcccgugcugaagggcgugaaacugcacuacacaugaggacuagucccuguucccagagcccacuuuuuuuucuuuuuuugaaauaaaauagccugucuuucagaucuaaaaaaaaaaaaaaaaaaaaaaaaaaaaaaaaaaaaaaaaaaaaaaaaaaaaaaaaaaaaaaaaaaaaaaaaaaaaaaaaaaaaaaaaaaaaaaaaaaaa

SEQ ID NO: 25045 - RNA, 4161 nt, Artificial Sequence
  SARS-CoV-2/Wuhan/WIV05/2019__EPI_ISL_402128 spike protein mRNA gc mod (1-1273)(H69del_V70del_D614G)
aggagagggcgcuuggcuugcaaggacccugagcugcggcauugaagcacacccaacccaacucgacugaagucagccucacugaaccggaucugagaaucuucucucucugggcuugccagggcucuccgaaccuagcuagcauccucuucaauuccaacuagaaagcuuaccauguucguguuccuggugcugcugccucugguguccagccagugugugaaccugaccaccagaacacagcugccuccagccuacaccaacagcuuuaccagaggcguguacuaccccgacaagguguucagauccagcgugcugcacucuacccaggaccuguuccugccuuucuucagcaacgugaccugguuccacgccaucuccggcaccaauggcaccaagagauucgacaaccccgugcugcccuucaacgacgggguguacuuugccagcaccgagaaguccaacaucaucagaggcuggaucuucggcaccacacuggacagcaagacccagagccugcugaucgugaacaacgccaccaacguggucaucaaagugugcgaguuccaguucugcaacgaccccuuccugggcgucuacuaccacaagaacaacaagagcuggauggaaagcgaguuccggguguacagcagcgccaacaacugcaccuucgaguacgugucccagccuuuccugauggaccuggaaggcaagcagggcaacuucaagaaccugcgcgaguucguguuuaagaacaucgacggcuacuucaagaucuacagcaagcacaccccuaucaaccucgugcgggaucugccucagggcuucucugcucuggaaccccugguggaucugcccaucggcaucaacaucacccgguuucagacacugcuggcccugcacagaagcuaccugacaccuggcgauagcagcagcggauggacagcuggugccgccgcuuacuaugugggcuaccugcagccuagaaccuuccugcugaaguacaacgagaacggcaccaucaccgacgccguggauugugcucuggauccucugagcgagacaaagugcacccugaaguccuucaccguggaaaagggcaucuaccagaccagcaacuuccgggugcagcccaccgaauccaucgugcgguuccccaauaucaccaaucugugccccuucggcgagguguucaaugccaccagauucgccucuguguacgccuggaaccggaagcggaucagcaauugcguggccgacuacuccgugcuguacaacuccgccagcuucagcaccuucaagugcuacggcguguccccuaccaagcugaacgaccugugcuucacaaacguguacgccgacagcuucgugauccggggagaugaagugcggcagauugccccuggacagacaggcaagaucgccgacuacaacuacaagcugcccgacgacuucaccggcugugugauugccuggaacagcaacaaccuggacuccaaagucggcggcaacuacaauuaccuguaccggcuguuccggaaguccaaucugaagcccuucgagcgggacaucuccaccgagaucuaucaggccggcagcaccccuuguaacggcguggaaggcuucaacugcuacuucccacugcaguccuacggcuuucagcccacaaauggcgugggcuaucagcccuacagagugguggugcugagcuucgaacugcugcaugccccugccacagugugcggcccuaagaaaagcaccaaucucgugaagaacaaaugcgugaacuucaacuucaacggccugaccggcaccggcgugcugacagagagcaacaagaaguuccugccauuccagcaguuuggccgggauaucgccgauaccacagacgccguuagagauccccagacacuggaaauccuggacaucaccccuugcagcuucggcggagugucugugaucaccccuggcaccaacaccagcaaucagguggcagugcuguaccagggcgugaacuguaccgaagugcccguggccauucacgccgaucagcugacaccuacauggcggguguacuccaccggcagcaauguguuucagaccagagccggcugucugaucggagccgagcacgugaacaauagcuacgagugcgacauccccaucggcgcuggaaucugcgccagcuaccagacacagacaaacagcccucggagagccagaagcguggccagccagagcaucauugccuacacaaugucucugggcgccgagaacagcguggccuacuccaacaacucuaucgcuauccccaccaacuucaccaucagcgugaccacagagauccugccuguguccaugaccaagaccagcguggacugcaccauguacaucugcggcgauuccaccgagugcuccaaccugcugcugcaguacggcagcuucugcacccagcugaauagagcccugacagggaucgccguggaacaggacaagaacacccaagagguguucgcccaagugaagcagaucuacaagaccccuccuaucaaggacuucggcggcuucaauuucagccagauucugcccgauccuagcaagcccagcaagcggagcuucaucgaggaccugcuguucaacaaagugacacuggccgacgccggcuucaucaagcaguauggcgauugucugggcgacauugccgccagggaucugauuugcgcccagaaguuuaacggacugacagugcugccuccucugcugaccgaugagaugaucgcccaguacacaucugcccugcuggccggcacaaucacaagcggcuggacauuuggagcaggcgccgcucugcagauccccuuugcuaugcagauggccuaccgguucaacggcaucggagugacccagaaugugcuguacgagaaccagaagcugaucgccaaccaguucaacagcgccaucggcaagauccaggacagccugagcagcacagcaagcgcccugggaaagcugcaggacguggucaaccagaaugcccaggcacugaacacccuggucaagcagcuguccuccaacuucggcgccaucagcucugugcugaacgauauccugagcagacuggacaaggucgaggccgaggugcagaucgacagacugaucacaggcagacugcagagccuccagacauacgugacccagcagcugaucagagccgccgagauuagagccucugccaaucuggccgccaccaagaugucugagugugugcugggccagagcaagagaguggacuuuugcggcaagggcuaccaccugaugagcuucccucagucugccccucacggcgugguguuucugcacgugacauaugugcccgcucaagagaagaauuucaccaccgcuccagccaucugccacgacggcaaagcccacuuuccuagagaaggcguguucguguccaacggcacccauugguucgugacacagcggaacuucuacgagccccagaucaucaccaccgacaacaccuucgugucuggcaacugcgacgucgugaucggcauugugaacaauaccguguacgacccucugcagcccgagcuggacagcuucaaagaggaacuggacaaguacuuuaagaaccacacaagccccgacguggaccugggcgauaucagcggaaucaaugccagcgucgugaacauccagaaagagaucgaccggcugaacgagguggccaagaaucugaacgagagccugaucgaccugcaagaacuggggaaguacgagcaguacaucaaguggcccugguacaucuggcugggcuuuaucgccggacugauugccaucgugauggucacaaucaugcuguguugcaugaccagcugcuguagcugccugaagggcuguuguagcuguggcagcugcugcaaguucgacgaggacgauucugagcccgugcugaagggcgugaaacugcacuacacaugaggacuagucccuguucccagagcccacuuuuuuuucuuuuuuugaaauaaaauagccugucuuucagaucuaaaaaaaaaaaaaaaaaaaaaaaaaaaaaaaaaaaaaaaaaaaaaaaaaaaaaaaaaaaaaaaaaaaaaaaaaaaaaaaaaaaaaaaaaaaaaaaaaaaa

SEQ ID NO: 25046 - RNA, 4167 nt, Artificial Sequence
  SARS-CoV-2/Wuhan/WIV05/2019__EPI_ISL_402128 spike protein mRNA gc mod (1-1273)(Y453F_D614G)
aggagagggcgcuuggcuugcaaggacccugagcugcggcauugaagcacacccaacccaacucgacugaagucagccucacugaaccggaucugagaaucuucucucucugggcuugccagggcucuccgaaccuagcuagcauccucuucaauuccaacuagaaagcuuaccauguucguguuccuggugcugcugccucugguguccagccagugugugaaccugaccaccagaacacagcugccuccagccuacaccaacagcuuuaccagaggcguguacuaccccgacaagguguucagauccagcgugcugcacucuacccaggaccuguuccugccuuucuucagcaacgugaccugguuccacgccauccacguguccggcaccaauggcaccaagagauucgacaaccccgugcugcccuucaacgacgggguguacuuugccagcaccgagaaguccaacaucaucagaggcuggaucuucggcaccacacuggacagcaagacccagagccugcugaucgugaacaacgccaccaacguggucaucaaagugugcgaguuccaguucugcaacgaccccuuccugggcgucuacuaccacaagaacaacaagagcuggauggaaagcgaguuccggguguacagcagcgccaacaacugcaccuucgaguacgugucccagccuuuccugauggaccuggaaggcaagcagggcaacuucaagaaccugcgcgaguucguguuuaagaacaucgacggcuacuucaagaucuacagcaagcacaccccuaucaaccucgugcgggaucugccucagggcuucucugcucuggaaccccugguggaucugcccaucggcaucaacaucacccgguuucagacacugcuggcccugcacagaagcuaccugacaccuggcgauagcagcagcggauggacagcuggugccgccgcuuacuaugugggcuaccugcagccuagaaccuuccugcugaaguacaacgagaacggcaccaucaccgacgccguggauugugcucuggauccucugagcgagacaaagugcacccugaaguccuucaccguggaaaagggcaucuaccagaccagcaacuuccgggugcagcccaccgaauccaucgugcgguuccccaauaucaccaaucugugccccuucggcgagguguucaaugccaccagauucgccucuguguacgccuggaaccggaagcggaucagcaauugcguggccgacuacuccgugcuguacaacuccgccagcuucagcaccuucaagugcuacggcguguccccuaccaagcugaacgaccugugcuucacaaacguguacgccgacagcuucgugauccggggagaugaagugcggcagauugccccuggacagacaggcaagaucgccgacuacaacuacaagcugcccgacgacuucaccggcugugugauugccuggaacagcaacaaccuggacuccaaagucggcggcaacuacaauuaccuguuccggcuguuccggaaguccaaucugaagcccuucgagcgggacaucuccaccgagaucuaucaggccggcagcaccccuuguaacggcguggaaggcuucaacugcuacuucccacugcaguccuacggcuuucagcccacaaauggcgugggcuaucagcccuacagagugguggugcugagcuucgaacugcugcaugccccugccacagugugcggcccuaagaaaagcaccaaucucgugaagaacaaaugcgugaacuucaacuucaacggccugaccggcaccggcgugcugacagagagcaacaagaaguuccugccauuccagcaguuuggccgggauaucgccgauaccacagacgccguuagagauccccagacacuggaaauccuggacaucaccccuugcagcuucggcggagugucugugaucaccccuggcaccaacaccagcaaucagguggcagugcuguaccagggcgugaacuguaccgaagugcccguggccauucacgccgaucagcugacaccuacauggcggguguacuccaccggcagcaauguguuucagaccagagccggcugucugaucggagccgagcacgugaacaauagcuacgagugcgacauccccaucggcgcuggaaucugcgccagcuaccagacacagacaaacagcccucggagagccagaagcguggccagccagagcaucauugccuacacaaugucucugggcgccgagaacagcguggccuacuccaacaacucuaucgcuauccccaccaacuucaccaucagcgugaccacagagauccugccuguguccaugaccaagaccagcguggacugcaccauguacaucugcggcgauuccaccgagugcuccaaccugcugcugcaguacggcagcuucugcacccagcugaauagagcccugacagggaucgccguggaacaggacaagaacacccaagagguguucgcccaagugaagcagaucuacaagaccccuccuaucaaggacuucggcggcuucaauuucagccagauucugcccgauccuagcaagcccagcaagcggagcuucaucgaggaccugcuguucaacaaagugacacuggccgacgccggcuucaucaagcaguauggcgauugucugggcgacauugccgccagggaucugauuugcgcccagaaguuuaacggacugacagugcugccuccucugcugaccgaugagaugaucgcccaguacacaucugcccugcuggccggcacaaucacaagcggcuggacauuuggagcaggcgccgcucugcagauccccuuugcuaugcagauggccuaccgguucaacggcaucggagugacccagaaugugcuguacgagaaccagaagcugaucgccaaccaguucaacagcgccaucggcaagauccaggacagccugagcagcacagcaagcgcccugggaaagcugcaggacguggucaaccagaaugcccaggcacugaacacccuggucaagcagcuguccuccaacuucggcgccaucagcucugugcugaacgauauccugagcagacuggacaaggucgaggccgaggugcagaucgacagacugaucacaggcagacugcagagccuccagacauacgugacccagcagcugaucagagccgccgagauuagagccucugccaaucuggccgccaccaagaugucugagugugugcugggccagagcaagagaguggacuuuugcggcaagggcuaccaccugaugagcuucccucagucugccccucacggcgugguguuucugcacgugacauaugugcccgcucaagagaagaauuucaccaccgcuccagccaucugccacgacggcaaagcccacuuuccuagagaaggcguguucguguccaacggcacccauugguucgugacacagcggaacuucuacgagccccagaucaucaccaccgacaacaccuucgugucuggcaacugcgacgucgugaucggcauugugaacaauaccguguacgacccucugcagcccgagcuggacagcuucaaagaggaacuggacaaguacuuuaagaaccacacaagccccgacguggaccugggcgauaucagcggaaucaaugccagcgucgugaacauccagaaagagaucgaccggcugaacgagguggccaagaaucugaacgagagccugaucgaccugcaagaacuggggaaguacgagcaguacaucaaguggcccugguacaucuggcugggcuuuaucgccggacugauugccaucgugauggucacaaucaugcuguguugcaugaccagcugcuguagcugccugaagggcuguuguagcuguggcagcugcugcaaguucgacgaggacgauucugagcccgugcugaagggcgugaaacugcacuacacaugaggacuagucccuguucccagagcccacuuuuuuuucuuuuuuugaaauaaaauagccugucuuucagaucuaaaaaaaaaaaaaaaaaaaaaaaaaaaaaaaaaaaaaaaaaaaaaaaaaaaaaaaaaaaaaaaaaaaaaaaaaaaaaaaaaaaaaaaaaaaaaaaaaaaa

SEQ ID NO: 25047 - RNA, 4167 nt, Artificial Sequence
  SARS-CoV-2/Wuhan/WIV05/2019__EPI_ISL_402128 spike protein mRNA gc mod (1-1273)(D614G_I692V)
aggagagggcgcuuggcuugcaaggacccugagcugcggcauugaagcacacccaacccaacucgacugaagucagccucacugaaccggaucugagaaucuucucucucugggcuugccagggcucuccgaaccuagcuagcauccucuucaauuccaacuagaaagcuuaccauguucguguuccuggugcugcugccucugguguccagccagugugugaaccugaccaccagaacacagcugccuccagccuacaccaacagcuuuaccagaggcguguacuaccccgacaagguguucagauccagcgugcugcacucuacccaggaccuguuccugccuuucuucagcaacgugaccugguuccacgccauccacguguccggcaccaauggcaccaagagauucgacaaccccgugcugcccuucaacgacgggguguacuuugccagcaccgagaaguccaacaucaucagaggcuggaucuucggcaccacacuggacagcaagacccagagccugcugaucgugaacaacgccaccaacguggucaucaaagugugcgaguuccaguucugcaacgaccccuuccugggcgucuacuaccacaagaacaacaagagcuggauggaaagcgaguuccggguguacagcagcgccaacaacugcaccuucgaguacgugucccagccuuuccugauggaccuggaaggcaagcagggcaacuucaagaaccugcgcgaguucguguuuaagaacaucgacggcuacuucaagaucuacagcaagcacaccccuaucaaccucgugcgggaucugccucagggcuucucugcucuggaaccccugguggaucugcccaucggcaucaacaucacccgguuucagacacugcuggcccugcacagaagcuaccugacaccuggcgauagcagcagcggauggacagcuggugccgccgcuuacuaugugggcuaccugcagccuagaaccuuccugcugaaguacaacgagaacggcaccaucaccgacgccguggauugugcucuggauccucugagcgagacaaagugcacccugaaguccuucaccguggaaaagggcaucuaccagaccagcaacuuccgggugcagcccaccgaauccaucgugcgguuccccaauaucaccaaucugugccccuucggcgagguguucaaugccaccagauucgccucuguguacgccuggaaccggaagcggaucagcaauugcguggccgacuacuccgugcuguacaacuccgccagcuucagcaccuucaagugcuacggcguguccccuaccaagcugaacgaccugugcuucacaaacguguacgccgacagcuucgugauccggggagaugaagugcggcagauugccccuggacagacaggcaagaucgccgacuacaacuacaagcugcccgacgacuucaccggcugugugauugccuggaacagcaacaaccuggacuccaaagucggcggcaacuacaauuaccuguaccggcuguuccggaaguccaaucugaagcccuucgagcgggacaucuccaccgagaucuaucaggccggcagcaccccuuguaacggcguggaaggcuucaacugcuacuucccacugcaguccuacggcuuucagcccacaaauggcgugggcuaucagcccuacagagugguggugcugagcuucgaacugcugcaugccccugccacagugugcggcccuaagaaaagcaccaaucucgugaagaacaaaugcgugaacuucaacuucaacggccugaccggcaccggcgugcugacagagagcaacaagaaguuccugccauuccagcaguuuggccgggauaucgccgauaccacagacgccguuagagauccccagacacuggaaauccuggacaucaccccuugcagcuucggcggagugucugugaucaccccuggcaccaacaccagcaaucagguggcagugcuguaccagggcgugaacuguaccgaagugcccguggccauucacgccgaucagcugacaccuacauggcggguguacuccaccggcagcaauguguuucagaccagagccggcugucugaucggagccgagcacgugaacaauagcuacgagugcgacauccccaucggcgcuggaaucugcgccagcuaccagacacagacaaacagcccucggagagccagaagcguggccagccagagcgugauugccuacacaaugucucugggcgccgagaacagcguggccuacuccaacaacucuaucgcuauccccaccaacuucaccaucagcgugaccacagagauccugccuguguccaugaccaagaccagcguggacugcaccauguacaucugcggcgauuccaccgagugcuccaaccugcugcugcaguacggcagcuucugcacccagcugaauagagcccugacagggaucgccguggaacaggacaagaacacccaagagguguucgcccaagugaagcagaucuacaagaccccuccuaucaaggacuucggcggcuucaauuucagccagauucugcccgauccuagcaagcccagcaagcggagcuucaucgaggaccugcuguucaacaaagugacacuggccgacgccggcuucaucaagcaguauggcgauugucugggcgacauugccgccagggaucugauuugcgcccagaaguuuaacggacugacagugcugccuccucugcugaccgaugagaugaucgcccaguacacaucugcccugcuggccggcacaaucacaagcggcuggacauuuggagcaggcgccgcucugcagauccccuuugcuaugcagauggccuaccgguucaacggcaucggagugacccagaaugugcuguacgagaaccagaagcugaucgccaaccaguucaacagcgccaucggcaagauccaggacagccugagcagcacagcaagcgcccugggaaagcugcaggacguggucaaccagaaugcccaggcacugaacacccuggucaagcagcuguccuccaacuucggcgccaucagcucugugcugaacgauauccugagcagacuggacaaggucgaggccgaggugcagaucgacagacugaucacaggcagacugcagagccuccagacauacgugacccagcagcugaucagagccgccgagauuagagccucugccaaucuggccgccaccaagaugucugagugugugcugggccagagcaagagaguggacuuuugcggcaagggcuaccaccugaugagcuucccucagucugccccucacggcgugguguuucugcacgugacauaugugcccgcucaagagaagaauuucaccaccgcuccagccaucugccacgacggcaaagcccacuuuccuagagaaggcguguucguguccaacggcacccauugguucgugacacagcggaacuucuacgagccccagaucaucaccaccgacaacaccuucgugucuggcaacugcgacgucgugaucggcauugugaacaauaccguguacgacccucugcagcccgagcuggacagcuucaaagaggaacuggacaaguacuuuaagaaccacacaagccccgacguggaccugggcgauaucagcggaaucaaugccagcgucgugaacauccagaaagagaucgaccggcugaacgagguggccaagaaucugaacgagagccugaucgaccugcaagaacuggggaaguacgagcaguacaucaaguggcccugguacaucuggcugggcuuuaucgccggacugauugccaucgugauggucacaaucaugcuguguugcaugaccagcugcuguagcugccugaagggcuguuguagcuguggcagcugcugcaaguucgacgaggacgauucugagcccgugcugaagggcgugaaacugcacuacacaugaggacuagucccuguucccagagcccacuuuuuuuucuuuuuuugaaauaaaauagccugucuuucagaucuaaaaaaaaaaaaaaaaaaaaaaaaaaaaaaaaaaaaaaaaaaaaaaaaaaaaaaaaaaaaaaaaaaaaaaaaaaaaaaaaaaaaaaaaaaaaaaaaaaaa

SEQ ID NO: 25048 - RNA, 4167 nt, Artificial Sequence
  SARS-CoV-2/Wuhan/WIV05/2019__EPI_ISL_402128 spike protein mRNA gc mod (1-1273)(D614G_M1229I)
aggagagggcgcuuggcuugcaaggacccugagcugcggcauugaagcacacccaacccaacucgacugaagucagccucacugaaccggaucugagaaucuucucucucugggcuugccagggcucuccgaaccuagcuagcauccucuucaauuccaacuagaaagcuuaccauguucguguuccuggugcugcugccucugguguccagccagugugugaaccugaccaccagaacacagcugccuccagccuacaccaacagcuuuaccagaggcguguacuaccccgacaagguguucagauccagcgugcugcacucuacccaggaccuguuccugccuuucuucagcaacgugaccugguuccacgccauccacguguccggcaccaauggcaccaagagauucgacaaccccgugcugcccuucaacgacgggguguacuuugccagcaccgagaaguccaacaucaucagaggcuggaucuucggcaccacacuggacagcaagacccagagccugcugaucgugaacaacgccaccaacguggucaucaaagugugcgaguuccaguucugcaacgaccccuuccugggcgucuacuaccacaagaacaacaagagcuggauggaaagcgaguuccggguguacagcagcgccaacaacugcaccuucgaguacgugucccagccuuuccugauggaccuggaaggcaagcagggcaacuucaagaaccugcgcgaguucguguuuaagaacaucgacggcuacuucaagaucuacagcaagcacaccccuaucaaccucgugcgggaucugccucagggcuucucugcucuggaaccccugguggaucugcccaucggcaucaacaucacccgguuucagacacugcuggcccugcacagaagcuaccugacaccuggcgauagcagcagcggauggacagcuggugccgccgcuuacuaugugggcuaccugcagccuagaaccuuccugcugaaguacaacgagaacggcaccaucaccgacgccguggauugugcucuggauccucugagcgagacaaagugcacccugaaguccuucaccguggaaaagggcaucuaccagaccagcaacuuccgggugcagcccaccgaauccaucgugcgguuccccaauaucaccaaucugugccccuucggcgagguguucaaugccaccagauucgccucuguguacgccuggaaccggaagcggaucagcaauugcguggccgacuacuccgugcuguacaacuccgccagcuucagcaccuucaagugcuacggcguguccccuaccaagcugaacgaccugugcuucacaaacguguacgccgacagcuucgugauccggggagaugaagugcggcagauugccccuggacagacaggcaagaucgccgacuacaacuacaagcugcccgacgacuucaccggcugugugauugccuggaacagcaacaaccuggacuccaaagucggcggcaacuacaauuaccuguaccggcuguuccggaaguccaaucugaagcccuucgagcgggacaucuccaccgagaucuaucaggccggcagcaccccuuguaacggcguggaaggcuucaacugcuacuucccacugcaguccuacggcuuucagcccacaaauggcgugggcuaucagcccuacagagugguggugcugagcuucgaacugcugcaugccccugccacagugugcggcccuaagaaaagcaccaaucucgugaagaacaaaugcgugaacuucaacuucaacggccugaccggcaccggcgugcugacagagagcaacaagaaguuccugccauuccagcaguuuggccgggauaucgccgauaccacagacgccguuagagauccccagacacuggaaauccuggacaucaccccuugcagcuucggcggagugucugugaucaccccuggcaccaacaccagcaaucagguggcagugcuguaccagggcgugaacuguaccgaagugcccguggccauucacgccgaucagcugacaccuacauggcggguguacuccaccggcagcaauguguuucagaccagagccggcugucugaucggagccgagcacgugaacaauagcuacgagugcgacauccccaucggcgcuggaaucugcgccagcuaccagacacagacaaacagcccucggagagccagaagcguggccagccagagcaucauugccuacacaaugucucugggcgccgagaacagcguggccuacuccaacaacucuaucgcuauccccaccaacuucaccaucagcgugaccacagagauccugccuguguccaugaccaagaccagcguggacugcaccauguacaucugcggcgauuccaccgagugcuccaaccugcugcugcaguacggcagcuucugcacccagcugaauagagcccugacagggaucgccguggaacaggacaagaacacccaagagguguucgcccaagugaagcagaucuacaagaccccuccuaucaaggacuucggcggcuucaauuucagccagauucugcccgauccuagcaagcccagcaagcggagcuucaucgaggaccugcuguucaacaaagugacacuggccgacgccggcuucaucaagcaguauggcgauugucugggcgacauugccgccagggaucugauuugcgcccagaaguuuaacggacugacagugcugccuccucugcugaccgaugagaugaucgcccaguacacaucugcccugcuggccggcacaaucacaagcggcuggacauuuggagcaggcgccgcucugcagauccccuuugcuaugcagauggccuaccgguucaacggcaucggagugacccagaaugugcuguacgagaaccagaagcugaucgccaaccaguucaacagcgccaucggcaagauccaggacagccugagcagcacagcaagcgcccugggaaagcugcaggacguggucaaccagaaugcccaggcacugaacacccuggucaagcagcuguccuccaacuucggcgccaucagcucugugcugaacgauauccugagcagacuggacaaggucgaggccgaggugcagaucgacagacugaucacaggcagacugcagagccuccagacauacgugacccagcagcugaucagagccgccgagauuagagccucugccaaucuggccgccaccaagaugucugagugugugcugggccagagcaagagaguggacuuuugcggcaagggcuaccaccugaugagcuucccucagucugccccucacggcgugguguuucugcacgugacauaugugcccgcucaagagaagaauuucaccaccgcuccagccaucugccacgacggcaaagcccacuuuccuagagaaggcguguucguguccaacggcacccauugguucgugacacagcggaacuucuacgagccccagaucaucaccaccgacaacaccuucgugucuggcaacugcgacgucgugaucggcauugugaacaauaccguguacgacccucugcagcccgagcuggacagcuucaaagaggaacuggacaaguacuuuaagaaccacacaagccccgacguggaccugggcgauaucagcggaaucaaugccagcgucgugaacauccagaaagagaucgaccggcugaacgagguggccaagaaucugaacgagagccugaucgaccugcaagaacuggggaaguacgagcaguacaucaaguggcccugguacaucuggcugggcuuuaucgccggacugauugccaucgugaucgucacaaucaugcuguguugcaugaccagcugcuguagcugccugaagggcuguuguagcuguggcagcugcugcaaguucgacgaggacgauucugagcccgugcugaagggcgugaaacugcacuacacaugaggacuagucccuguucccagagcccacuuuuuuuucuuuuuuugaaauaaaauagccugucuuucagaucuaaaaaaaaaaaaaaaaaaaaaaaaaaaaaaaaaaaaaaaaaaaaaaaaaaaaaaaaaaaaaaaaaaaaaaaaaaaaaaaaaaaaaaaaaaaaaaaaaaaa

SEQ ID NO: 25049 - RNA, 4161 nt, Artificial Sequence
  SARS-CoV-2/Wuhan/WIV05/2019__EPI_ISL_402128 spike protein mRNA gc mod (1-1273)(H69del_V70del_A222V_Y453F_S477N_D614G_I692V)
aggagagggcgcuuggcuugcaaggacccugagcugcggcauugaagcacacccaacccaacucgacugaagucagccucacugaaccggaucugagaaucuucucucucugggcuugccagggcucuccgaaccuagcuagcauccucuucaauuccaacuagaaagcuuaccauguucguguuccuggugcugcugccucugguguccagccagugugugaaccugaccaccagaacacagcugccuccagccuacaccaacagcuuuaccagaggcguguacuaccccgacaagguguucagauccagcgugcugcacucuacccaggaccuguuccugccuuucuucagcaacgugaccugguuccacgccaucuccggcaccaauggcaccaagagauucgacaaccccgugcugcccuucaacgacgggguguacuuugccagcaccgagaaguccaacaucaucagaggcuggaucuucggcaccacacuggacagcaagacccagagccugcugaucgugaacaacgccaccaacguggucaucaaagugugcgaguuccaguucugcaacgaccccuuccugggcgucuacuaccacaagaacaacaagagcuggauggaaagcgaguuccggguguacagcagcgccaacaacugcaccuucgaguacgugucccagccuuuccugauggaccuggaaggcaagcagggcaacuucaagaaccugcgcgaguucguguuuaagaacaucgacggcuacuucaagaucuacagcaagcacaccccuaucaaccucgugcgggaucugccucagggcuucucugugcuggaaccccugguggaucugcccaucggcaucaacaucacccgguuucagacacugcuggcccugcacagaagcuaccugacaccuggcgauagcagcagcggauggacagcuggugccgccgcuuacuaugugggcuaccugcagccuagaaccuuccugcugaaguacaacgagaacggcaccaucaccgacgccguggauugugcucuggauccucugagcgagacaaagugcacccugaaguccuucaccguggaaaagggcaucuaccagaccagcaacuuccgggugcagcccaccgaauccaucgugcgguuccccaauaucaccaaucugugccccuucggcgagguguucaaugccaccagauucgccucuguguacgccuggaaccggaagcggaucagcaauugcguggccgacuacuccgugcuguacaacuccgccagcuucagcaccuucaagugcuacggcguguccccuaccaagcugaacgaccugugcuucacaaacguguacgccgacagcuucgugauccggggagaugaagugcggcagauugccccuggacagacaggcaagaucgccgacuacaacuacaagcugcccgacgacuucaccggcugugugauugccuggaacagcaacaaccuggacuccaaagucggcggcaacuacaauuaccuguuccggcuguuccggaaguccaaucugaagcccuucgagcgggacaucuccaccgagaucuaucaggccggcaacaccccuuguaacggcguggaaggcuucaacugcuacuucccacugcaguccuacggcuuucagcccacaaauggcgugggcuaucagcccuacagagugguggugcugagcuucgaacugcugcaugccccugccacagugugcggcccuaagaaaagcaccaaucucgugaagaacaaaugcgugaacuucaacuucaacggccugaccggcaccggcgugcugacagagagcaacaagaaguuccugccauuccagcaguuuggccgggauaucgccgauaccacagacgccguuagagauccccagacacuggaaauccuggacaucaccccuugcagcuucggcggagugucugugaucaccccuggcaccaacaccagcaaucagguggcagugcuguaccagggcgugaacuguaccgaagugcccguggccauucacgccgaucagcugacaccuacauggcggguguacuccaccggcagcaauguguuucagaccagagccggcugucugaucggagccgagcacgugaacaauagcuacgagugcgacauccccaucggcgcuggaaucugcgccagcuaccagacacagacaaacagcccucggagagccagaagcguggccagccagagcgugauugccuacacaaugucucugggcgccgagaacagcguggccuacuccaacaacucuaucgcuauccccaccaacuucaccaucagcgugaccacagagauccugccuguguccaugaccaagaccagcguggacugcaccauguacaucugcggcgauuccaccgagugcuccaaccugcugcugcaguacggcagcuucugcacccagcugaauagagcccugacagggaucgccguggaacaggacaagaacacccaagagguguucgcccaagugaagcagaucuacaagaccccuccuaucaaggacuucggcggcuucaauuucagccagauucugcccgauccuagcaagcccagcaagcggagcuucaucgaggaccugcuguucaacaaagugacacuggccgacgccggcuucaucaagcaguauggcgauugucugggcgacauugccgccagggaucugauuugcgcccagaaguuuaacggacugacagugcugccuccucugcugaccgaugagaugaucgcccaguacacaucugcccugcuggccggcacaaucacaagcggcuggacauuuggagcaggcgccgcucugcagauccccuuugcuaugcagauggccuaccgguucaacggcaucggagugacccagaaugugcuguacgagaaccagaagcugaucgccaaccaguucaacagcgccaucggcaagauccaggacagccugagcagcacagcaagcgcccugggaaagcugcaggacguggucaaccagaaugcccaggcacugaacacccuggucaagcagcuguccuccaacuucggcgccaucagcucugugcugaacgauauccugagcagacuggacaaggucgaggccgaggugcagaucgacagacugaucacaggcagacugcagagccuccagacauacgugacccagcagcugaucagagccgccgagauuagagccucugccaaucuggccgccaccaagaugucugagugugugcugggccagagcaagagaguggacuuuugcggcaagggcuaccaccugaugagcuucccucagucugccccucacggcgugguguuucugcacgugacauaugugcccgcucaagagaagaauuucaccaccgcuccagccaucugccacgacggcaaagcccacuuuccuagagaaggcguguucguguccaacggcacccauugguucgugacacagcggaacuucuacgagccccagaucaucaccaccgacaacaccuucgugucuggcaacugcgacgucgugaucggcauugugaacaauaccguguacgacccucugcagcccgagcuggacagcuucaaagaggaacuggacaaguacuuuaagaaccacacaagccccgacguggaccugggcgauaucagcggaaucaaugccagcgucgugaacauccagaaagagaucgaccggcugaacgagguggccaagaaucugaacgagagccugaucgaccugcaagaacuggggaaguacgagcaguacaucaaguggcccugguacaucuggcugggcuuuaucgccggacugauugccaucgugauggucacaaucaugcuguguugcaugaccagcugcuguagcugccugaagggcuguuguagcuguggcagcugcugcaaguucgacgaggacgauucugagcccgugcugaagggcgugaaacugcacuacacaugaggacuagucccuguucccagagcccacuuuuuuuucuuuuuuugaaauaaaauagccugucuuucagaucuaaaaaaaaaaaaaaaaaaaaaaaaaaaaaaaaaaaaaaaaaaaaaaaaaaaaaaaaaaaaaaaaaaaaaaaaaaaaaaaaaaaaaaaaaaaaaaaaaaaa

SEQ ID NO: 25050 - RNA, 4161 nt, Artificial Sequence
  SARS-CoV-2/Wuhan/WIV05/2019__EPI_ISL_402128 spike protein mRNA gc mod (1-1273)(H69del_V70del_Y453F_D614G_I692V_M1229I)
aggagagggcgcuuggcuugcaaggacccugagcugcggcauugaagcacacccaacccaacucgacugaagucagccucacugaaccggaucugagaaucuucucucucugggcuugccagggcucuccgaaccuagcuagcauccucuucaauuccaacuagaaagcuuaccauguucguguuccuggugcugcugccucugguguccagccagugugugaaccugaccaccagaacacagcugccuccagccuacaccaacagcuuuaccagaggcguguacuaccccgacaagguguucagauccagcgugcugcacucuacccaggaccuguuccugccuuucuucagcaacgugaccugguuccacgccaucuccggcaccaauggcaccaagagauucgacaaccccgugcugcccuucaacgacgggguguacuuugccagcaccgagaaguccaacaucaucagaggcuggaucuucggcaccacacuggacagcaagacccagagccugcugaucgugaacaacgccaccaacguggucaucaaagugugcgaguuccaguucugcaacgaccccuuccugggcgucuacuaccacaagaacaacaagagcuggauggaaagcgaguuccggguguacagcagcgccaacaacugcaccuucgaguacgugucccagccuuuccugauggaccuggaaggcaagcagggcaacuucaagaaccugcgcgaguucguguuuaagaacaucgacggcuacuucaagaucuacagcaagcacaccccuaucaaccucgugcgggaucugccucagggcuucucugcucuggaaccccugguggaucugcccaucggcaucaacaucacccgguuucagacacugcuggcccugcacagaagcuaccugacaccuggcgauagcagcagcggauggacagcuggugccgccgcuuacuaugugggcuaccugcagccuagaaccuuccugcugaaguacaacgagaacggcaccaucaccgacgccguggauugugcucuggauccucugagcgagacaaagugcacccugaaguccuucaccguggaaaagggcaucuaccagaccagcaacuuccgggugcagcccaccgaauccaucgugcgguuccccaauaucaccaaucugugccccuucggcgagguguucaaugccaccagauucgccucuguguacgccuggaaccggaagcggaucagcaauugcguggccgacuacuccgugcuguacaacuccgccagcuucagcaccuucaagugcuacggcguguccccuaccaagcugaacgaccugugcuucacaaacguguacgccgacagcuucgugauccggggagaugaagugcggcagauugccccuggacagacaggcaagaucgccgacuacaacuacaagcugcccgacgacuucaccggcugugugauugccuggaacagcaacaaccuggacuccaaagucggcggcaacuacaauuaccuguuccggcuguuccggaaguccaaucugaagcccuucgagcgggacaucuccaccgagaucuaucaggccggcagcaccccuuguaacggcguggaaggcuucaacugcuacuucccacugcaguccuacggcuuucagcccacaaauggcgugggcuaucagcccuacagagugguggugcugagcuucgaacugcugcaugccccugccacagugugcggcccuaagaaaagcaccaaucucgugaagaacaaaugcgugaacuucaacuucaacggccugaccggcaccggcgugcugacagagagcaacaagaaguuccugccauuccagcaguuuggccgggauaucgccgauaccacagacgccguuagagauccccagacacuggaaauccuggacaucaccccuugcagcuucggcggagugucugugaucaccccuggcaccaacaccagcaaucagguggcagugcuguaccagggcgugaacuguaccgaagugcccguggccauucacgccgaucagcugacaccuacauggcggguguacuccaccggcagcaauguguuucagaccagagccggcugucugaucggagccgagcacgugaacaauagcuacgagugcgacauccccaucggcgcuggaaucugcgccagcuaccagacacagacaaacagcccucggagagccagaagcguggccagccagagcgugauugccuacacaaugucucugggcgccgagaacagcguggccuacuccaacaacucuaucgcuauccccaccaacuucaccaucagcgugaccacagagauccugccuguguccaugaccaagaccagcguggacugcaccauguacaucugcggcgauuccaccgagugcuccaaccugcugcugcaguacggcagcuucugcacccagcugaauagagcccugacagggaucgccguggaacaggacaagaacacccaagagguguucgcccaagugaagcagaucuacaagaccccuccuaucaaggacuucggcggcuucaauuucagccagauucugcccgauccuagcaagcccagcaagcggagcuucaucgaggaccugcuguucaacaaagugacacuggccgacgccggcuucaucaagcaguauggcgauugucugggcgacauugccgccagggaucugauuugcgcccagaaguuuaacggacugacagugcugccuccucugcugaccgaugagaugaucgcccaguacacaucugcccugcuggccggcacaaucacaagcggcuggacauuuggagcaggcgccgcucugcagauccccuuugcuaugcagauggccuaccgguucaacggcaucggagugacccagaaugugcuguacgagaaccagaagcugaucgccaaccaguucaacagcgccaucggcaagauccaggacagccugagcagcacagcaagcgcccugggaaagcugcaggacguggucaaccagaaugcccaggcacugaacacccuggucaagcagcuguccuccaacuucggcgccaucagcucugugcugaacgauauccugagcagacuggacaaggucgaggccgaggugcagaucgacagacugaucacaggcagacugcagagccuccagacauacgugacccagcagcugaucagagccgccgagauuagagccucugccaaucuggccgccaccaagaugucugagugugugcugggccagagcaagagaguggacuuuugcggcaagggcuaccaccugaugagcuucccucagucugccccucacggcgugguguuucugcacgugacauaugugcccgcucaagagaagaauuucaccaccgcuccagccaucugccacgacggcaaagcccacuuuccuagagaaggcguguucguguccaacggcacccauugguucgugacacagcggaacuucuacgagccccagaucaucaccaccgacaacaccuucgugucuggcaacugcgacgucgugaucggcauugugaacaauaccguguacgacccucugcagcccgagcuggacagcuucaaagaggaacuggacaaguacuuuaagaaccacacaagccccgacguggaccugggcgauaucagcggaaucaaugccagcgucgugaacauccagaaagagaucgaccggcugaacgagguggccaagaaucugaacgagagccugaucgaccugcaagaacuggggaaguacgagcaguacaucaaguggcccugguacaucuggcugggcuuuaucgccggacugauugccaucgugaucgucacaaucaugcuguguugcaugaccagcugcuguagcugccugaagggcuguuguagcuguggcagcugcugcaaguucgacgaggacgauucugagcccgugcugaagggcgugaaacugcacuacacaugaggacuagucccuguucccagagcccacuuuuuuuucuuuuuuugaaauaaaauagccugucuuucagaucuaaaaaaaaaaaaaaaaaaaaaaaaaaaaaaaaaaaaaaaaaaaaaaaaaaaaaaaaaaaaaaaaaaaaaaaaaaaaaaaaaaaaaaaaaaaaaaaaaaaa

SEQ ID NO: 25051 - RNA, 4158 nt, Artificial Sequence
  SARS-CoV-2/Wuhan/WIV05/2019__EPI_ISL_402128 spike protein mRNA gc mod (1-1273)(H69del_V70del_Y144del_N501Y_A570D_D614G_P681H_T716I_S982 A_D1118H)
aggagagggcgcuuggcuugcaaggacccugagcugcggcauugaagcacacccaacccaacucgacugaagucagccucacugaaccggaucugagaaucuucucucucugggcuugccagggcucuccgaaccuagcuagcauccucuucaauuccaacuagaaagcuuaccauguucguguuccuggugcugcugccucugguguccagccagugugugaaccugaccaccagaacacagcugccuccagccuacaccaacagcuuuaccagaggcguguacuaccccgacaagguguucagauccagcgugcugcacucuacccaggaccuguuccugccuuucuucagcaacgugaccugguuccacgccaucuccggcaccaauggcaccaagagauucgacaaccccgugcugcccuucaacgacgggguguacuuugccagcaccgagaaguccaacaucaucagaggcuggaucuucggcaccacacuggacagcaagacccagagccugcugaucgugaacaacgccaccaacguggucaucaaagugugcgaguuccaguucugcaacgaccccuuccugggcgucuaccacaagaacaacaagagcuggauggaaagcgaguuccggguguacagcagcgccaacaacugcaccuucgaguacgugucccagccuuuccugauggaccuggaaggcaagcagggcaacuucaagaaccugcgcgaguucguguuuaagaacaucgacggcuacuucaagaucuacagcaagcacaccccuaucaaccucgugcgggaucugccucagggcuucucugcucuggaaccccugguggaucugcccaucggcaucaacaucacccgguuucagacacugcuggcccugcacagaagcuaccugacaccuggcgauagcagcagcggauggacagcuggugccgccgcuuacuaugugggcuaccugcagccuagaaccuuccugcugaaguacaacgagaacggcaccaucaccgacgccguggauugugcucuggauccucugagcgagacaaagugcacccugaaguccuucaccguggaaaagggcaucuaccagaccagcaacuuccgggugcagcccaccgaauccaucgugcgguuccccaauaucaccaaucugugccccuucggcgagguguucaaugccaccagauucgccucuguguacgccuggaaccggaagcggaucagcaauugcguggccgacuacuccgugcuguacaacuccgccagcuucagcaccuucaagugcuacggcguguccccuaccaagcugaacgaccugugcuucacaaacguguacgccgacagcuucgugauccggggagaugaagugcggcagauugccccuggacagacaggcaagaucgccgacuacaacuacaagcugcccgacgacuucaccggcugugugauugccuggaacagcaacaaccuggacuccaaagucggcggcaacuacaauuaccuguaccggcuguuccggaaguccaaucugaagcccuucgagcgggacaucuccaccgagaucuaucaggccggcagcaccccuuguaacggcguggaaggcuucaacugcuacuucccacugcaguccuacggcuuucagcccacauacggcgugggcuaucagcccuacagagugguggugcugagcuucgaacugcugcaugccccugccacagugugcggcccuaagaaaagcaccaaucucgugaagaacaaaugcgugaacuucaacuucaacggccugaccggcaccggcgugcugacagagagcaacaagaaguuccugccauuccagcaguuuggccgggauaucgacgauaccacagacgccguuagagauccccagacacuggaaauccuggacaucaccccuugcagcuucggcggagugucugugaucaccccuggcaccaacaccagcaaucagguggcagugcuguaccagggcgugaacuguaccgaagugcccguggccauucacgccgaucagcugacaccuacauggcggguguacuccaccggcagcaauguguuucagaccagagccggcugucugaucggagccgagcacgugaacaauagcuacgagugcgacauccccaucggcgcuggaaucugcgccagcuaccagacacagacaaacagccaccggagagccagaagcguggccagccagagcaucauugccuacacaaugucucugggcgccgagaacagcguggccuacuccaacaacucuaucgcuauccccaucaacuucaccaucagcgugaccacagagauccugccuguguccaugaccaagaccagcguggacugcaccauguacaucugcggcgauuccaccgagugcuccaaccugcugcugcaguacggcagcuucugcacccagcugaauagagcccugacagggaucgccguggaacaggacaagaacacccaagagguguucgcccaagugaagcagaucuacaagaccccuccuaucaaggacuucggcggcuucaauuucagccagauucugcccgauccuagcaagcccagcaagcggagcuucaucgaggaccugcuguucaacaaagugacacuggccgacgccggcuucaucaagcaguauggcgauugucugggcgacauugccgccagggaucugauuugcgcccagaaguuuaacggacugacagugcugccuccucugcugaccgaugagaugaucgcccaguacacaucugcccugcuggccggcacaaucacaagcggcuggacauuuggagcaggcgccgcucugcagauccccuuugcuaugcagauggccuaccgguucaacggcaucggagugacccagaaugugcuguacgagaaccagaagcugaucgccaaccaguucaacagcgccaucggcaagauccaggacagccugagcagcacagcaagcgcccugggaaagcugcaggacguggucaaccagaaugcccaggcacugaacacccuggucaagcagcuguccuccaacuucggcgccaucagcucugugcugaacgauauccuggccagacuggacaaggucgaggccgaggugcagaucgacagacugaucacaggcagacugcagagccuccagacauacgugacccagcagcugaucagagccgccgagauuagagccucugccaaucuggccgccaccaagaugucugagugugugcugggccagagcaagagaguggacuuuugcggcaagggcuaccaccugaugagcuucccucagucugccccucacggcgugguguuucugcacgugacauaugugcccgcucaagagaagaauuucaccaccgcuccagccaucugccacgacggcaaagcccacuuuccuagagaaggcguguucguguccaacggcacccauugguucgugacacagcggaacuucuacgagccccagaucaucaccacccacaacaccuucgugucuggcaacugcgacgucgugaucggcauugugaacaauaccguguacgacccucugcagcccgagcuggacagcuucaaagaggaacuggacaaguacuuuaagaaccacacaagccccgacguggaccugggcgauaucagcggaaucaaugccagcgucgugaacauccagaaagagaucgaccggcugaacgagguggccaagaaucugaacgagagccugaucgaccugcaagaacuggggaaguacgagcaguacaucaaguggcccugguacaucuggcugggcuuuaucgccggacugauugccaucgugauggucacaaucaugcuguguugcaugaccagcugcuguagcugccugaagggcuguuguagcuguggcagcugcugcaaguucgacgaggacgauucugagcccgugcugaagggcgugaaacugcacuacacaugaggacuagucccuguucccagagcccacuuuuuuuucuuuuuuugaaauaaaauagccugucuuucagaucuaaaaaaaaaaaaaaaaaaaaaaaaaaaaaaaaaaaaaaaaaaaaaaaaaaaaaaaaaaaaaaaaaaaaaaaaaaaaaaaaaaaaaaaaaaaaaaaaaaaa

SEQ ID NO: 25052 - RNA, 4167 nt, Artificial Sequence
  SARS-CoV-2/Wuhan/WIV05/2019__EPI_ISL_402128 spike protein mRNA gc mod (1-1273)(K417N_E484K_N501Y_D614G)
aggagagggcgcuuggcuugcaaggacccugagcugcggcauugaagcacacccaacccaacucgacugaagucagccucacugaaccggaucugagaaucuucucucucugggcuugccagggcucuccgaaccuagcuagcauccucuucaauuccaacuagaaagcuuaccauguucguguuccuggugcugcugccucugguguccagccagugugugaaccugaccaccagaacacagcugccuccagccuacaccaacagcuuuaccagaggcguguacuaccccgacaagguguucagauccagcgugcugcacucuacccaggaccuguuccugccuuucuucagcaacgugaccugguuccacgccauccacguguccggcaccaauggcaccaagagauucgacaaccccgugcugcccuucaacgacgggguguacuuugccagcaccgagaaguccaacaucaucagaggcuggaucuucggcaccacacuggacagcaagacccagagccugcugaucgugaacaacgccaccaacguggucaucaaagugugcgaguuccaguucugcaacgaccccuuccugggcgucuacuaccacaagaacaacaagagcuggauggaaagcgaguuccggguguacagcagcgccaacaacugcaccuucgaguacgugucccagccuuuccugauggaccuggaaggcaagcagggcaacuucaagaaccugcgcgaguucguguuuaagaacaucgacggcuacuucaagaucuacagcaagcacaccccuaucaaccucgugcgggaucugccucagggcuucucugcucuggaaccccugguggaucugcccaucggcaucaacaucacccgguuucagacacugcuggcccugcacagaagcuaccugacaccuggcgauagcagcagcggauggacagcuggugccgccgcuuacuaugugggcuaccugcagccuagaaccuuccugcugaaguacaacgagaacggcaccaucaccgacgccguggauugugcucuggauccucugagcgagacaaagugcacccugaaguccuucaccguggaaaagggcaucuaccagaccagcaacuuccgggugcagcccaccgaauccaucgugcgguuccccaauaucaccaaucugugccccuucggcgagguguucaaugccaccagauucgccucuguguacgccuggaaccggaagcggaucagcaauugcguggccgacuacuccgugcuguacaacuccgccagcuucagcaccuucaagugcuacggcguguccccuaccaagcugaacgaccugugcuucacaaacguguacgccgacagcuucgugauccggggagaugaagugcggcagauugccccuggacagacaggcaacaucgccgacuacaacuacaagcugcccgacgacuucaccggcugugugauugccuggaacagcaacaaccuggacuccaaagucggcggcaacuacaauuaccuguaccggcuguuccggaaguccaaucugaagcccuucgagcgggacaucuccaccgagaucuaucaggccggcagcaccccuuguaacggcgugaagggcuucaacugcuacuucccacugcaguccuacggcuuucagcccacauacggcgugggcuaucagcccuacagagugguggugcugagcuucgaacugcugcaugccccugccacagugugcggcccuaagaaaagcaccaaucucgugaagaacaaaugcgugaacuucaacuucaacggccugaccggcaccggcgugcugacagagagcaacaagaaguuccugccauuccagcaguuuggccgggauaucgccgauaccacagacgccguuagagauccccagacacuggaaauccuggacaucaccccuugcagcuucggcggagugucugugaucaccccuggcaccaacaccagcaaucagguggcagugcuguaccagggcgugaacuguaccgaagugcccguggccauucacgccgaucagcugacaccuacauggcggguguacuccaccggcagcaauguguuucagaccagagccggcugucugaucggagccgagcacgugaacaauagcuacgagugcgacauccccaucggcgcuggaaucugcgccagcuaccagacacagacaaacagcccucggagagccagaagcguggccagccagagcaucauugccuacacaaugucucugggcgccgagaacagcguggccuacuccaacaacucuaucgcuauccccaccaacuucaccaucagcgugaccacagagauccugccuguguccaugaccaagaccagcguggacugcaccauguacaucugcggcgauuccaccgagugcuccaaccugcugcugcaguacggcagcuucugcacccagcugaauagagcccugacagggaucgccguggaacaggacaagaacacccaagagguguucgcccaagugaagcagaucuacaagaccccuccuaucaaggacuucggcggcuucaauuucagccagauucugcccgauccuagcaagcccagcaagcggagcuucaucgaggaccugcuguucaacaaagugacacuggccgacgccggcuucaucaagcaguauggcgauugucugggcgacauugccgccagggaucugauuugcgcccagaaguuuaacggacugacagugcugccuccucugcugaccgaugagaugaucgcccaguacacaucugcccugcuggccggcacaaucacaagcggcuggacauuuggagcaggcgccgcucugcagauccccuuugcuaugcagauggccuaccgguucaacggcaucggagugacccagaaugugcuguacgagaaccagaagcugaucgccaaccaguucaacagcgccaucggcaagauccaggacagccugagcagcacagcaagcgcccugggaaagcugcaggacguggucaaccagaaugcccaggcacugaacacccuggucaagcagcuguccuccaacuucggcgccaucagcucugugcugaacgauauccugagcagacuggacaaggucgaggccgaggugcagaucgacagacugaucacaggcagacugcagagccuccagacauacgugacccagcagcugaucagagccgccgagauuagagccucugccaaucuggccgccaccaagaugucugagugugugcugggccagagcaagagaguggacuuuugcggcaagggcuaccaccugaugagcuucccucagucugccccucacggcgugguguuucugcacgugacauaugugcccgcucaagagaagaauuucaccaccgcuccagccaucugccacgacggcaaagcccacuuuccuagagaaggcguguucguguccaacggcacccauugguucgugacacagcggaacuucuacgagccccagaucaucaccaccgacaacaccuucgugucuggcaacugcgacgucgugaucggcauugugaacaauaccguguacgacccucugcagcccgagcuggacagcuucaaagaggaacuggacaaguacuuuaagaaccacacaagccccgacguggaccugggcgauaucagcggaaucaaugccagcgucgugaacauccagaaagagaucgaccggcugaacgagguggccaagaaucugaacgagagccugaucgaccugcaagaacuggggaaguacgagcaguacaucaaguggcccugguacaucuggcugggcuuuaucgccggacugauugccaucgugauggucacaaucaugcuguguugcaugaccagcugcuguagcugccugaagggcuguuguagcuguggcagcugcugcaaguucgacgaggacgauucugagcccgugcugaagggcgugaaacugcacuacacaugaggacuagucccuguucccagagcccacuuuuuuuucuuuuuuugaaauaaaauagccugucuuucagaucuaaaaaaaaaaaaaaaaaaaaaaaaaaaaaaaaaaaaaaaaaaaaaaaaaaaaaaaaaaaaaaaaaaaaaaaaaaaaaaaaaaaaaaaaaaaaaaaaaaaa

SEQ ID NO: 25053 - RNA, 4158 nt, Artificial Sequence
  SARS-CoV-2/Wuhan/WIV05/2019__EPI_ISL_402128 spike protein mRNA gc mod (1-1273)(L18F_D80A_D215G_L242del_A243del_L244del_R246I_K417N_E484 K_N501Y_D614G_A701V)
aggagagggcgcuuggcuugcaaggacccugagcugcggcauugaagcacacccaacccaacucgacugaagucagccucacugaaccggaucugagaaucuucucucucugggcuugccagggcucuccgaaccuagcuagcauccucuucaauuccaacuagaaagcuuaccauguucguguuccuggugcugcugccucugguguccagccagugugugaacuucaccaccagaacacagcugccuccagccuacaccaacagcuuuaccagaggcguguacuaccccgacaagguguucagauccagcgugcugcacucuacccaggaccuguuccugccuuucuucagcaacgugaccugguuccacgccauccacguguccggcaccaauggcaccaagagauucgccaaccccgugcugcccuucaacgacgggguguacuuugccagcaccgagaaguccaacaucaucagaggcuggaucuucggcaccacacuggacagcaagacccagagccugcugaucgugaacaacgccaccaacguggucaucaaagugugcgaguuccaguucugcaacgaccccuuccugggcgucuacuaccacaagaacaacaagagcuggauggaaagcgaguuccggguguacagcagcgccaacaacugcaccuucgaguacgugucccagccuuuccugauggaccuggaaggcaagcagggcaacuucaagaaccugcgcgaguucguguuuaagaacaucgacggcuacuucaagaucuacagcaagcacaccccuaucaaccucgugcggggccugccucagggcuucucugcucuggaaccccugguggaucugcccaucggcaucaacaucacccgguuucagacacugcacaucagcuaccugacaccuggcgauagcagcagcggauggacagcuggugccgccgcuuacuaugugggcuaccugcagccuagaaccuuccugcugaaguacaacgagaacggcaccaucaccgacgccguggauugugcucuggauccucugagcgagacaaagugcacccugaaguccuucaccguggaaaagggcaucuaccagaccagcaacuuccgggugcagcccaccgaauccaucgugcgguuccccaauaucaccaaucugugccccuucggcgagguguucaaugccaccagauucgccucuguguacgccuggaaccggaagcggaucagcaauugcguggccgacuacuccgugcuguacaacuccgccagcuucagcaccuucaagugcuacggcguguccccuaccaagcugaacgaccugugcuucacaaacguguacgccgacagcuucgugauccggggagaugaagugcggcagauugccccuggacagacaggcaacaucgccgacuacaacuacaagcugcccgacgacuucaccggcugugugauugccuggaacagcaacaaccuggacuccaaagucggcggcaacuacaauuaccuguaccggcuguuccggaaguccaaucugaagcccuucgagcgggacaucuccaccgagaucuaucaggccggcagcaccccuuguaacggcgugaagggcuucaacugcuacuucccacugcaguccuacggcuuucagcccacauacggcgugggcuaucagcccuacagagugguggugcugagcuucgaacugcugcaugccccugccacagugugcggcccuaagaaaagcaccaaucucgugaagaacaaaugcgugaacuucaacuucaacggccugaccggcaccggcgugcugacagagagcaacaagaaguuccugccauuccagcaguuuggccgggauaucgccgauaccacagacgccguuagagauccccagacacuggaaauccuggacaucaccccuugcagcuucggcggagugucugugaucaccccuggcaccaacaccagcaaucagguggcagugcuguaccagggcgugaacuguaccgaagugcccguggccauucacgccgaucagcugacaccuacauggcggguguacuccaccggcagcaauguguuucagaccagagccggcugucugaucggagccgagcacgugaacaauagcuacgagugcgacauccccaucggcgcuggaaucugcgccagcuaccagacacagacaaacagcccucggagagccagaagcguggccagccagagcaucauugccuacacaaugucucugggcguggagaacagcguggccuacuccaacaacucuaucgcuauccccaccaacuucaccaucagcgugaccacagagauccugccuguguccaugaccaagaccagcguggacugcaccauguacaucugcggcgauuccaccgagugcuccaaccugcugcugcaguacggcagcuucugcacccagcugaauagagcccugacagggaucgccguggaacaggacaagaacacccaagagguguucgcccaagugaagcagaucuacaagaccccuccuaucaaggacuucggcggcuucaauuucagccagauucugcccgauccuagcaagcccagcaagcggagcuucaucgaggaccugcuguucaacaaagugacacuggccgacgccggcuucaucaagcaguauggcgauugucugggcgacauugccgccagggaucugauuugcgcccagaaguuuaacggacugacagugcugccuccucugcugaccgaugagaugaucgcccaguacacaucugcccugcuggccggcacaaucacaagcggcuggacauuuggagcaggcgccgcucugcagauccccuuugcuaugcagauggccuaccgguucaacggcaucggagugacccagaaugugcuguacgagaaccagaagcugaucgccaaccaguucaacagcgccaucggcaagauccaggacagccugagcagcacagcaagcgcccugggaaagcugcaggacguggucaaccagaaugcccaggcacugaacacccuggucaagcagcuguccuccaacuucggcgccaucagcucugugcugaacgauauccugagcagacuggacaaggucgaggccgaggugcagaucgacagacugaucacaggcagacugcagagccuccagacauacgugacccagcagcugaucagagccgccgagauuagagccucugccaaucuggccgccaccaagaugucugagugugugcugggccagagcaagagaguggacuuuugcggcaagggcuaccaccugaugagcuucccucagucugccccucacggcgugguguuucugcacgugacauaugugcccgcucaagagaagaauuucaccaccgcuccagccaucugccacgacggcaaagcccacuuuccuagagaaggcguguucguguccaacggcacccauugguucgugacacagcggaacuucuacgagccccagaucaucaccaccgacaacaccuucgugucuggcaacugcgacgucgugaucggcauugugaacaauaccguguacgacccucugcagcccgagcuggacagcuucaaagaggaacuggacaaguacuuuaagaaccacacaagccccgacguggaccugggcgauaucagcggaaucaaugccagcgucgugaacauccagaaagagaucgaccggcugaacgagguggccaagaaucugaacgagagccugaucgaccugcaagaacuggggaaguacgagcaguacaucaaguggcccugguacaucuggcugggcuuuaucgccggacugauugccaucgugauggucacaaucaugcuguguugcaugaccagcugcuguagcugccugaagggcuguuguagcuguggcagcugcugcaaguucgacgaggacgauucugagcccgugcugaagggcgugaaacugcacuacacaugaggacuagucccuguucccagagcccacuuuuuuuucuuuuuuugaaauaaaauagccugucuuucagaucuaaaaaaaaaaaaaaaaaaaaaaaaaaaaaaaaaaaaaaaaaaaaaaaaaaaaaaaaaaaaaaaaaaaaaaaaaaaaaaaaaaaaaaaaaaaaaaaaaaaa

SEQ ID NO: 25054 - RNA, 4167 nt, Artificial Sequence
  SARS-CoV-2/Wuhan/WIV05/2019__EPI_ISL_402128 spike protein mRNA gc mod (1-1273)(E484K_D614G)
aggagagggcgcuuggcuugcaaggacccugagcugcggcauugaagcacacccaacccaacucgacugaagucagccucacugaaccggaucugagaaucuucucucucugggcuugccagggcucuccgaaccuagcuagcauccucuucaauuccaacuagaaagcuuaccauguucguguuccuggugcugcugccucugguguccagccagugugugaaccugaccaccagaacacagcugccuccagccuacaccaacagcuuuaccagaggcguguacuaccccgacaagguguucagauccagcgugcugcacucuacccaggaccuguuccugccuuucuucagcaacgugaccugguuccacgccauccacguguccggcaccaauggcaccaagagauucgacaaccccgugcugcccuucaacgacgggguguacuuugccagcaccgagaaguccaacaucaucagaggcuggaucuucggcaccacacuggacagcaagacccagagccugcugaucgugaacaacgccaccaacguggucaucaaagugugcgaguuccaguucugcaacgaccccuuccugggcgucuacuaccacaagaacaacaagagcuggauggaaagcgaguuccggguguacagcagcgccaacaacugcaccuucgaguacgugucccagccuuuccugauggaccuggaaggcaagcagggcaacuucaagaaccugcgcgaguucguguuuaagaacaucgacggcuacuucaagaucuacagcaagcacaccccuaucaaccucgugcgggaucugccucagggcuucucugcucuggaaccccugguggaucugcccaucggcaucaacaucacccgguuucagacacugcuggcccugcacagaagcuaccugacaccuggcgauagcagcagcggauggacagcuggugccgccgcuuacuaugugggcuaccugcagccuagaaccuuccugcugaaguacaacgagaacggcaccaucaccgacgccguggauugugcucuggauccucugagcgagacaaagugcacccugaaguccuucaccguggaaaagggcaucuaccagaccagcaacuuccgggugcagcccaccgaauccaucgugcgguuccccaauaucaccaaucugugccccuucggcgagguguucaaugccaccagauucgccucuguguacgccuggaaccggaagcggaucagcaauugcguggccgacuacuccgugcuguacaacuccgccagcuucagcaccuucaagugcuacggcguguccccuaccaagcugaacgaccugugcuucacaaacguguacgccgacagcuucgugauccggggagaugaagugcggcagauugccccuggacagacaggcaagaucgccgacuacaacuacaagcugcccgacgacuucaccggcugugugauugccuggaacagcaacaaccuggacuccaaagucggcggcaacuacaauuaccuguaccggcuguuccggaaguccaaucugaagcccuucgagcgggacaucuccaccgagaucuaucaggccggcagcaccccuuguaacggcgugaagggcuucaacugcuacuucccacugcaguccuacggcuuucagcccacaaauggcgugggcuaucagcccuacagagugguggugcugagcuucgaacugcugcaugccccugccacagugugcggcccuaagaaaagcaccaaucucgugaagaacaaaugcgugaacuucaacuucaacggccugaccggcaccggcgugcugacagagagcaacaagaaguuccugccauuccagcaguuuggccgggauaucgccgauaccacagacgccguuagagauccccagacacuggaaauccuggacaucaccccuugcagcuucggcggagugucugugaucaccccuggcaccaacaccagcaaucagguggcagugcuguaccagggcgugaacuguaccgaagugcccguggccauucacgccgaucagcugacaccuacauggcggguguacuccaccggcagcaauguguuucagaccagagccggcugucugaucggagccgagcacgugaacaauagcuacgagugcgacauccccaucggcgcuggaaucugcgccagcuaccagacacagacaaacagcccucggagagccagaagcguggccagccagagcaucauugccuacacaaugucucugggcgccgagaacagcguggccuacuccaacaacucuaucgcuauccccaccaacuucaccaucagcgugaccacagagauccugccuguguccaugaccaagaccagcguggacugcaccauguacaucugcggcgauuccaccgagugcuccaaccugcugcugcaguacggcagcuucugcacccagcugaauagagcccugacagggaucgccguggaacaggacaagaacacccaagagguguucgcccaagugaagcagaucuacaagaccccuccuaucaaggacuucggcggcuucaauuucagccagauucugcccgauccuagcaagcccagcaagcggagcuucaucgaggaccugcuguucaacaaagugacacuggccgacgccggcuucaucaagcaguauggcgauugucugggcgacauugccgccagggaucugauuugcgcccagaaguuuaacggacugacagugcugccuccucugcugaccgaugagaugaucgcccaguacacaucugcccugcuggccggcacaaucacaagcggcuggacauuuggagcaggcgccgcucugcagauccccuuugcuaugcagauggccuaccgguucaacggcaucggagugacccagaaugugcuguacgagaaccagaagcugaucgccaaccaguucaacagcgccaucggcaagauccaggacagccugagcagcacagcaagcgcccugggaaagcugcaggacguggucaaccagaaugcccaggcacugaacacccuggucaagcagcuguccuccaacuucggcgccaucagcucugugcugaacgauauccugagcagacuggacaaggucgaggccgaggugcagaucgacagacugaucacaggcagacugcagagccuccagacauacgugacccagcagcugaucagagccgccgagauuagagccucugccaaucuggccgccaccaagaugucugagugugugcugggccagagcaagagaguggacuuuugcggcaagggcuaccaccugaugagcuucccucagucugccccucacggcgugguguuucugcacgugacauaugugcccgcucaagagaagaauuucaccaccgcuccagccaucugccacgacggcaaagcccacuuuccuagagaaggcguguucguguccaacggcacccauugguucgugacacagcggaacuucuacgagccccagaucaucaccaccgacaacaccuucgugucuggcaacugcgacgucgugaucggcauugugaacaauaccguguacgacccucugcagcccgagcuggacagcuucaaagaggaacuggacaaguacuuuaagaaccacacaagccccgacguggaccugggcgauaucagcggaaucaaugccagcgucgugaacauccagaaagagaucgaccggcugaacgagguggccaagaaucugaacgagagccugaucgaccugcaagaacuggggaaguacgagcaguacaucaaguggcccugguacaucuggcugggcuuuaucgccggacugauugccaucgugauggucacaaucaugcuguguugcaugaccagcugcuguagcugccugaagggcuguuguagcuguggcagcugcugcaaguucgacgaggacgauucugagcccgugcugaagggcgugaaacugcacuacacaugaggacuagucccuguucccagagcccacuuuuuuuucuuuuuuugaaauaaaauagccugucuuucagaucuaaaaaaaaaaaaaaaaaaaaaaaaaaaaaaaaaaaaaaaaaaaaaaaaaaaaaaaaaaaaaaaaaaaaaaaaaaaaaaaaaaaaaaaaaaaaaaaaaaaa

SEQ ID NO: 25055 - RNA, 4167 nt, Artificial Sequence
  SARS-CoV-2/Wuhan/WIV05/2019__EPI_ISL_402128 spike protein mRNA gc mod (1-1273)(L18F_T20N_P26S_D138Y_R190S_K417T_E484K_N501Y_D614G_H655Y _T1027I)
aggagagggcgcuuggcuugcaaggacccugagcugcggcauugaagcacacccaacccaacucgacugaagucagccucacugaaccggaucugagaaucuucucucucugggcuugccagggcucuccgaaccuagcuagcauccucuucaauuccaacuagaaagcuuaccauguucguguuccuggugcugcugccucugguguccagccagugugugaacuucaccaacagaacacagcugccuagcgccuacaccaacagcuuuaccagaggcguguacuaccccgacaagguguucagauccagcgugcugcacucuacccaggaccuguuccugccuuucuucagcaacgugaccugguuccacgccauccacguguccggcaccaauggcaccaagagauucgacaaccccgugcugcccuucaacgacgggguguacuuugccagcaccgagaaguccaacaucaucagaggcuggaucuucggcaccacacuggacagcaagacccagagccugcugaucgugaacaacgccaccaacguggucaucaaagugugcgaguuccaguucugcaacuaccccuuccugggcgucuacuaccacaagaacaacaagagcuggauggaaagcgaguuccggguguacagcagcgccaacaacugcaccuucgaguacgugucccagccuuuccugauggaccuggaaggcaagcagggcaacuucaagaaccugagcgaguucguguuuaagaacaucgacggcuacuucaagaucuacagcaagcacaccccuaucaaccucgugcgggaucugccucagggcuucucugcucuggaaccccugguggaucugcccaucggcaucaacaucacccgguuucagacacugcuggcccugcacagaagcuaccugacaccuggcgauagcagcagcggauggacagcuggugccgccgcuuacuaugugggcuaccugcagccuagaaccuuccugcugaaguacaacgagaacggcaccaucaccgacgccguggauugugcucuggauccucugagcgagacaaagugcacccugaaguccuucaccguggaaaagggcaucuaccagaccagcaacuuccgggugcagcccaccgaauccaucgugcgguuccccaauaucaccaaucugugccccuucggcgagguguucaaugccaccagauucgccucuguguacgccuggaaccggaagcggaucagcaauugcguggccgacuacuccgugcuguacaacuccgccagcuucagcaccuucaagugcuacggcguguccccuaccaagcugaacgaccugugcuucacaaacguguacgccgacagcuucgugauccggggagaugaagugcggcagauugccccuggacagacaggcaccaucgccgacuacaacuacaagcugcccgacgacuucaccggcugugugauugccuggaacagcaacaaccuggacuccaaagucggcggcaacuacaauuaccuguaccggcuguuccggaaguccaaucugaagcccuucgagcgggacaucuccaccgagaucuaucaggccggcagcaccccuuguaacggcgugaagggcuucaacugcuacuucccacugcaguccuacggcuuucagcccacauacggcgugggcuaucagcccuacagagugguggugcugagcuucgaacugcugcaugccccugccacagugugcggcccuaagaaaagcaccaaucucgugaagaacaaaugcgugaacuucaacuucaacggccugaccggcaccggcgugcugacagagagcaacaagaaguuccugccauuccagcaguuuggccgggauaucgccgauaccacagacgccguuagagauccccagacacuggaaauccuggacaucaccccuugcagcuucggcggagugucugugaucaccccuggcaccaacaccagcaaucagguggcagugcuguaccagggcgugaacuguaccgaagugcccguggccauucacgccgaucagcugacaccuacauggcggguguacuccaccggcagcaauguguuucagaccagagccggcugucugaucggagccgaguacgugaacaauagcuacgagugcgacauccccaucggcgcuggaaucugcgccagcuaccagacacagacaaacagcccucggagagccagaagcguggccagccagagcaucauugccuacacaaugucucugggcgccgagaacagcguggccuacuccaacaacucuaucgcuauccccaccaacuucaccaucagcgugaccacagagauccugccuguguccaugaccaagaccagcguggacugcaccauguacaucugcggcgauuccaccgagugcuccaaccugcugcugcaguacggcagcuucugcacccagcugaauagagcccugacagggaucgccguggaacaggacaagaacacccaagagguguucgcccaagugaagcagaucuacaagaccccuccuaucaaggacuucggcggcuucaauuucagccagauucugcccgauccuagcaagcccagcaagcggagcuucaucgaggaccugcuguucaacaaagugacacuggccgacgccggcuucaucaagcaguauggcgauugucugggcgacauugccgccagggaucugauuugcgcccagaaguuuaacggacugacagugcugccuccucugcugaccgaugagaugaucgcccaguacacaucugcccugcuggccggcacaaucacaagcggcuggacauuuggagcaggcgccgcucugcagauccccuuugcuaugcagauggccuaccgguucaacggcaucggagugacccagaaugugcuguacgagaaccagaagcugaucgccaaccaguucaacagcgccaucggcaagauccaggacagccugagcagcacagcaagcgcccugggaaagcugcaggacguggucaaccagaaugcccaggcacugaacacccuggucaagcagcuguccuccaacuucggcgccaucagcucugugcugaacgauauccugagcagacuggacaaggucgaggccgaggugcagaucgacagacugaucacaggcagacugcagagccuccagacauacgugacccagcagcugaucagagccgccgagauuagagccucugccaaucuggccgccaucaagaugucugagugugugcugggccagagcaagagaguggacuuuugcggcaagggcuaccaccugaugagcuucccucagucugccccucacggcgugguguuucugcacgugacauaugugcccgcucaagagaagaauuucaccaccgcuccagccaucugccacgacggcaaagcccacuuuccuagagaaggcguguucguguccaacggcacccauugguucgugacacagcggaacuucuacgagccccagaucaucaccaccgacaacaccuucgugucuggcaacugcgacgucgugaucggcauugugaacaauaccguguacgacccucugcagcccgagcuggacagcuucaaagaggaacuggacaaguacuuuaagaaccacacaagccccgacguggaccugggcgauaucagcggaaucaaugccagcgucgugaacauccagaaagagaucgaccggcugaacgagguggccaagaaucugaacgagagccugaucgaccugcaagaacuggggaaguacgagcaguacaucaaguggcccugguacaucuggcugggcuuuaucgccggacugauugccaucgugauggucacaaucaugcuguguugcaugaccagcugcuguagcugccugaagggcuguuguagcuguggcagcugcugcaaguucgacgaggacgauucugagcccgugcugaagggcgugaaacugcacuacacaugaggacuagucccuguucccagagcccacuuuuuuuucuuuuuuugaaauaaaauagccugucuuucagaucuaaaaaaaaaaaaaaaaaaaaaaaaaaaaaaaaaaaaaaaaaaaaaaaaaaaaaaaaaaaaaaaaaaaaaaaaaaaaaaaaaaaaaaaaaaaaaaaaaaaa

SEQ ID NO: 25056 - RNA, 4167 nt, Artificial Sequence
  SARS-CoV-2/Wuhan/WIV05/2019__EPI_ISL_402128 spike protein mRNA gc mod (1-1273)(S13I_W152C_L452R_D614G)
aggagagggcgcuuggcuugcaaggacccugagcugcggcauugaagcacacccaacccaacucgacugaagucagccucacugaaccggaucugagaaucuucucucucugggcuugccagggcucuccgaaccuagcuagcauccucuucaauuccaacuagaaagcuuaccauguucguguuccuggugcugcugccucugguguccauccagugugugaaccugaccaccagaacacagcugccuccagccuacaccaacagcuuuaccagaggcguguacuaccccgacaagguguucagauccagcgugcugcacucuacccaggaccuguuccugccuuucuucagcaacgugaccugguuccacgccauccacguguccggcaccaauggcaccaagagauucgacaaccccgugcugcccuucaacgacgggguguacuuugccagcaccgagaaguccaacaucaucagaggcuggaucuucggcaccacacuggacagcaagacccagagccugcugaucgugaacaacgccaccaacguggucaucaaagugugcgaguuccaguucugcaacgaccccuuccugggcgucuacuaccacaagaacaacaagagcugcauggaaagcgaguuccggguguacagcagcgccaacaacugcaccuucgaguacgugucccagccuuuccugauggaccuggaaggcaagcagggcaacuucaagaaccugcgcgaguucguguuuaagaacaucgacggcuacuucaagaucuacagcaagcacaccccuaucaaccucgugcgggaucugccucagggcuucucugcucuggaaccccugguggaucugcccaucggcaucaacaucacccgguuucagacacugcuggcccugcacagaagcuaccugacaccuggcgauagcagcagcggauggacagcuggugccgccgcuuacuaugugggcuaccugcagccuagaaccuuccugcugaaguacaacgagaacggcaccaucaccgacgccguggauugugcucuggauccucugagcgagacaaagugcacccugaaguccuucaccguggaaaagggcaucuaccagaccagcaacuuccgggugcagcccaccgaauccaucgugcgguuccccaauaucaccaaucugugccccuucggcgagguguucaaugccaccagauucgccucuguguacgccuggaaccggaagcggaucagcaauugcguggccgacuacuccgugcuguacaacuccgccagcuucagcaccuucaagugcuacggcguguccccuaccaagcugaacgaccugugcuucacaaacguguacgccgacagcuucgugauccggggagaugaagugcggcagauugccccuggacagacaggcaagaucgccgacuacaacuacaagcugcccgacgacuucaccggcugugugauugccuggaacagcaacaaccuggacuccaaagucggcggcaacuacaauuaccgcuaccggcuguuccggaaguccaaucugaagcccuucgagcgggacaucuccaccgagaucuaucaggccggcagcaccccuuguaacggcguggaaggcuucaacugcuacuucccacugcaguccuacggcuuucagcccacaaauggcgugggcuaucagcccuacagagugguggugcugagcuucgaacugcugcaugccccugccacagugugcggcccuaagaaaagcaccaaucucgugaagaacaaaugcgugaacuucaacuucaacggccugaccggcaccggcgugcugacagagagcaacaagaaguuccugccauuccagcaguuuggccgggauaucgccgauaccacagacgccguuagagauccccagacacuggaaauccuggacaucaccccuugcagcuucggcggagugucugugaucaccccuggcaccaacaccagcaaucagguggcagugcuguaccagggcgugaacuguaccgaagugcccguggccauucacgccgaucagcugacaccuacauggcggguguacuccaccggcagcaauguguuucagaccagagccggcugucugaucggagccgagcacgugaacaauagcuacgagugcgacauccccaucggcgcuggaaucugcgccagcuaccagacacagacaaacagcccucggagagccagaagcguggccagccagagcaucauugccuacacaaugucucugggcgccgagaacagcguggccuacuccaacaacucuaucgcuauccccaccaacuucaccaucagcgugaccacagagauccugccuguguccaugaccaagaccagcguggacugcaccauguacaucugcggcgauuccaccgagugcuccaaccugcugcugcaguacggcagcuucugcacccagcugaauagagcccugacagggaucgccguggaacaggacaagaacacccaagagguguucgcccaagugaagcagaucuacaagaccccuccuaucaaggacuucggcggcuucaauuucagccagauucugcccgauccuagcaagcccagcaagcggagcuucaucgaggaccugcuguucaacaaagugacacuggccgacgccggcuucaucaagcaguauggcgauugucugggcgacauugccgccagggaucugauuugcgcccagaaguuuaacggacugacagugcugccuccucugcugaccgaugagaugaucgcccaguacacaucugcccugcuggccggcacaaucacaagcggcuggacauuuggagcaggcgccgcucugcagauccccuuugcuaugcagauggccuaccgguucaacggcaucggagugacccagaaugugcuguacgagaaccagaagcugaucgccaaccaguucaacagcgccaucggcaagauccaggacagccugagcagcacagcaagcgcccugggaaagcugcaggacguggucaaccagaaugcccaggcacugaacacccuggucaagcagcuguccuccaacuucggcgccaucagcucugugcugaacgauauccugagcagacuggacaaggucgaggccgaggugcagaucgacagacugaucacaggcagacugcagagccuccagacauacgugacccagcagcugaucagagccgccgagauuagagccucugccaaucuggccgccaccaagaugucugagugugugcugggccagagcaagagaguggacuuuugcggcaagggcuaccaccugaugagcuucccucagucugccccucacggcgugguguuucugcacgugacauaugugcccgcucaagagaagaauuucaccaccgcuccagccaucugccacgacggcaaagcccacuuuccuagagaaggcguguucguguccaacggcacccauugguucgugacacagcggaacuucuacgagccccagaucaucaccaccgacaacaccuucgugucuggcaacugcgacgucgugaucggcauugugaacaauaccguguacgacccucugcagcccgagcuggacagcuucaaagaggaacuggacaaguacuuuaagaaccacacaagccccgacguggaccugggcgauaucagcggaaucaaugccagcgucgugaacauccagaaagagaucgaccggcugaacgagguggccaagaaucugaacgagagccugaucgaccugcaagaacuggggaaguacgagcaguacaucaaguggcccugguacaucuggcugggcuuuaucgccggacugauugccaucgugauggucacaaucaugcuguguugcaugaccagcugcuguagcugccugaagggcuguuguagcuguggcagcugcugcaaguucgacgaggacgauucugagcccgugcugaagggcgugaaacugcacuacacaugaggacuagucccuguucccagagcccacuuuuuuuucuuuuuuugaaauaaaauagccugucuuucagaucuaaaaaaaaaaaaaaaaaaaaaaaaaaaaaaaaaaaaaaaaaaaaaaaaaaaaaaaaaaaaaaaaaaaaaaaaaaaaaaaaaaaaaaaaaaaaaaaaaaaa

SEQ ID NO: 25057 - RNA, 4167 nt, Artificial Sequence
  SARS-CoV-2/Wuhan/WIV05/2019__EPI_ISL_402128 spike protein mRNA gc (1-1273)(K986P_V987P) R10184
aggagagggcgcuuggcuugcaaggacccugagcugcggcauugaagcacacccaacccaacucgacugaagucagccucacugaaccggaucugagaaucuucucucucugggcuugccagggcucuccgaaccuagcuagcauccucuucaauuccaacuagaaagcuuaccauguucguguuccugguccuccugccccuggugagcucccagugcgugaaccucaccacccgcacgcagcugccgcccgccuacaccaacagcuucacccggggcgucuacuaccccgacaagguguuccgcuccagcgugcugcacuccacccaggaccucuuccugcccuucuucagcaacgucacgugguuccacgccauccacguguccgggaccaacggcaccaagcgguucgacaacccggugcugcccuucaacgacggggucuacuucgcgagcaccgagaaguccaacaucauccgcggcuggaucuucgggacgacccucgacagcaagacccagucccugcugaucgugaacaacgccaccaacguggucaucaaggugugcgaguuccaguucugcaacgaccccuuccucggcguguacuaccacaagaacaacaagagcuggauggaguccgaguuccgggucuacagcuccgccaacaacugcacguucgaguacgugagccagcccuuccugauggaccuggagggcaagcaggggaacuucaagaaccuccgcgaguucguguucaagaacaucgacggcuacuucaagaucuacuccaagcacaccccgaucaaccugguccgggaccugccccagggguucagcgcccucgagccccugguggaccugcccaucggcaucaacaucacccgcuuccagacccuccuggcccugcaccgguccuaccucacgccgggggacagcagcuccggcuggaccgcgggcgccgccgccuacuacgugggguaccugcagccccgcaccuuccugcucaaguacaacgagaacggcaccaucacggacgcggucgacugcgcccuggacccccugagcgagaccaagugcacccucaaguccuucaccguggagaaggggaucuaccagacgagcaacuuccgggugcagcccaccgaguccaucguccgcuucccgaacaucaccaaccugugccccuucggcgagguguucaacgccacccgguucgccagcgucuacgccuggaaccgcaagcggaucuccaacugcguggcggacuacagcgugcuguacaacuccgccagcuucuccacguucaagugcuacggcgucagccccaccaagcucaacgaccugugcuucaccaacguguacgccgacuccuucgugauccgcggggacgagguccggcagaucgcccccggccagaccgggaagaucgccgacuacaacuacaagcugccggacgacuucacgggcugcgugaucgcguggaacagcaacaaccucgacuccaaggucgggggcaacuacaacuaccuguaccgccuguuccgcaagagcaaccucaagcccuucgagcgggacaucuccaccgagaucuaccaggccggcagcacccccugcaacgggguggagggcuucaacugcuacuucccccugcaguccuacggguuccagccgaccaacggcgugggguaccagcccuaccggguggucgugcugagcuucgagcuccugcacgcccccgccacggugugcggccccaagaaguccaccaaccuggucaagaacaagugcgugaacuucaacuucaacggccucaccgggaccggcgugcugaccgagagcaacaagaaguuccugccguuccagcaguucgggcgcgacaucgccgacacgaccgacgcgguccgcgacccccagacccuggagauccucgacaucacccccugcagcuucggcgggguguccgugaucacgccgggcaccaacaccagcaaccaggucgccgugcuguaccaggacgugaacugcaccgagguccccguggccauccacgccgaccagcugacgcccaccuggcggguguacuccaccggcagcaacgucuuccagacccgcgccgggugccucaucggcgcggagcacgugaacaacuccuacgagugcgacauccccaucggggccggcaucugcgccagcuaccagacgcagaccaacuccccgcggcgcgcccggagcguggcgucccagagcaucaucgccuacaccaugucccugggcgccgagaacagcgucgccuacuccaacaacagcaucgccauccccaccaacuucacgaucuccgugaccaccgagauccugcccgugagcaugaccaagacgagcgucgacugcaccauguacaucugcggggacuccaccgagugcagcaaccuccugcugcaguacggcuccuucugcacccagcucaaccgcgcgcugacggggaucgccguggagcaggacaagaacacccaggagguguucgcccaggucaagcagaucuacaagacgcccccgaucaaggacuucggcggguucaacuucagccagauccugcccgaccccuccaagcccagcaagcgguccuucaucgaggaccuccuguucaacaaggugacccuggccgacgccggcuucaucaagcaguacggcgacugccucggggacaucgcggcccgcgaccugaucugcgcccagaaguucaacggccugaccgugcucccgccccugcugaccgacgagaugaucgcccaguacaccagcgcccuccuggcggggaccaucacguccggcuggaccuucggggccggcgccgcccugcagauccccuucgcgaugcagauggccuaccgguucaacggcaucggggucacccagaacgugcucuacgagaaccagaagcugaucgccaaccaguucaacagcgccaucggcaagauccaggacucccugagcuccaccgccagcgcgcucgggaagcugcaggacguggucaaccagaacgcccaggcccugaacacgcucgugaagcagcuguccagcaacuucggcgccaucuccagcgugcugaacgacauccucucccgccuggacccgcccgaggccgaggugcagaucgaccggcugaucaccgggcgccuccagagccugcagaccuacgugacccagcagcugauccgggcggccgagauccgcgccagcgccaaccucgccgcgaccaagauguccgagugcguccugggccagagcaagcggguggacuucugcggcaagggguaccaccugauguccuucccccagagcgccccgcacggcguggucuuccuccacgugacguacguccccgcccaggagaagaacuucaccaccgcccccgcgaucugccacgacgggaaggcccacuucccccgcgagggcguguucguguccaacgggacccacugguucgucacgcagcggaacuucuacgagccgcagaucaucaccaccgacaacaccuucgugagcggcaacugcgacguggucaucggcaucgugaacaacacgguguacgacccccugcagcccgagcuggacuccuucaaggaggagcucgacaaguacuucaagaaccacaccagccccgacgucgaccugggggacaucuccggcaucaacgccagcguggugaacauccagaaggagaucgaccgccugaacgaggucgccaagaaccucaacgagucccugaucgaccugcaggagcucgggaaguacgagcaguacaucaaguggccgugguacaucuggcugggcuucaucgccggccugaucgcgaucgugauggugaccaucaugcucugcugcaugaccagcugcugcuccugccugaaggggugcugcagcugcggcuccugcugcaaguucgacgaggacgacagcgagcccguccugaagggggugaagcuccacuacacgugaggacuagucccuguucccagagcccacuuuuuuuucuuuuuuugaaauaaaauagccugucuuucagaucuaaaaaaaaaaaaaaaaaaaaaaaaaaaaaaaaaaaaaaaaaaaaaaaaaaaaaaaaaaaaaaaaaaaaaaaaaaaaaaaaaaaaaaaaaaaaaaaaaaaa

SEQ ID NO: 25058 - RNA, 4167 nt, Artificial Sequence
  SARS-CoV-2/Wuhan/WIV05/2019__EPI_ISL_402128 spike protein mRNA gc (1-1273)(K986P_V987P_ D614G)
aggagagggcgcuuggcuugcaaggacccugagcugcggcauugaagcacacccaacccaacucgacugaagucagccucacugaaccggaucugagaaucuucucucucugggcuugccagggcucuccgaaccuagcuagcauccucuucaauuccaacuagaaagcuuaccauguucguguuccugguccuccugccccuggugagcucccagugcgugaaccucaccacccgcacgcagcugccgcccgccuacaccaacagcuucacccggggcgucuacuaccccgacaagguguuccgcuccagcgugcugcacuccacccaggaccucuuccugcccuucuucagcaacgucacgugguuccacgccauccacguguccgggaccaacggcaccaagcgguucgacaacccggugcugcccuucaacgacggggucuacuucgcgagcaccgagaaguccaacaucauccgcggcuggaucuucgggacgacccucgacagcaagacccagucccugcugaucgugaacaacgccaccaacguggucaucaaggugugcgaguuccaguucugcaacgaccccuuccucggcguguacuaccacaagaacaacaagagcuggauggaguccgaguuccgggucuacagcuccgccaacaacugcacguucgaguacgugagccagcccuuccugauggaccuggagggcaagcaggggaacuucaagaaccuccgcgaguucguguucaagaacaucgacggcuacuucaagaucuacuccaagcacaccccgaucaaccugguccgggaccugccccagggguucagcgcccucgagccccugguggaccugcccaucggcaucaacaucacccgcuuccagacccuccuggcccugcaccgguccuaccucacgccgggggacagcagcuccggcuggaccgcgggcgccgccgccuacuacgugggguaccugcagccccgcaccuuccugcucaaguacaacgagaacggcaccaucacggacgcggucgacugcgcccuggacccccugagcgagaccaagugcacccucaaguccuucaccguggagaaggggaucuaccagacgagcaacuuccgggugcagcccaccgaguccaucguccgcuucccgaacaucaccaaccugugccccuucggcgagguguucaacgccacccgguucgccagcgucuacgccuggaaccgcaagcggaucuccaacugcguggcggacuacagcgugcuguacaacuccgccagcuucuccacguucaagugcuacggcgucagccccaccaagcucaacgaccugugcuucaccaacguguacgccgacuccuucgugauccgcggggacgagguccggcagaucgcccccggccagaccgggaagaucgccgacuacaacuacaagcugccggacgacuucacgggcugcgugaucgcguggaacagcaacaaccucgacuccaaggucgggggcaacuacaacuaccuguaccgccuguuccgcaagagcaaccucaagcccuucgagcgggacaucuccaccgagaucuaccaggccggcagcacccccugcaacgggguggagggcuucaacugcuacuucccccugcaguccuacggguuccagccgaccaacggcgugggguaccagcccuaccggguggucgugcugagcuucgagcuccugcacgcccccgccacggugugcggccccaagaaguccaccaaccuggucaagaacaagugcgugaacuucaacuucaacggccucaccgggaccggcgugcugaccgagagcaacaagaaguuccugccguuccagcaguucgggcgcgacaucgccgacacgaccgacgcgguccgcgacccccagacccuggagauccucgacaucacccccugcagcuucggcgggguguccgugaucacgccgggcaccaacaccagcaaccaggucgccgugcuguaccagggcgugaacugcaccgagguccccguggccauccacgccgaccagcugacgcccaccuggcggguguacuccaccggcagcaacgucuuccagacccgcgccgggugccucaucggcgcggagcacgugaacaacuccuacgagugcgacauccccaucggggccggcaucugcgccagcuaccagacgcagaccaacuccccgcggcgcgcccggagcguggcgucccagagcaucaucgccuacaccaugucccugggcgccgagaacagcgucgccuacuccaacaacagcaucgccauccccaccaacuucacgaucuccgugaccaccgagauccugcccgugagcaugaccaagacgagcgucgacugcaccauguacaucugcggggacuccaccgagugcagcaaccuccugcugcaguacggcuccuucugcacccagcucaaccgcgcgcugacggggaucgccguggagcaggacaagaacacccaggagguguucgcccaggucaagcagaucuacaagacgcccccgaucaaggacuucggcggguucaacuucagccagauccugcccgaccccuccaagcccagcaagcgguccuucaucgaggaccuccuguucaacaaggugacccuggccgacgccggcuucaucaagcaguacggcgacugccucggggacaucgcggcccgcgaccugaucugcgcccagaaguucaacggccugaccgugcucccgccccugcugaccgacgagaugaucgcccaguacaccagcgcccuccuggcggggaccaucacguccggcuggaccuucggggccggcgccgcccugcagauccccuucgcgaugcagauggccuaccgguucaacggcaucggggucacccagaacgugcucuacgagaaccagaagcugaucgccaaccaguucaacagcgccaucggcaagauccaggacucccugagcuccaccgccagcgcgcucgggaagcugcaggacguggucaaccagaacgcccaggcccugaacacgcucgugaagcagcuguccagcaacuucggcgccaucuccagcgugcugaacgacauccucucccgccuggacccgcccgaggccgaggugcagaucgaccggcugaucaccgggcgccuccagagccugcagaccuacgugacccagcagcugauccgggcggccgagauccgcgccagcgccaaccucgccgcgaccaagauguccgagugcguccugggccagagcaagcggguggacuucugcggcaagggguaccaccugauguccuucccccagagcgccccgcacggcguggucuuccuccacgugacguacguccccgcccaggagaagaacuucaccaccgcccccgcgaucugccacgacgggaaggcccacuucccccgcgagggcguguucguguccaacgggacccacugguucgucacgcagcggaacuucuacgagccgcagaucaucaccaccgacaacaccuucgugagcggcaacugcgacguggucaucggcaucgugaacaacacgguguacgacccccugcagcccgagcuggacuccuucaaggaggagcucgacaaguacuucaagaaccacaccagccccgacgucgaccugggggacaucuccggcaucaacgccagcguggugaacauccagaaggagaucgaccgccugaacgaggucgccaagaaccucaacgagucccugaucgaccugcaggagcucgggaaguacgagcaguacaucaaguggccgugguacaucuggcugggcuucaucgccggccugaucgcgaucgugauggugaccaucaugcucugcugcaugaccagcugcugcuccugccugaaggggugcugcagcugcggcuccugcugcaaguucgacgaggacgacagcgagcccguccugaagggggugaagcuccacuacacgugaggacuagucccuguucccagagcccacuuuuuuuucuuuuuuugaaauaaaauagccugucuuucagaucuaaaaaaaaaaaaaaaaaaaaaaaaaaaaaaaaaaaaaaaaaaaaaaaaaaaaaaaaaaaaaaaaaaaaaaaaaaaaaaaaaaaaaaaaaaaaaaaaaaaa

SEQ ID NO: 25059 - RNA, 4167 nt, Artificial Sequence
  SARS-CoV-2/Wuhan/WIV05/2019__EPI_ISL_402128 spike protein mRNA gc (1-1273)(K986P_V987P_A222V_D614G)
aggagagggcgcuuggcuugcaaggacccugagcugcggcauugaagcacacccaacccaacucgacugaagucagccucacugaaccggaucugagaaucuucucucucugggcuugccagggcucuccgaaccuagcuagcauccucuucaauuccaacuagaaagcuuaccauguucguguuccugguccuccugccccuggugagcucccagugcgugaaccucaccacccgcacgcagcugccgcccgccuacaccaacagcuucacccggggcgucuacuaccccgacaagguguuccgcuccagcgugcugcacuccacccaggaccucuuccugcccuucuucagcaacgucacgugguuccacgccauccacguguccgggaccaacggcaccaagcgguucgacaacccggugcugcccuucaacgacggggucuacuucgcgagcaccgagaaguccaacaucauccgcggcuggaucuucgggacgacccucgacagcaagacccagucccugcugaucgugaacaacgccaccaacguggucaucaaggugugcgaguuccaguucugcaacgaccccuuccucggcguguacuaccacaagaacaacaagagcuggauggaguccgaguuccgggucuacagcuccgccaacaacugcacguucgaguacgugagccagcccuuccugauggaccuggagggcaagcaggggaacuucaagaaccuccgcgaguucguguucaagaacaucgacggcuacuucaagaucuacuccaagcacaccccgaucaaccugguccgggaccugccccagggguucagcguccucgagccccugguggaccugcccaucggcaucaacaucacccgcuuccagacccuccuggcccugcaccgguccuaccucacgccgggggacagcagcuccggcuggaccgcgggcgccgccgccuacuacgugggguaccugcagccccgcaccuuccugcucaaguacaacgagaacggcaccaucacggacgcggucgacugcgcccuggacccccugagcgagaccaagugcacccucaaguccuucaccguggagaaggggaucuaccagacgagcaacuuccgggugcagcccaccgaguccaucguccgcuucccgaacaucaccaaccugugccccuucggcgagguguucaacgccacccgguucgccagcgucuacgccuggaaccgcaagcggaucuccaacugcguggcggacuacagcgugcuguacaacuccgccagcuucuccacguucaagugcuacggcgucagccccaccaagcucaacgaccugugcuucaccaacguguacgccgacuccuucgugauccgcggggacgagguccggcagaucgcccccggccagaccgggaagaucgccgacuacaacuacaagcugccggacgacuucacgggcugcgugaucgcguggaacagcaacaaccucgacuccaaggucgggggcaacuacaacuaccuguaccgccuguuccgcaagagcaaccucaagcccuucgagcgggacaucuccaccgagaucuaccaggccggcagcacccccugcaacgggguggagggcuucaacugcuacuucccccugcaguccuacggguuccagccgaccaacggcgugggguaccagcccuaccggguggucgugcugagcuucgagcuccugcacgcccccgccacggugugcggccccaagaaguccaccaaccuggucaagaacaagugcgugaacuucaacuucaacggccucaccgggaccggcgugcugaccgagagcaacaagaaguuccugccguuccagcaguucgggcgcgacaucgccgacacgaccgacgcgguccgcgacccccagacccuggagauccucgacaucacccccugcagcuucggcgggguguccgugaucacgccgggcaccaacaccagcaaccaggucgccgugcuguaccagggcgugaacugcaccgagguccccguggccauccacgccgaccagcugacgcccaccuggcggguguacuccaccggcagcaacgucuuccagacccgcgccgggugccucaucggcgcggagcacgugaacaacuccuacgagugcgacauccccaucggggccggcaucugcgccagcuaccagacgcagaccaacuccccgcggcgcgcccggagcguggcgucccagagcaucaucgccuacaccaugucccugggcgccgagaacagcgucgccuacuccaacaacagcaucgccauccccaccaacuucacgaucuccgugaccaccgagauccugcccgugagcaugaccaagacgagcgucgacugcaccauguacaucugcggggacuccaccgagugcagcaaccuccugcugcaguacggcuccuucugcacccagcucaaccgcgcgcugacggggaucgccguggagcaggacaagaacacccaggagguguucgcccaggucaagcagaucuacaagacgcccccgaucaaggacuucggcggguucaacuucagccagauccugcccgaccccuccaagcccagcaagcgguccuucaucgaggaccuccuguucaacaaggugacccuggccgacgccggcuucaucaagcaguacggcgacugccucggggacaucgcggcccgcgaccugaucugcgcccagaaguucaacggccugaccgugcucccgccccugcugaccgacgagaugaucgcccaguacaccagcgcccuccuggcggggaccaucacguccggcuggaccuucggggccggcgccgcccugcagauccccuucgcgaugcagauggccuaccgguucaacggcaucggggucacccagaacgugcucuacgagaaccagaagcugaucgccaaccaguucaacagcgccaucggcaagauccaggacucccugagcuccaccgccagcgcgcucgggaagcugcaggacguggucaaccagaacgcccaggcccugaacacgcucgugaagcagcuguccagcaacuucggcgccaucuccagcgugcugaacgacauccucucccgccuggacccgcccgaggccgaggugcagaucgaccggcugaucaccgggcgccuccagagccugcagaccuacgugacccagcagcugauccgggcggccgagauccgcgccagcgccaaccucgccgcgaccaagauguccgagugcguccugggccagagcaagcggguggacuucugcggcaagggguaccaccugauguccuucccccagagcgccccgcacggcguggucuuccuccacgugacguacguccccgcccaggagaagaacuucaccaccgcccccgcgaucugccacgacgggaaggcccacuucccccgcgagggcguguucguguccaacgggacccacugguucgucacgcagcggaacuucuacgagccgcagaucaucaccaccgacaacaccuucgugagcggcaacugcgacguggucaucggcaucgugaacaacacgguguacgacccccugcagcccgagcuggacuccuucaaggaggagcucgacaaguacuucaagaaccacaccagccccgacgucgaccugggggacaucuccggcaucaacgccagcguggugaacauccagaaggagaucgaccgccugaacgaggucgccaagaaccucaacgagucccugaucgaccugcaggagcucgggaaguacgagcaguacaucaaguggccgugguacaucuggcugggcuucaucgccggccugaucgcgaucgugauggugaccaucaugcucugcugcaugaccagcugcugcuccugccugaaggggugcugcagcugcggcuccugcugcaaguucgacgaggacgacagcgagcccguccugaagggggugaagcuccacuacacgugaggacuagucccuguucccagagcccacuuuuuuuucuuuuuuugaaauaaaauagccugucuuucagaucuaaaaaaaaaaaaaaaaaaaaaaaaaaaaaaaaaaaaaaaaaaaaaaaaaaaaaaaaaaaaaaaaaaaaaaaaaaaaaaaaaaaaaaaaaaaaaaaaaaaa

SEQ ID NO: 25060 - RNA, 4167 nt, Artificial Sequence
  SARS-CoV-2/Wuhan/WIV05/2019__EPI_ISL_402128 spike protein mRNA gc (1-1273)(K986P_V987P_N439K_D614G)
aggagagggcgcuuggcuugcaaggacccugagcugcggcauugaagcacacccaacccaacucgacugaagucagccucacugaaccggaucugagaaucuucucucucugggcuugccagggcucuccgaaccuagcuagcauccucuucaauuccaacuagaaagcuuaccauguucguguuccugguccuccugccccuggugagcucccagugcgugaaccucaccacccgcacgcagcugccgcccgccuacaccaacagcuucacccggggcgucuacuaccccgacaagguguuccgcuccagcgugcugcacuccacccaggaccucuuccugcccuucuucagcaacgucacgugguuccacgccauccacguguccgggaccaacggcaccaagcgguucgacaacccggugcugcccuucaacgacggggucuacuucgcgagcaccgagaaguccaacaucauccgcggcuggaucuucgggacgacccucgacagcaagacccagucccugcugaucgugaacaacgccaccaacguggucaucaaggugugcgaguuccaguucugcaacgaccccuuccucggcguguacuaccacaagaacaacaagagcuggauggaguccgaguuccgggucuacagcuccgccaacaacugcacguucgaguacgugagccagcccuuccugauggaccuggagggcaagcaggggaacuucaagaaccuccgcgaguucguguucaagaacaucgacggcuacuucaagaucuacuccaagcacaccccgaucaaccugguccgggaccugccccagggguucagcgcccucgagccccugguggaccugcccaucggcaucaacaucacccgcuuccagacccuccuggcccugcaccgguccuaccucacgccgggggacagcagcuccggcuggaccgcgggcgccgccgccuacuacgugggguaccugcagccccgcaccuuccugcucaaguacaacgagaacggcaccaucacggacgcggucgacugcgcccuggacccccugagcgagaccaagugcacccucaaguccuucaccguggagaaggggaucuaccagacgagcaacuuccgggugcagcccaccgaguccaucguccgcuucccgaacaucaccaaccugugccccuucggcgagguguucaacgccacccgguucgccagcgucuacgccuggaaccgcaagcggaucuccaacugcguggcggacuacagcgugcuguacaacuccgccagcuucuccacguucaagugcuacggcgucagccccaccaagcucaacgaccugugcuucaccaacguguacgccgacuccuucgugauccgcggggacgagguccggcagaucgcccccggccagaccgggaagaucgccgacuacaacuacaagcugccggacgacuucacgggcugcgugaucgcguggaacagcaagaaccucgacuccaaggucgggggcaacuacaacuaccuguaccgccuguuccgcaagagcaaccucaagcccuucgagcgggacaucuccaccgagaucuaccaggccggcagcacccccugcaacgggguggagggcuucaacugcuacuucccccugcaguccuacggguuccagccgaccaacggcgugggguaccagcccuaccggguggucgugcugagcuucgagcuccugcacgcccccgccacggugugcggccccaagaaguccaccaaccuggucaagaacaagugcgugaacuucaacuucaacggccucaccgggaccggcgugcugaccgagagcaacaagaaguuccugccguuccagcaguucgggcgcgacaucgccgacacgaccgacgcgguccgcgacccccagacccuggagauccucgacaucacccccugcagcuucggcgggguguccgugaucacgccgggcaccaacaccagcaaccaggucgccgugcuguaccagggcgugaacugcaccgagguccccguggccauccacgccgaccagcugacgcccaccuggcggguguacuccaccggcagcaacgucuuccagacccgcgccgggugccucaucggcgcggagcacgugaacaacuccuacgagugcgacauccccaucggggccggcaucugcgccagcuaccagacgcagaccaacuccccgcggcgcgcccggagcguggcgucccagagcaucaucgccuacaccaugucccugggcgccgagaacagcgucgccuacuccaacaacagcaucgccauccccaccaacuucacgaucuccgugaccaccgagauccugcccgugagcaugaccaagacgagcgucgacugcaccauguacaucugcggggacuccaccgagugcagcaaccuccugcugcaguacggcuccuucugcacccagcucaaccgcgcgcugacggggaucgccguggagcaggacaagaacacccaggagguguucgcccaggucaagcagaucuacaagacgcccccgaucaaggacuucggcggguucaacuucagccagauccugcccgaccccuccaagcccagcaagcgguccuucaucgaggaccuccuguucaacaaggugacccuggccgacgccggcuucaucaagcaguacggcgacugccucggggacaucgcggcccgcgaccugaucugcgcccagaaguucaacggccugaccgugcucccgccccugcugaccgacgagaugaucgcccaguacaccagcgcccuccuggcggggaccaucacguccggcuggaccuucggggccggcgccgcccugcagauccccuucgcgaugcagauggccuaccgguucaacggcaucggggucacccagaacgugcucuacgagaaccagaagcugaucgccaaccaguucaacagcgccaucggcaagauccaggacucccugagcuccaccgccagcgcgcucgggaagcugcaggacguggucaaccagaacgcccaggcccugaacacgcucgugaagcagcuguccagcaacuucggcgccaucuccagcgugcugaacgacauccucucccgccuggacccgcccgaggccgaggugcagaucgaccggcugaucaccgggcgccuccagagccugcagaccuacgugacccagcagcugauccgggcggccgagauccgcgccagcgccaaccucgccgcgaccaagauguccgagugcguccugggccagagcaagcggguggacuucugcggcaagggguaccaccugauguccuucccccagagcgccccgcacggcguggucuuccuccacgugacguacguccccgcccaggagaagaacuucaccaccgcccccgcgaucugccacgacgggaaggcccacuucccccgcgagggcguguucguguccaacgggacccacugguucgucacgcagcggaacuucuacgagccgcagaucaucaccaccgacaacaccuucgugagcggcaacugcgacguggucaucggcaucgugaacaacacgguguacgacccccugcagcccgagcuggacuccuucaaggaggagcucgacaaguacuucaagaaccacaccagccccgacgucgaccugggggacaucuccggcaucaacgccagcguggugaacauccagaaggagaucgaccgccugaacgaggucgccaagaaccucaacgagucccugaucgaccugcaggagcucgggaaguacgagcaguacaucaaguggccgugguacaucuggcugggcuucaucgccggccugaucgcgaucgugauggugaccaucaugcucugcugcaugaccagcugcugcuccugccugaaggggugcugcagcugcggcuccugcugcaaguucgacgaggacgacagcgagcccguccugaagggggugaagcuccacuacacgugaggacuagucccuguucccagagcccacuuuuuuuucuuuuuuugaaauaaaauagccugucuuucagaucuaaaaaaaaaaaaaaaaaaaaaaaaaaaaaaaaaaaaaaaaaaaaaaaaaaaaaaaaaaaaaaaaaaaaaaaaaaaaaaaaaaaaaaaaaaaaaaaaaaaa

SEQ ID NO: 25061 - RNA, 4167 nt, Artificial Sequence
  SARS-CoV-2/Wuhan/WIV05/2019__EPI_ISL_402128 spike protein mRNA gc (1-1273)(K986P_V987P_S477N_D614G)
aggagagggcgcuuggcuugcaaggacccugagcugcggcauugaagcacacccaacccaacucgacugaagucagccucacugaaccggaucugagaaucuucucucucugggcuugccagggcucuccgaaccuagcuagcauccucuucaauuccaacuagaaagcuuaccauguucguguuccugguccuccugccccuggugagcucccagugcgugaaccucaccacccgcacgcagcugccgcccgccuacaccaacagcuucacccggggcgucuacuaccccgacaagguguuccgcuccagcgugcugcacuccacccaggaccucuuccugcccuucuucagcaacgucacgugguuccacgccauccacguguccgggaccaacggcaccaagcgguucgacaacccggugcugcccuucaacgacggggucuacuucgcgagcaccgagaaguccaacaucauccgcggcuggaucuucgggacgacccucgacagcaagacccagucccugcugaucgugaacaacgccaccaacguggucaucaaggugugcgaguuccaguucugcaacgaccccuuccucggcguguacuaccacaagaacaacaagagcuggauggaguccgaguuccgggucuacagcuccgccaacaacugcacguucgaguacgugagccagcccuuccugauggaccuggagggcaagcaggggaacuucaagaaccuccgcgaguucguguucaagaacaucgacggcuacuucaagaucuacuccaagcacaccccgaucaaccugguccgggaccugccccagggguucagcgcccucgagccccugguggaccugcccaucggcaucaacaucacccgcuuccagacccuccuggcccugcaccgguccuaccucacgccgggggacagcagcuccggcuggaccgcgggcgccgccgccuacuacgugggguaccugcagccccgcaccuuccugcucaaguacaacgagaacggcaccaucacggacgcggucgacugcgcccuggacccccugagcgagaccaagugcacccucaaguccuucaccguggagaaggggaucuaccagacgagcaacuuccgggugcagcccaccgaguccaucguccgcuucccgaacaucaccaaccugugccccuucggcgagguguucaacgccacccgguucgccagcgucuacgccuggaaccgcaagcggaucuccaacugcguggcggacuacagcgugcuguacaacuccgccagcuucuccacguucaagugcuacggcgucagccccaccaagcucaacgaccugugcuucaccaacguguacgccgacuccuucgugauccgcggggacgagguccggcagaucgcccccggccagaccgggaagaucgccgacuacaacuacaagcugccggacgacuucacgggcugcgugaucgcguggaacagcaacaaccucgacuccaaggucgggggcaacuacaacuaccuguaccgccuguuccgcaagagcaaccucaagcccuucgagcgggacaucuccaccgagaucuaccaggccggcaacacccccugcaacgggguggagggcuucaacugcuacuucccccugcaguccuacggguuccagccgaccaacggcgugggguaccagcccuaccggguggucgugcugagcuucgagcuccugcacgcccccgccacggugugcggccccaagaaguccaccaaccuggucaagaacaagugcgugaacuucaacuucaacggccucaccgggaccggcgugcugaccgagagcaacaagaaguuccugccguuccagcaguucgggcgcgacaucgccgacacgaccgacgcgguccgcgacccccagacccuggagauccucgacaucacccccugcagcuucggcgggguguccgugaucacgccgggcaccaacaccagcaaccaggucgccgugcuguaccagggcgugaacugcaccgagguccccguggccauccacgccgaccagcugacgcccaccuggcggguguacuccaccggcagcaacgucuuccagacccgcgccgggugccucaucggcgcggagcacgugaacaacuccuacgagugcgacauccccaucggggccggcaucugcgccagcuaccagacgcagaccaacuccccgcggcgcgcccggagcguggcgucccagagcaucaucgccuacaccaugucccugggcgccgagaacagcgucgccuacuccaacaacagcaucgccauccccaccaacuucacgaucuccgugaccaccgagauccugcccgugagcaugaccaagacgagcgucgacugcaccauguacaucugcggggacuccaccgagugcagcaaccuccugcugcaguacggcuccuucugcacccagcucaaccgcgcgcugacggggaucgccguggagcaggacaagaacacccaggagguguucgcccaggucaagcagaucuacaagacgcccccgaucaaggacuucggcggguucaacuucagccagauccugcccgaccccuccaagcccagcaagcgguccuucaucgaggaccuccuguucaacaaggugacccuggccgacgccggcuucaucaagcaguacggcgacugccucggggacaucgcggcccgcgaccugaucugcgcccagaaguucaacggccugaccgugcucccgccccugcugaccgacgagaugaucgcccaguacaccagcgcccuccuggcggggaccaucacguccggcuggaccuucggggccggcgccgcccugcagauccccuucgcgaugcagauggccuaccgguucaacggcaucggggucacccagaacgugcucuacgagaaccagaagcugaucgccaaccaguucaacagcgccaucggcaagauccaggacucccugagcuccaccgccagcgcgcucgggaagcugcaggacguggucaaccagaacgcccaggcccugaacacgcucgugaagcagcuguccagcaacuucggcgccaucuccagcgugcugaacgacauccucucccgccuggacccgcccgaggccgaggugcagaucgaccggcugaucaccgggcgccuccagagccugcagaccuacgugacccagcagcugauccgggcggccgagauccgcgccagcgccaaccucgccgcgaccaagauguccgagugcguccugggccagagcaagcggguggacuucugcggcaagggguaccaccugauguccuucccccagagcgccccgcacggcguggucuuccuccacgugacguacguccccgcccaggagaagaacuucaccaccgcccccgcgaucugccacgacgggaaggcccacuucccccgcgagggcguguucguguccaacgggacccacugguucgucacgcagcggaacuucuacgagccgcagaucaucaccaccgacaacaccuucgugagcggcaacugcgacguggucaucggcaucgugaacaacacgguguacgacccccugcagcccgagcuggacuccuucaaggaggagcucgacaaguacuucaagaaccacaccagccccgacgucgaccugggggacaucuccggcaucaacgccagcguggugaacauccagaaggagaucgaccgccugaacgaggucgccaagaaccucaacgagucccugaucgaccugcaggagcucgggaaguacgagcaguacaucaaguggccgugguacaucuggcugggcuucaucgccggccugaucgcgaucgugauggugaccaucaugcucugcugcaugaccagcugcugcuccugccugaaggggugcugcagcugcggcuccugcugcaaguucgacgaggacgacagcgagcccguccugaagggggugaagcuccacuacacgugaggacuagucccuguucccagagcccacuuuuuuuucuuuuuuugaaauaaaauagccugucuuucagaucuaaaaaaaaaaaaaaaaaaaaaaaaaaaaaaaaaaaaaaaaaaaaaaaaaaaaaaaaaaaaaaaaaaaaaaaaaaaaaaaaaaaaaaaaaaaaaaaaaaaa

SEQ ID NO: 25062 - RNA, 4167 nt, Artificial Sequence
  SARS-CoV-2/Wuhan/WIV05/2019__EPI_ISL_402128 spike protein mRNA gc (1-1273)(K986P_V987P_N501Y_D614G)
aggagagggcgcuuggcuugcaaggacccugagcugcggcauugaagcacacccaacccaacucgacugaagucagccucacugaaccggaucugagaaucuucucucucugggcuugccagggcucuccgaaccuagcuagcauccucuucaauuccaacuagaaagcuuaccauguucguguuccugguccuccugccccuggugagcucccagugcgugaaccucaccacccgcacgcagcugccgcccgccuacaccaacagcuucacccggggcgucuacuaccccgacaagguguuccgcuccagcgugcugcacuccacccaggaccucuuccugcccuucuucagcaacgucacgugguuccacgccauccacguguccgggaccaacggcaccaagcgguucgacaacccggugcugcccuucaacgacggggucuacuucgcgagcaccgagaaguccaacaucauccgcggcuggaucuucgggacgacccucgacagcaagacccagucccugcugaucgugaacaacgccaccaacguggucaucaaggugugcgaguuccaguucugcaacgaccccuuccucggcguguacuaccacaagaacaacaagagcuggauggaguccgaguuccgggucuacagcuccgccaacaacugcacguucgaguacgugagccagcccuuccugauggaccuggagggcaagcaggggaacuucaagaaccuccgcgaguucguguucaagaacaucgacggcuacuucaagaucuacuccaagcacaccccgaucaaccugguccgggaccugccccagggguucagcgcccucgagccccugguggaccugcccaucggcaucaacaucacccgcuuccagacccuccuggcccugcaccgguccuaccucacgccgggggacagcagcuccggcuggaccgcgggcgccgccgccuacuacgugggguaccugcagccccgcaccuuccugcucaaguacaacgagaacggcaccaucacggacgcggucgacugcgcccuggacccccugagcgagaccaagugcacccucaaguccuucaccguggagaaggggaucuaccagacgagcaacuuccgggugcagcccaccgaguccaucguccgcuucccgaacaucaccaaccugugccccuucggcgagguguucaacgccacccgguucgccagcgucuacgccuggaaccgcaagcggaucuccaacugcguggcggacuacagcgugcuguacaacuccgccagcuucuccacguucaagugcuacggcgucagccccaccaagcucaacgaccugugcuucaccaacguguacgccgacuccuucgugauccgcggggacgagguccggcagaucgcccccggccagaccgggaagaucgccgacuacaacuacaagcugccggacgacuucacgggcugcgugaucgcguggaacagcaacaaccucgacuccaaggucgggggcaacuacaacuaccuguaccgccuguuccgcaagagcaaccucaagcccuucgagcgggacaucuccaccgagaucuaccaggccggcagcacccccugcaacgggguggagggcuucaacugcuacuucccccugcaguccuacggguuccagccgaccuacggcgugggguaccagcccuaccggguggucgugcugagcuucgagcuccugcacgcccccgccacggugugcggccccaagaaguccaccaaccuggucaagaacaagugcgugaacuucaacuucaacggccucaccgggaccggcgugcugaccgagagcaacaagaaguuccugccguuccagcaguucgggcgcgacaucgccgacacgaccgacgcgguccgcgacccccagacccuggagauccucgacaucacccccugcagcuucggcgggguguccgugaucacgccgggcaccaacaccagcaaccaggucgccgugcuguaccagggcgugaacugcaccgagguccccguggccauccacgccgaccagcugacgcccaccuggcggguguacuccaccggcagcaacgucuuccagacccgcgccgggugccucaucggcgcggagcacgugaacaacuccuacgagugcgacauccccaucggggccggcaucugcgccagcuaccagacgcagaccaacuccccgcggcgcgcccggagcguggcgucccagagcaucaucgccuacaccaugucccugggcgccgagaacagcgucgccuacuccaacaacagcaucgccauccccaccaacuucacgaucuccgugaccaccgagauccugcccgugagcaugaccaagacgagcgucgacugcaccauguacaucugcggggacuccaccgagugcagcaaccuccugcugcaguacggcuccuucugcacccagcucaaccgcgcgcugacggggaucgccguggagcaggacaagaacacccaggagguguucgcccaggucaagcagaucuacaagacgcccccgaucaaggacuucggcggguucaacuucagccagauccugcccgaccccuccaagcccagcaagcgguccuucaucgaggaccuccuguucaacaaggugacccuggccgacgccggcuucaucaagcaguacggcgacugccucggggacaucgcggcccgcgaccugaucugcgcccagaaguucaacggccugaccgugcucccgccccugcugaccgacgagaugaucgcccaguacaccagcgcccuccuggcggggaccaucacguccggcuggaccuucggggccggcgccgcccugcagauccccuucgcgaugcagauggccuaccgguucaacggcaucggggucacccagaacgugcucuacgagaaccagaagcugaucgccaaccaguucaacagcgccaucggcaagauccaggacucccugagcuccaccgccagcgcgcucgggaagcugcaggacguggucaaccagaacgcccaggcccugaacacgcucgugaagcagcuguccagcaacuucggcgccaucuccagcgugcugaacgacauccucucccgccuggacccgcccgaggccgaggugcagaucgaccggcugaucaccgggcgccuccagagccugcagaccuacgugacccagcagcugauccgggcggccgagauccgcgccagcgccaaccucgccgcgaccaagauguccgagugcguccugggccagagcaagcggguggacuucugcggcaagggguaccaccugauguccuucccccagagcgccccgcacggcguggucuuccuccacgugacguacguccccgcccaggagaagaacuucaccaccgcccccgcgaucugccacgacgggaaggcccacuucccccgcgagggcguguucguguccaacgggacccacugguucgucacgcagcggaacuucuacgagccgcagaucaucaccaccgacaacaccuucgugagcggcaacugcgacguggucaucggcaucgugaacaacacgguguacgacccccugcagcccgagcuggacuccuucaaggaggagcucgacaaguacuucaagaaccacaccagccccgacgucgaccugggggacaucuccggcaucaacgccagcguggugaacauccagaaggagaucgaccgccugaacgaggucgccaagaaccucaacgagucccugaucgaccugcaggagcucgggaaguacgagcaguacaucaaguggccgugguacaucuggcugggcuucaucgccggccugaucgcgaucgugauggugaccaucaugcucugcugcaugaccagcugcugcuccugccugaaggggugcugcagcugcggcuccugcugcaaguucgacgaggacgacagcgagcccguccugaagggggugaagcuccacuacacgugaggacuagucccuguucccagagcccacuuuuuuuucuuuuuuugaaauaaaauagccugucuuucagaucuaaaaaaaaaaaaaaaaaaaaaaaaaaaaaaaaaaaaaaaaaaaaaaaaaaaaaaaaaaaaaaaaaaaaaaaaaaaaaaaaaaaaaaaaaaaaaaaaaaaa

SEQ ID NO: 25063 - RNA, 4161 nt, Artificial Sequence
  SARS-CoV-2/Wuhan/WIV05/2019__EPI_ISL_402128 spike protein mRNA gc (1-1273)(K986P_V987P_H69del_V70del_D614G)
aggagagggcgcuuggcuugcaaggacccugagcugcggcauugaagcacacccaacccaacucgacugaagucagccucacugaaccggaucugagaaucuucucucucugggcuugccagggcucuccgaaccuagcuagcauccucuucaauuccaacuagaaagcuuaccauguucguguuccugguccuccugccccuggugagcucccagugcgugaaccucaccacccgcacgcagcugccgcccgccuacaccaacagcuucacccggggcgucuacuaccccgacaagguguuccgcuccagcgugcugcacuccacccaggaccucuuccugcccuucuucagcaacgucacgugguuccacgccaucuccgggaccaacggcaccaagcgguucgacaacccggugcugcccuucaacgacggggucuacuucgcgagcaccgagaaguccaacaucauccgcggcuggaucuucgggacgacccucgacagcaagacccagucccugcugaucgugaacaacgccaccaacguggucaucaaggugugcgaguuccaguucugcaacgaccccuuccucggcguguacuaccacaagaacaacaagagcuggauggaguccgaguuccgggucuacagcuccgccaacaacugcacguucgaguacgugagccagcccuuccugauggaccuggagggcaagcaggggaacuucaagaaccuccgcgaguucguguucaagaacaucgacggcuacuucaagaucuacuccaagcacaccccgaucaaccugguccgggaccugccccagggguucagcgcccucgagccccugguggaccugcccaucggcaucaacaucacccgcuuccagacccuccuggcccugcaccgguccuaccucacgccgggggacagcagcuccggcuggaccgcgggcgccgccgccuacuacgugggguaccugcagccccgcaccuuccugcucaaguacaacgagaacggcaccaucacggacgcggucgacugcgcccuggacccccugagcgagaccaagugcacccucaaguccuucaccguggagaaggggaucuaccagacgagcaacuuccgggugcagcccaccgaguccaucguccgcuucccgaacaucaccaaccugugccccuucggcgagguguucaacgccacccgguucgccagcgucuacgccuggaaccgcaagcggaucuccaacugcguggcggacuacagcgugcuguacaacuccgccagcuucuccacguucaagugcuacggcgucagccccaccaagcucaacgaccugugcuucaccaacguguacgccgacuccuucgugauccgcggggacgagguccggcagaucgcccccggccagaccgggaagaucgccgacuacaacuacaagcugccggacgacuucacgggcugcgugaucgcguggaacagcaacaaccucgacuccaaggucgggggcaacuacaacuaccuguaccgccuguuccgcaagagcaaccucaagcccuucgagcgggacaucuccaccgagaucuaccaggccggcagcacccccugcaacgggguggagggcuucaacugcuacuucccccugcaguccuacggguuccagccgaccaacggcgugggguaccagcccuaccggguggucgugcugagcuucgagcuccugcacgcccccgccacggugugcggccccaagaaguccaccaaccuggucaagaacaagugcgugaacuucaacuucaacggccucaccgggaccggcgugcugaccgagagcaacaagaaguuccugccguuccagcaguucgggcgcgacaucgccgacacgaccgacgcgguccgcgacccccagacccuggagauccucgacaucacccccugcagcuucggcgggguguccgugaucacgccgggcaccaacaccagcaaccaggucgccgugcuguaccagggcgugaacugcaccgagguccccguggccauccacgccgaccagcugacgcccaccuggcggguguacuccaccggcagcaacgucuuccagacccgcgccgggugccucaucggcgcggagcacgugaacaacuccuacgagugcgacauccccaucggggccggcaucugcgccagcuaccagacgcagaccaacuccccgcggcgcgcccggagcguggcgucccagagcaucaucgccuacaccaugucccugggcgccgagaacagcgucgccuacuccaacaacagcaucgccauccccaccaacuucacgaucuccgugaccaccgagauccugcccgugagcaugaccaagacgagcgucgacugcaccauguacaucugcggggacuccaccgagugcagcaaccuccugcugcaguacggcuccuucugcacccagcucaaccgcgcgcugacggggaucgccguggagcaggacaagaacacccaggagguguucgcccaggucaagcagaucuacaagacgcccccgaucaaggacuucggcggguucaacuucagccagauccugcccgaccccuccaagcccagcaagcgguccuucaucgaggaccuccuguucaacaaggugacccuggccgacgccggcuucaucaagcaguacggcgacugccucggggacaucgcggcccgcgaccugaucugcgcccagaaguucaacggccugaccgugcucccgccccugcugaccgacgagaugaucgcccaguacaccagcgcccuccuggcggggaccaucacguccggcuggaccuucggggccggcgccgcccugcagauccccuucgcgaugcagauggccuaccgguucaacggcaucggggucacccagaacgugcucuacgagaaccagaagcugaucgccaaccaguucaacagcgccaucggcaagauccaggacucccugagcuccaccgccagcgcgcucgggaagcugcaggacguggucaaccagaacgcccaggcccugaacacgcucgugaagcagcuguccagcaacuucggcgccaucuccagcgugcugaacgacauccucucccgccuggacccgcccgaggccgaggugcagaucgaccggcugaucaccgggcgccuccagagccugcagaccuacgugacccagcagcugauccgggcggccgagauccgcgccagcgccaaccucgccgcgaccaagauguccgagugcguccugggccagagcaagcggguggacuucugcggcaagggguaccaccugauguccuucccccagagcgccccgcacggcguggucuuccuccacgugacguacguccccgcccaggagaagaacuucaccaccgcccccgcgaucugccacgacgggaaggcccacuucccccgcgagggcguguucguguccaacgggacccacugguucgucacgcagcggaacuucuacgagccgcagaucaucaccaccgacaacaccuucgugagcggcaacugcgacguggucaucggcaucgugaacaacacgguguacgacccccugcagcccgagcuggacuccuucaaggaggagcucgacaaguacuucaagaaccacaccagccccgacgucgaccugggggacaucuccggcaucaacgccagcguggugaacauccagaaggagaucgaccgccugaacgaggucgccaagaaccucaacgagucccugaucgaccugcaggagcucgggaaguacgagcaguacaucaaguggccgugguacaucuggcugggcuucaucgccggccugaucgcgaucgugauggugaccaucaugcucugcugcaugaccagcugcugcuccugccugaaggggugcugcagcugcggcuccugcugcaaguucgacgaggacgacagcgagcccguccugaagggggugaagcuccacuacacgugaggacuagucccuguucccagagcccacuuuuuuuucuuuuuuugaaauaaaauagccugucuuucagaucuaaaaaaaaaaaaaaaaaaaaaaaaaaaaaaaaaaaaaaaaaaaaaaaaaaaaaaaaaaaaaaaaaaaaaaaaaaaaaaaaaaaaaaaaaaaaaaaaaaaa

SEQ ID NO: 25064 - RNA, 4167 nt, Artificial Sequence
  SARS-CoV-2/Wuhan/WIV05/2019__EPI_ISL_402128 spike protein mRNA gc (1-1273)(K986P_V987P_Y453F_D614G)
aggagagggcgcuuggcuugcaaggacccugagcugcggcauugaagcacacccaacccaacucgacugaagucagccucacugaaccggaucugagaaucuucucucucugggcuugccagggcucuccgaaccuagcuagcauccucuucaauuccaacuagaaagcuuaccauguucguguuccugguccuccugccccuggugagcucccagugcgugaaccucaccacccgcacgcagcugccgcccgccuacaccaacagcuucacccggggcgucuacuaccccgacaagguguuccgcuccagcgugcugcacuccacccaggaccucuuccugcccuucuucagcaacgucacgugguuccacgccauccacguguccgggaccaacggcaccaagcgguucgacaacccggugcugcccuucaacgacggggucuacuucgcgagcaccgagaaguccaacaucauccgcggcuggaucuucgggacgacccucgacagcaagacccagucccugcugaucgugaacaacgccaccaacguggucaucaaggugugcgaguuccaguucugcaacgaccccuuccucggcguguacuaccacaagaacaacaagagcuggauggaguccgaguuccgggucuacagcuccgccaacaacugcacguucgaguacgugagccagcccuuccugauggaccuggagggcaagcaggggaacuucaagaaccuccgcgaguucguguucaagaacaucgacggcuacuucaagaucuacuccaagcacaccccgaucaaccugguccgggaccugccccagggguucagcgcccucgagccccugguggaccugcccaucggcaucaacaucacccgcuuccagacccuccuggcccugcaccgguccuaccucacgccgggggacagcagcuccggcuggaccgcgggcgccgccgccuacuacgugggguaccugcagccccgcaccuuccugcucaaguacaacgagaacggcaccaucacggacgcggucgacugcgcccuggacccccugagcgagaccaagugcacccucaaguccuucaccguggagaaggggaucuaccagacgagcaacuuccgggugcagcccaccgaguccaucguccgcuucccgaacaucaccaaccugugccccuucggcgagguguucaacgccacccgguucgccagcgucuacgccuggaaccgcaagcggaucuccaacugcguggcggacuacagcgugcuguacaacuccgccagcuucuccacguucaagugcuacggcgucagccccaccaagcucaacgaccugugcuucaccaacguguacgccgacuccuucgugauccgcggggacgagguccggcagaucgcccccggccagaccgggaagaucgccgacuacaacuacaagcugccggacgacuucacgggcugcgugaucgcguggaacagcaacaaccucgacuccaaggucgggggcaacuacaacuaccuguuccgccuguuccgcaagagcaaccucaagcccuucgagcgggacaucuccaccgagaucuaccaggccggcagcacccccugcaacgggguggagggcuucaacugcuacuucccccugcaguccuacggguuccagccgaccaacggcgugggguaccagcccuaccggguggucgugcugagcuucgagcuccugcacgcccccgccacggugugcggccccaagaaguccaccaaccuggucaagaacaagugcgugaacuucaacuucaacggccucaccgggaccggcgugcugaccgagagcaacaagaaguuccugccguuccagcaguucgggcgcgacaucgccgacacgaccgacgcgguccgcgacccccagacccuggagauccucgacaucacccccugcagcuucggcgggguguccgugaucacgccgggcaccaacaccagcaaccaggucgccgugcuguaccagggcgugaacugcaccgagguccccguggccauccacgccgaccagcugacgcccaccuggcggguguacuccaccggcagcaacgucuuccagacccgcgccgggugccucaucggcgcggagcacgugaacaacuccuacgagugcgacauccccaucggggccggcaucugcgccagcuaccagacgcagaccaacuccccgcggcgcgcccggagcguggcgucccagagcaucaucgccuacaccaugucccugggcgccgagaacagcgucgccuacuccaacaacagcaucgccauccccaccaacuucacgaucuccgugaccaccgagauccugcccgugagcaugaccaagacgagcgucgacugcaccauguacaucugcggggacuccaccgagugcagcaaccuccugcugcaguacggcuccuucugcacccagcucaaccgcgcgcugacggggaucgccguggagcaggacaagaacacccaggagguguucgcccaggucaagcagaucuacaagacgcccccgaucaaggacuucggcggguucaacuucagccagauccugcccgaccccuccaagcccagcaagcgguccuucaucgaggaccuccuguucaacaaggugacccuggccgacgccggcuucaucaagcaguacggcgacugccucggggacaucgcggcccgcgaccugaucugcgcccagaaguucaacggccugaccgugcucccgccccugcugaccgacgagaugaucgcccaguacaccagcgcccuccuggcggggaccaucacguccggcuggaccuucggggccggcgccgcccugcagauccccuucgcgaugcagauggccuaccgguucaacggcaucggggucacccagaacgugcucuacgagaaccagaagcugaucgccaaccaguucaacagcgccaucggcaagauccaggacucccugagcuccaccgccagcgcgcucgggaagcugcaggacguggucaaccagaacgcccaggcccugaacacgcucgugaagcagcuguccagcaacuucggcgccaucuccagcgugcugaacgacauccucucccgccuggacccgcccgaggccgaggugcagaucgaccggcugaucaccgggcgccuccagagccugcagaccuacgugacccagcagcugauccgggcggccgagauccgcgccagcgccaaccucgccgcgaccaagauguccgagugcguccugggccagagcaagcggguggacuucugcggcaagggguaccaccugauguccuucccccagagcgccccgcacggcguggucuuccuccacgugacguacguccccgcccaggagaagaacuucaccaccgcccccgcgaucugccacgacgggaaggcccacuucccccgcgagggcguguucguguccaacgggacccacugguucgucacgcagcggaacuucuacgagccgcagaucaucaccaccgacaacaccuucgugagcggcaacugcgacguggucaucggcaucgugaacaacacgguguacgacccccugcagcccgagcuggacuccuucaaggaggagcucgacaaguacuucaagaaccacaccagccccgacgucgaccugggggacaucuccggcaucaacgccagcguggugaacauccagaaggagaucgaccgccugaacgaggucgccaagaaccucaacgagucccugaucgaccugcaggagcucgggaaguacgagcaguacaucaaguggccgugguacaucuggcugggcuucaucgccggccugaucgcgaucgugauggugaccaucaugcucugcugcaugaccagcugcugcuccugccugaaggggugcugcagcugcggcuccugcugcaaguucgacgaggacgacagcgagcccguccugaagggggugaagcuccacuacacgugaggacuagucccuguucccagagcccacuuuuuuuucuuuuuuugaaauaaaauagccugucuuucagaucuaaaaaaaaaaaaaaaaaaaaaaaaaaaaaaaaaaaaaaaaaaaaaaaaaaaaaaaaaaaaaaaaaaaaaaaaaaaaaaaaaaaaaaaaaaaaaaaaaaaa

SEQ ID NO: 25065 - RNA, 4167 nt, Artificial Sequence
  SARS-CoV-2/Wuhan/WIV05/2019__EPI_ISL_402128 spike protein mRNA gc (1-1273)(K986P_V987P_D614G_I692V)
aggagagggcgcuuggcuugcaaggacccugagcugcggcauugaagcacacccaacccaacucgacugaagucagccucacugaaccggaucugagaaucuucucucucugggcuugccagggcucuccgaaccuagcuagcauccucuucaauuccaacuagaaagcuuaccauguucguguuccugguccuccugccccuggugagcucccagugcgugaaccucaccacccgcacgcagcugccgcccgccuacaccaacagcuucacccggggcgucuacuaccccgacaagguguuccgcuccagcgugcugcacuccacccaggaccucuuccugcccuucuucagcaacgucacgugguuccacgccauccacguguccgggaccaacggcaccaagcgguucgacaacccggugcugcccuucaacgacggggucuacuucgcgagcaccgagaaguccaacaucauccgcggcuggaucuucgggacgacccucgacagcaagacccagucccugcugaucgugaacaacgccaccaacguggucaucaaggugugcgaguuccaguucugcaacgaccccuuccucggcguguacuaccacaagaacaacaagagcuggauggaguccgaguuccgggucuacagcuccgccaacaacugcacguucgaguacgugagccagcccuuccugauggaccuggagggcaagcaggggaacuucaagaaccuccgcgaguucguguucaagaacaucgacggcuacuucaagaucuacuccaagcacaccccgaucaaccugguccgggaccugccccagggguucagcgcccucgagccccugguggaccugcccaucggcaucaacaucacccgcuuccagacccuccuggcccugcaccgguccuaccucacgccgggggacagcagcuccggcuggaccgcgggcgccgccgccuacuacgugggguaccugcagccccgcaccuuccugcucaaguacaacgagaacggcaccaucacggacgcggucgacugcgcccuggacccccugagcgagaccaagugcacccucaaguccuucaccguggagaaggggaucuaccagacgagcaacuuccgggugcagcccaccgaguccaucguccgcuucccgaacaucaccaaccugugccccuucggcgagguguucaacgccacccgguucgccagcgucuacgccuggaaccgcaagcggaucuccaacugcguggcggacuacagcgugcuguacaacuccgccagcuucuccacguucaagugcuacggcgucagccccaccaagcucaacgaccugugcuucaccaacguguacgccgacuccuucgugauccgcggggacgagguccggcagaucgcccccggccagaccgggaagaucgccgacuacaacuacaagcugccggacgacuucacgggcugcgugaucgcguggaacagcaacaaccucgacuccaaggucgggggcaacuacaacuaccuguaccgccuguuccgcaagagcaaccucaagcccuucgagcgggacaucuccaccgagaucuaccaggccggcagcacccccugcaacgggguggagggcuucaacugcuacuucccccugcaguccuacggguuccagccgaccaacggcgugggguaccagcccuaccggguggucgugcugagcuucgagcuccugcacgcccccgccacggugugcggccccaagaaguccaccaaccuggucaagaacaagugcgugaacuucaacuucaacggccucaccgggaccggcgugcugaccgagagcaacaagaaguuccugccguuccagcaguucgggcgcgacaucgccgacacgaccgacgcgguccgcgacccccagacccuggagauccucgacaucacccccugcagcuucggcgggguguccgugaucacgccgggcaccaacaccagcaaccaggucgccgugcuguaccagggcgugaacugcaccgagguccccguggccauccacgccgaccagcugacgcccaccuggcggguguacuccaccggcagcaacgucuuccagacccgcgccgggugccucaucggcgcggagcacgugaacaacuccuacgagugcgacauccccaucggggccggcaucugcgccagcuaccagacgcagaccaacuccccgcggcgcgcccggagcguggcgucccagagcgucaucgccuacaccaugucccugggcgccgagaacagcgucgccuacuccaacaacagcaucgccauccccaccaacuucacgaucuccgugaccaccgagauccugcccgugagcaugaccaagacgagcgucgacugcaccauguacaucugcggggacuccaccgagugcagcaaccuccugcugcaguacggcuccuucugcacccagcucaaccgcgcgcugacggggaucgccguggagcaggacaagaacacccaggagguguucgcccaggucaagcagaucuacaagacgcccccgaucaaggacuucggcggguucaacuucagccagauccugcccgaccccuccaagcccagcaagcgguccuucaucgaggaccuccuguucaacaaggugacccuggccgacgccggcuucaucaagcaguacggcgacugccucggggacaucgcggcccgcgaccugaucugcgcccagaaguucaacggccugaccgugcucccgccccugcugaccgacgagaugaucgcccaguacaccagcgcccuccuggcggggaccaucacguccggcuggaccuucggggccggcgccgcccugcagauccccuucgcgaugcagauggccuaccgguucaacggcaucggggucacccagaacgugcucuacgagaaccagaagcugaucgccaaccaguucaacagcgccaucggcaagauccaggacucccugagcuccaccgccagcgcgcucgggaagcugcaggacguggucaaccagaacgcccaggcccugaacacgcucgugaagcagcuguccagcaacuucggcgccaucuccagcgugcugaacgacauccucucccgccuggacccgcccgaggccgaggugcagaucgaccggcugaucaccgggcgccuccagagccugcagaccuacgugacccagcagcugauccgggcggccgagauccgcgccagcgccaaccucgccgcgaccaagauguccgagugcguccugggccagagcaagcggguggacuucugcggcaagggguaccaccugauguccuucccccagagcgccccgcacggcguggucuuccuccacgugacguacguccccgcccaggagaagaacuucaccaccgcccccgcgaucugccacgacgggaaggcccacuucccccgcgagggcguguucguguccaacgggacccacugguucgucacgcagcggaacuucuacgagccgcagaucaucaccaccgacaacaccuucgugagcggcaacugcgacguggucaucggcaucgugaacaacacgguguacgacccccugcagcccgagcuggacuccuucaaggaggagcucgacaaguacuucaagaaccacaccagccccgacgucgaccugggggacaucuccggcaucaacgccagcguggugaacauccagaaggagaucgaccgccugaacgaggucgccaagaaccucaacgagucccugaucgaccugcaggagcucgggaaguacgagcaguacaucaaguggccgugguacaucuggcugggcuucaucgccggccugaucgcgaucgugauggugaccaucaugcucugcugcaugaccagcugcugcuccugccugaaggggugcugcagcugcggcuccugcugcaaguucgacgaggacgacagcgagcccguccugaagggggugaagcuccacuacacgugaggacuagucccuguucccagagcccacuuuuuuuucuuuuuuugaaauaaaauagccugucuuucagaucuaaaaaaaaaaaaaaaaaaaaaaaaaaaaaaaaaaaaaaaaaaaaaaaaaaaaaaaaaaaaaaaaaaaaaaaaaaaaaaaaaaaaaaaaaaaaaaaaaaaa

SEQ ID NO: 25066 - RNA, 4167 nt, Artificial Sequence
  SARS-CoV-2/Wuhan/WIV05/2019__EPI_ISL_402128 spike protein mRNA gc (1-1273)(K986P_V987P_D614G_M1229I)
aggagagggcgcuuggcuugcaaggacccugagcugcggcauugaagcacacccaacccaacucgacugaagucagccucacugaaccggaucugagaaucuucucucucugggcuugccagggcucuccgaaccuagcuagcauccucuucaauuccaacuagaaagcuuaccauguucguguuccugguccuccugccccuggugagcucccagugcgugaaccucaccacccgcacgcagcugccgcccgccuacaccaacagcuucacccggggcgucuacuaccccgacaagguguuccgcuccagcgugcugcacuccacccaggaccucuuccugcccuucuucagcaacgucacgugguuccacgccauccacguguccgggaccaacggcaccaagcgguucgacaacccggugcugcccuucaacgacggggucuacuucgcgagcaccgagaaguccaacaucauccgcggcuggaucuucgggacgacccucgacagcaagacccagucccugcugaucgugaacaacgccaccaacguggucaucaaggugugcgaguuccaguucugcaacgaccccuuccucggcguguacuaccacaagaacaacaagagcuggauggaguccgaguuccgggucuacagcuccgccaacaacugcacguucgaguacgugagccagcccuuccugauggaccuggagggcaagcaggggaacuucaagaaccuccgcgaguucguguucaagaacaucgacggcuacuucaagaucuacuccaagcacaccccgaucaaccugguccgggaccugccccagggguucagcgcccucgagccccugguggaccugcccaucggcaucaacaucacccgcuuccagacccuccuggcccugcaccgguccuaccucacgccgggggacagcagcuccggcuggaccgcgggcgccgccgccuacuacgugggguaccugcagccccgcaccuuccugcucaaguacaacgagaacggcaccaucacggacgcggucgacugcgcccuggacccccugagcgagaccaagugcacccucaaguccuucaccguggagaaggggaucuaccagacgagcaacuuccgggugcagcccaccgaguccaucguccgcuucccgaacaucaccaaccugugccccuucggcgagguguucaacgccacccgguucgccagcgucuacgccuggaaccgcaagcggaucuccaacugcguggcggacuacagcgugcuguacaacuccgccagcuucuccacguucaagugcuacggcgucagccccaccaagcucaacgaccugugcuucaccaacguguacgccgacuccuucgugauccgcggggacgagguccggcagaucgcccccggccagaccgggaagaucgccgacuacaacuacaagcugccggacgacuucacgggcugcgugaucgcguggaacagcaacaaccucgacuccaaggucgggggcaacuacaacuaccuguaccgccuguuccgcaagagcaaccucaagcccuucgagcgggacaucuccaccgagaucuaccaggccggcagcacccccugcaacgggguggagggcuucaacugcuacuucccccugcaguccuacggguuccagccgaccaacggcgugggguaccagcccuaccggguggucgugcugagcuucgagcuccugcacgcccccgccacggugugcggccccaagaaguccaccaaccuggucaagaacaagugcgugaacuucaacuucaacggccucaccgggaccggcgugcugaccgagagcaacaagaaguuccugccguuccagcaguucgggcgcgacaucgccgacacgaccgacgcgguccgcgacccccagacccuggagauccucgacaucacccccugcagcuucggcgggguguccgugaucacgccgggcaccaacaccagcaaccaggucgccgugcuguaccagggcgugaacugcaccgagguccccguggccauccacgccgaccagcugacgcccaccuggcggguguacuccaccggcagcaacgucuuccagacccgcgccgggugccucaucggcgcggagcacgugaacaacuccuacgagugcgacauccccaucggggccggcaucugcgccagcuaccagacgcagaccaacuccccgcggcgcgcccggagcguggcgucccagagcaucaucgccuacaccaugucccugggcgccgagaacagcgucgccuacuccaacaacagcaucgccauccccaccaacuucacgaucuccgugaccaccgagauccugcccgugagcaugaccaagacgagcgucgacugcaccauguacaucugcggggacuccaccgagugcagcaaccuccugcugcaguacggcuccuucugcacccagcucaaccgcgcgcugacggggaucgccguggagcaggacaagaacacccaggagguguucgcccaggucaagcagaucuacaagacgcccccgaucaaggacuucggcggguucaacuucagccagauccugcccgaccccuccaagcccagcaagcgguccuucaucgaggaccuccuguucaacaaggugacccuggccgacgccggcuucaucaagcaguacggcgacugccucggggacaucgcggcccgcgaccugaucugcgcccagaaguucaacggccugaccgugcucccgccccugcugaccgacgagaugaucgcccaguacaccagcgcccuccuggcggggaccaucacguccggcuggaccuucggggccggcgccgcccugcagauccccuucgcgaugcagauggccuaccgguucaacggcaucggggucacccagaacgugcucuacgagaaccagaagcugaucgccaaccaguucaacagcgccaucggcaagauccaggacucccugagcuccaccgccagcgcgcucgggaagcugcaggacguggucaaccagaacgcccaggcccugaacacgcucgugaagcagcuguccagcaacuucggcgccaucuccagcgugcugaacgacauccucucccgccuggacccgcccgaggccgaggugcagaucgaccggcugaucaccgggcgccuccagagccugcagaccuacgugacccagcagcugauccgggcggccgagauccgcgccagcgccaaccucgccgcgaccaagauguccgagugcguccugggccagagcaagcggguggacuucugcggcaagggguaccaccugauguccuucccccagagcgccccgcacggcguggucuuccuccacgugacguacguccccgcccaggagaagaacuucaccaccgcccccgcgaucugccacgacgggaaggcccacuucccccgcgagggcguguucguguccaacgggacccacugguucgucacgcagcggaacuucuacgagccgcagaucaucaccaccgacaacaccuucgugagcggcaacugcgacguggucaucggcaucgugaacaacacgguguacgacccccugcagcccgagcuggacuccuucaaggaggagcucgacaaguacuucaagaaccacaccagccccgacgucgaccugggggacaucuccggcaucaacgccagcguggugaacauccagaaggagaucgaccgccugaacgaggucgccaagaaccucaacgagucccugaucgaccugcaggagcucgggaaguacgagcaguacaucaaguggccgugguacaucuggcugggcuucaucgccggccugaucgcgaucgugaucgugaccaucaugcucugcugcaugaccagcugcugcuccugccugaaggggugcugcagcugcggcuccugcugcaaguucgacgaggacgacagcgagcccguccugaagggggugaagcuccacuacacgugaggacuagucccuguucccagagcccacuuuuuuuucuuuuuuugaaauaaaauagccugucuuucagaucuaaaaaaaaaaaaaaaaaaaaaaaaaaaaaaaaaaaaaaaaaaaaaaaaaaaaaaaaaaaaaaaaaaaaaaaaaaaaaaaaaaaaaaaaaaaaaaaaaaaa

SEQ ID NO: 25067 - RNA, 4161 nt, Artificial Sequence
  SARS-CoV-2/Wuhan/WIV05/2019__EPI_ISL_402128 spike protein mRNA gc (1-1273)(K986P_V987P_H69del_V70del_A222V_Y453F_S477N_D614G_I692V)
aggagagggcgcuuggcuugcaaggacccugagcugcggcauugaagcacacccaacccaacucgacugaagucagccucacugaaccggaucugagaaucuucucucucugggcuugccagggcucuccgaaccuagcuagcauccucuucaauuccaacuagaaagcuuaccauguucguguuccugguccuccugccccuggugagcucccagugcgugaaccucaccacccgcacgcagcugccgcccgccuacaccaacagcuucacccggggcgucuacuaccccgacaagguguuccgcuccagcgugcugcacuccacccaggaccucuuccugcccuucuucagcaacgucacgugguuccacgccaucuccgggaccaacggcaccaagcgguucgacaacccggugcugcccuucaacgacggggucuacuucgcgagcaccgagaaguccaacaucauccgcggcuggaucuucgggacgacccucgacagcaagacccagucccugcugaucgugaacaacgccaccaacguggucaucaaggugugcgaguuccaguucugcaacgaccccuuccucggcguguacuaccacaagaacaacaagagcuggauggaguccgaguuccgggucuacagcuccgccaacaacugcacguucgaguacgugagccagcccuuccugauggaccuggagggcaagcaggggaacuucaagaaccuccgcgaguucguguucaagaacaucgacggcuacuucaagaucuacuccaagcacaccccgaucaaccugguccgggaccugccccagggguucagcguccucgagccccugguggaccugcccaucggcaucaacaucacccgcuuccagacccuccuggcccugcaccgguccuaccucacgccgggggacagcagcuccggcuggaccgcgggcgccgccgccuacuacgugggguaccugcagccccgcaccuuccugcucaaguacaacgagaacggcaccaucacggacgcggucgacugcgcccuggacccccugagcgagaccaagugcacccucaaguccuucaccguggagaaggggaucuaccagacgagcaacuuccgggugcagcccaccgaguccaucguccgcuucccgaacaucaccaaccugugccccuucggcgagguguucaacgccacccgguucgccagcgucuacgccuggaaccgcaagcggaucuccaacugcguggcggacuacagcgugcuguacaacuccgccagcuucuccacguucaagugcuacggcgucagccccaccaagcucaacgaccugugcuucaccaacguguacgccgacuccuucgugauccgcggggacgagguccggcagaucgcccccggccagaccgggaagaucgccgacuacaacuacaagcugccggacgacuucacgggcugcgugaucgcguggaacagcaacaaccucgacuccaaggucgggggcaacuacaacuaccuguuccgccuguuccgcaagagcaaccucaagcccuucgagcgggacaucuccaccgagaucuaccaggccggcaacacccccugcaacgggguggagggcuucaacugcuacuucccccugcaguccuacggguuccagccgaccaacggcgugggguaccagcccuaccggguggucgugcugagcuucgagcuccugcacgcccccgccacggugugcggccccaagaaguccaccaaccuggucaagaacaagugcgugaacuucaacuucaacggccucaccgggaccggcgugcugaccgagagcaacaagaaguuccugccguuccagcaguucgggcgcgacaucgccgacacgaccgacgcgguccgcgacccccagacccuggagauccucgacaucacccccugcagcuucggcgggguguccgugaucacgccgggcaccaacaccagcaaccaggucgccgugcuguaccagggcgugaacugcaccgagguccccguggccauccacgccgaccagcugacgcccaccuggcggguguacuccaccggcagcaacgucuuccagacccgcgccgggugccucaucggcgcggagcacgugaacaacuccuacgagugcgacauccccaucggggccggcaucugcgccagcuaccagacgcagaccaacuccccgcggcgcgcccggagcguggcgucccagagcgucaucgccuacaccaugucccugggcgccgagaacagcgucgccuacuccaacaacagcaucgccauccccaccaacuucacgaucuccgugaccaccgagauccugcccgugagcaugaccaagacgagcgucgacugcaccauguacaucugcggggacuccaccgagugcagcaaccuccugcugcaguacggcuccuucugcacccagcucaaccgcgcgcugacggggaucgccguggagcaggacaagaacacccaggagguguucgcccaggucaagcagaucuacaagacgcccccgaucaaggacuucggcggguucaacuucagccagauccugcccgaccccuccaagcccagcaagcgguccuucaucgaggaccuccuguucaacaaggugacccuggccgacgccggcuucaucaagcaguacggcgacugccucggggacaucgcggcccgcgaccugaucugcgcccagaaguucaacggccugaccgugcucccgccccugcugaccgacgagaugaucgcccaguacaccagcgcccuccuggcggggaccaucacguccggcuggaccuucggggccggcgccgcccugcagauccccuucgcgaugcagauggccuaccgguucaacggcaucggggucacccagaacgugcucuacgagaaccagaagcugaucgccaaccaguucaacagcgccaucggcaagauccaggacucccugagcuccaccgccagcgcgcucgggaagcugcaggacguggucaaccagaacgcccaggcccugaacacgcucgugaagcagcuguccagcaacuucggcgccaucuccagcgugcugaacgacauccucucccgccuggacccgcccgaggccgaggugcagaucgaccggcugaucaccgggcgccuccagagccugcagaccuacgugacccagcagcugauccgggcggccgagauccgcgccagcgccaaccucgccgcgaccaagauguccgagugcguccugggccagagcaagcggguggacuucugcggcaagggguaccaccugauguccuucccccagagcgccccgcacggcguggucuuccuccacgugacguacguccccgcccaggagaagaacuucaccaccgcccccgcgaucugccacgacgggaaggcccacuucccccgcgagggcguguucguguccaacgggacccacugguucgucacgcagcggaacuucuacgagccgcagaucaucaccaccgacaacaccuucgugagcggcaacugcgacguggucaucggcaucgugaacaacacgguguacgacccccugcagcccgagcuggacuccuucaaggaggagcucgacaaguacuucaagaaccacaccagccccgacgucgaccugggggacaucuccggcaucaacgccagcguggugaacauccagaaggagaucgaccgccugaacgaggucgccaagaaccucaacgagucccugaucgaccugcaggagcucgggaaguacgagcaguacaucaaguggccgugguacaucuggcugggcuucaucgccggccugaucgcgaucgugauggugaccaucaugcucugcugcaugaccagcugcugcuccugccugaaggggugcugcagcugcggcuccugcugcaaguucgacgaggacgacagcgagcccguccugaagggggugaagcuccacuacacgugaggacuagucccuguucccagagcccacuuuuuuuucuuuuuuugaaauaaaauagccugucuuucagaucuaaaaaaaaaaaaaaaaaaaaaaaaaaaaaaaaaaaaaaaaaaaaaaaaaaaaaaaaaaaaaaaaaaaaaaaaaaaaaaaaaaaaaaaaaaaaaaaaaaaa

SEQ ID NO: 25068 - RNA, 4161 nt, Artificial Sequence
  SARS-CoV-2/Wuhan/WIV05/2019__EPI_ISL_402128 spike protein mRNA gc (1-1273)(K986P_V987P_H69del_V70del_Y453F_D614G_I692V_M1229I)
aggagagggcgcuuggcuugcaaggacccugagcugcggcauugaagcacacccaacccaacucgacugaagucagccucacugaaccggaucugagaaucuucucucucugggcuugccagggcucuccgaaccuagcuagcauccucuucaauuccaacuagaaagcuuaccauguucguguuccugguccuccugccccuggugagcucccagugcgugaaccucaccacccgcacgcagcugccgcccgccuacaccaacagcuucacccggggcgucuacuaccccgacaagguguuccgcuccagcgugcugcacuccacccaggaccucuuccugcccuucuucagcaacgucacgugguuccacgccaucuccgggaccaacggcaccaagcgguucgacaacccggugcugcccuucaacgacggggucuacuucgcgagcaccgagaaguccaacaucauccgcggcuggaucuucgggacgacccucgacagcaagacccagucccugcugaucgugaacaacgccaccaacguggucaucaaggugugcgaguuccaguucugcaacgaccccuuccucggcguguacuaccacaagaacaacaagagcuggauggaguccgaguuccgggucuacagcuccgccaacaacugcacguucgaguacgugagccagcccuuccugauggaccuggagggcaagcaggggaacuucaagaaccuccgcgaguucguguucaagaacaucgacggcuacuucaagaucuacuccaagcacaccccgaucaaccugguccgggaccugccccagggguucagcgcccucgagccccugguggaccugcccaucggcaucaacaucacccgcuuccagacccuccuggcccugcaccgguccuaccucacgccgggggacagcagcuccggcuggaccgcgggcgccgccgccuacuacgugggguaccugcagccccgcaccuuccugcucaaguacaacgagaacggcaccaucacggacgcggucgacugcgcccuggacccccugagcgagaccaagugcacccucaaguccuucaccguggagaaggggaucuaccagacgagcaacuuccgggugcagcccaccgaguccaucguccgcuucccgaacaucaccaaccugugccccuucggcgagguguucaacgccacccgguucgccagcgucuacgccuggaaccgcaagcggaucuccaacugcguggcggacuacagcgugcuguacaacuccgccagcuucuccacguucaagugcuacggcgucagccccaccaagcucaacgaccugugcuucaccaacguguacgccgacuccuucgugauccgcggggacgagguccggcagaucgcccccggccagaccgggaagaucgccgacuacaacuacaagcugccggacgacuucacgggcugcgugaucgcguggaacagcaacaaccucgacuccaaggucgggggcaacuacaacuaccuguuccgccuguuccgcaagagcaaccucaagcccuucgagcgggacaucuccaccgagaucuaccaggccggcagcacccccugcaacgggguggagggcuucaacugcuacuucccccugcaguccuacggguuccagccgaccaacggcgugggguaccagcccuaccggguggucgugcugagcuucgagcuccugcacgcccccgccacggugugcggccccaagaaguccaccaaccuggucaagaacaagugcgugaacuucaacuucaacggccucaccgggaccggcgugcugaccgagagcaacaagaaguuccugccguuccagcaguucgggcgcgacaucgccgacacgaccgacgcgguccgcgacccccagacccuggagauccucgacaucacccccugcagcuucggcgggguguccgugaucacgccgggcaccaacaccagcaaccaggucgccgugcuguaccagggcgugaacugcaccgagguccccguggccauccacgccgaccagcugacgcccaccuggcggguguacuccaccggcagcaacgucuuccagacccgcgccgggugccucaucggcgcggagcacgugaacaacuccuacgagugcgacauccccaucggggccggcaucugcgccagcuaccagacgcagaccaacuccccgcggcgcgcccggagcguggcgucccagagcgugaucgccuacaccaugucccugggcgccgagaacagcgucgccuacuccaacaacagcaucgccauccccaccaacuucacgaucuccgugaccaccgagauccugcccgugagcaugaccaagacgagcgucgacugcaccauguacaucugcggggacuccaccgagugcagcaaccuccugcugcaguacggcuccuucugcacccagcucaaccgcgcgcugacggggaucgccguggagcaggacaagaacacccaggagguguucgcccaggucaagcagaucuacaagacgcccccgaucaaggacuucggcggguucaacuucagccagauccugcccgaccccuccaagcccagcaagcgguccuucaucgaggaccuccuguucaacaaggugacccuggccgacgccggcuucaucaagcaguacggcgacugccucggggacaucgcggcccgcgaccugaucugcgcccagaaguucaacggccugaccgugcucccgccccugcugaccgacgagaugaucgcccaguacaccagcgcccuccuggcggggaccaucacguccggcuggaccuucggggccggcgccgcccugcagauccccuucgcgaugcagauggccuaccgguucaacggcaucggggucacccagaacgugcucuacgagaaccagaagcugaucgccaaccaguucaacagcgccaucggcaagauccaggacucccugagcuccaccgccagcgcgcucgggaagcugcaggacguggucaaccagaacgcccaggcccugaacacgcucgugaagcagcuguccagcaacuucggcgccaucuccagcgugcugaacgacauccucucccgccuggacccgcccgaggccgaggugcagaucgaccggcugaucaccgggcgccuccagagccugcagaccuacgugacccagcagcugauccgggcggccgagauccgcgccagcgccaaccucgccgcgaccaagauguccgagugcguccugggccagagcaagcggguggacuucugcggcaagggguaccaccugauguccuucccccagagcgccccgcacggcguggucuuccuccacgugacguacguccccgcccaggagaagaacuucaccaccgcccccgcgaucugccacgacgggaaggcccacuucccccgcgagggcguguucguguccaacgggacccacugguucgucacgcagcggaacuucuacgagccgcagaucaucaccaccgacaacaccuucgugagcggcaacugcgacguggucaucggcaucgugaacaacacgguguacgacccccugcagcccgagcuggacuccuucaaggaggagcucgacaaguacuucaagaaccacaccagccccgacgucgaccugggggacaucuccggcaucaacgccagcguggugaacauccagaaggagaucgaccgccugaacgaggucgccaagaaccucaacgagucccugaucgaccugcaggagcucgggaaguacgagcaguacaucaaguggccgugguacaucuggcugggcuucaucgccggccugaucgcgaucgugaucgugaccaucaugcucugcugcaugaccagcugcugcuccugccugaaggggugcugcagcugcggcuccugcugcaaguucgacgaggacgacagcgagcccguccugaagggggugaagcuccacuacacgugaggacuagucccuguucccagagcccacuuuuuuuucuuuuuuugaaauaaaauagccugucuuucagaucuaaaaaaaaaaaaaaaaaaaaaaaaaaaaaaaaaaaaaaaaaaaaaaaaaaaaaaaaaaaaaaaaaaaaaaaaaaaaaaaaaaaaaaaaaaaaaaaaaaaa

SEQ ID NO: 25069 - RNA, 4158 nt, Artificial Sequence
  SARS-CoV-2/Wuhan/WIV05/2019__EPI_ISL_402128 spike protein mRNA gc (1-1273)(K986P_V987P_K986P_V987P_H69del_V70del_Y144del_N501Y_A570 D_D614G_P681H_T716I_S982A_D1118H)
aggagagggcgcuuggcuugcaaggacccugagcugcggcauugaagcacacccaacccaacucgacugaagucagccucacugaaccggaucugagaaucuucucucucugggcuugccagggcucuccgaaccuagcuagcauccucuucaauuccaacuagaaagcuuaccauguucguguuccugguccuccugccccuggugagcucccagugcgugaaccucaccacccgcacgcagcugccgcccgccuacaccaacagcuucacccggggcgucuacuaccccgacaagguguuccgcuccagcgugcugcacuccacccaggaccucuuccugcccuucuucagcaacgucacgugguuccacgccaucuccgggaccaacggcaccaagcgguucgacaacccggugcugcccuucaacgacggggucuacuucgcgagcaccgagaaguccaacaucauccgcggcuggaucuucgggacgacccucgacagcaagacccagucccugcugaucgugaacaacgccaccaacguggucaucaaggugugcgaguuccaguucugcaacgaccccuuccucggcguguaccacaagaacaacaagagcuggauggaguccgaguuccgggucuacagcuccgccaacaacugcacguucgaguacgugagccagcccuuccugauggaccuggagggcaagcaggggaacuucaagaaccuccgcgaguucguguucaagaacaucgacggcuacuucaagaucuacuccaagcacaccccgaucaaccugguccgggaccugccccagggguucagcgcccucgagccccugguggaccugcccaucggcaucaacaucacccgcuuccagacccuccuggcccugcaccgguccuaccucacgccgggggacagcagcuccggcuggaccgcgggcgccgccgccuacuacgugggguaccugcagccccgcaccuuccugcucaaguacaacgagaacggcaccaucacggacgcggucgacugcgcccuggacccccugagcgagaccaagugcacccucaaguccuucaccguggagaaggggaucuaccagacgagcaacuuccgggugcagcccaccgaguccaucguccgcuucccgaacaucaccaaccugugccccuucggcgagguguucaacgccacccgguucgccagcgucuacgccuggaaccgcaagcggaucuccaacugcguggcggacuacagcgugcuguacaacuccgccagcuucuccacguucaagugcuacggcgucagccccaccaagcucaacgaccugugcuucaccaacguguacgccgacuccuucgugauccgcggggacgagguccggcagaucgcccccggccagaccgggaagaucgccgacuacaacuacaagcugccggacgacuucacgggcugcgugaucgcguggaacagcaacaaccucgacuccaaggucgggggcaacuacaacuaccuguaccgccuguuccgcaagagcaaccucaagcccuucgagcgggacaucuccaccgagaucuaccaggccggcagcacccccugcaacgggguggagggcuucaacugcuacuucccccugcaguccuacggguuccagccgaccuacggcgugggguaccagcccuaccggguggucgugcugagcuucgagcuccugcacgcccccgccacggugugcggccccaagaaguccaccaaccuggucaagaacaagugcgugaacuucaacuucaacggccucaccgggaccggcgugcugaccgagagcaacaagaaguuccugccguuccagcaguucgggcgcgacaucgacgacacgaccgacgcgguccgcgacccccagacccuggagauccucgacaucacccccugcagcuucggcgggguguccgugaucacgccgggcaccaacaccagcaaccaggucgccgugcuguaccagggcgugaacugcaccgagguccccguggccauccacgccgaccagcugacgcccaccuggcggguguacuccaccggcagcaacgucuuccagacccgcgccgggugccucaucggcgcggagcacgugaacaacuccuacgagugcgacauccccaucggggccggcaucugcgccagcuaccagacgcagaccaacucccaccggcgcgcccggagcguggcgucccagagcaucaucgccuacaccaugucccugggcgccgagaacagcgucgccuacuccaacaacagcaucgccauccccaucaacuucacgaucuccgugaccaccgagauccugcccgugagcaugaccaagacgagcgucgacugcaccauguacaucugcggggacuccaccgagugcagcaaccuccugcugcaguacggcuccuucugcacccagcucaaccgcgcgcugacggggaucgccguggagcaggacaagaacacccaggagguguucgcccaggucaagcagaucuacaagacgcccccgaucaaggacuucggcggguucaacuucagccagauccugcccgaccccuccaagcccagcaagcgguccuucaucgaggaccuccuguucaacaaggugacccuggccgacgccggcuucaucaagcaguacggcgacugccucggggacaucgcggcccgcgaccugaucugcgcccagaaguucaacggccugaccgugcucccgccccugcugaccgacgagaugaucgcccaguacaccagcgcccuccuggcggggaccaucacguccggcuggaccuucggggccggcgccgcccugcagauccccuucgcgaugcagauggccuaccgguucaacggcaucggggucacccagaacgugcucuacgagaaccagaagcugaucgccaaccaguucaacagcgccaucggcaagauccaggacucccugagcuccaccgccagcgcgcucgggaagcugcaggacguggucaaccagaacgcccaggcccugaacacgcucgugaagcagcuguccagcaacuucggcgccaucuccagcgugcugaacgacauccucgcccgccuggacccgcccgaggccgaggugcagaucgaccggcugaucaccgggcgccuccagagccugcagaccuacgugacccagcagcugauccgggcggccgagauccgcgccagcgccaaccucgccgcgaccaagauguccgagugcguccugggccagagcaagcggguggacuucugcggcaagggguaccaccugauguccuucccccagagcgccccgcacggcguggucuuccuccacgugacguacguccccgcccaggagaagaacuucaccaccgcccccgcgaucugccacgacgggaaggcccacuucccccgcgagggcguguucguguccaacgggacccacugguucgucacgcagcggaacuucuacgagccgcagaucaucaccacccacaacaccuucgugagcggcaacugcgacguggucaucggcaucgugaacaacacgguguacgacccccugcagcccgagcuggacuccuucaaggaggagcucgacaaguacuucaagaaccacaccagccccgacgucgaccugggggacaucuccggcaucaacgccagcguggugaacauccagaaggagaucgaccgccugaacgaggucgccaagaaccucaacgagucccugaucgaccugcaggagcucgggaaguacgagcaguacaucaaguggccgugguacaucuggcugggcuucaucgccggccugaucgcgaucgugauggugaccaucaugcucugcugcaugaccagcugcugcuccugccugaaggggugcugcagcugcggcuccugcugcaaguucgacgaggacgacagcgagcccguccugaagggggugaagcuccacuacacgugaggacuagucccuguucccagagcccacuuuuuuuucuuuuuuugaaauaaaauagccugucuuucagaucuaaaaaaaaaaaaaaaaaaaaaaaaaaaaaaaaaaaaaaaaaaaaaaaaaaaaaaaaaaaaaaaaaaaaaaaaaaaaaaaaaaaaaaaaaaaaaaaaaaaa

SEQ ID NO: 25070 - RNA, 4167 nt, Artificial Sequence
  SARS-CoV-2/Wuhan/WIV05/2019__EPI_ISL_402128 spike protein mRNA gc (1-1273)(K986P_V987P_K986P_V987P_K417N_E484K_N501Y_D614G)
aggagagggcgcuuggcuugcaaggacccugagcugcggcauugaagcacacccaacccaacucgacugaagucagccucacugaaccggaucugagaaucuucucucucugggcuugccagggcucuccgaaccuagcuagcauccucuucaauuccaacuagaaagcuuaccauguucguguuccugguccuccugccccuggugagcucccagugcgugaaccucaccacccgcacgcagcugccgcccgccuacaccaacagcuucacccggggcgucuacuaccccgacaagguguuccgcuccagcgugcugcacuccacccaggaccucuuccugcccuucuucagcaacgucacgugguuccacgccauccacguguccgggaccaacggcaccaagcgguucgacaacccggugcugcccuucaacgacggggucuacuucgcgagcaccgagaaguccaacaucauccgcggcuggaucuucgggacgacccucgacagcaagacccagucccugcugaucgugaacaacgccaccaacguggucaucaaggugugcgaguuccaguucugcaacgaccccuuccucggcguguacuaccacaagaacaacaagagcuggauggaguccgaguuccgggucuacagcuccgccaacaacugcacguucgaguacgugagccagcccuuccugauggaccuggagggcaagcaggggaacuucaagaaccuccgcgaguucguguucaagaacaucgacggcuacuucaagaucuacuccaagcacaccccgaucaaccugguccgggaccugccccagggguucagcgcccucgagccccugguggaccugcccaucggcaucaacaucacccgcuuccagacccuccuggcccugcaccgguccuaccucacgccgggggacagcagcuccggcuggaccgcgggcgccgccgccuacuacgugggguaccugcagccccgcaccuuccugcucaaguacaacgagaacggcaccaucacggacgcggucgacugcgcccuggacccccugagcgagaccaagugcacccucaaguccuucaccguggagaaggggaucuaccagacgagcaacuuccgggugcagcccaccgaguccaucguccgcuucccgaacaucaccaaccugugccccuucggcgagguguucaacgccacccgguucgccagcgucuacgccuggaaccgcaagcggaucuccaacugcguggcggacuacagcgugcuguacaacuccgccagcuucuccacguucaagugcuacggcgucagccccaccaagcucaacgaccugugcuucaccaacguguacgccgacuccuucgugauccgcggggacgagguccggcagaucgcccccggccagaccgggaacaucgccgacuacaacuacaagcugccggacgacuucacgggcugcgugaucgcguggaacagcaacaaccucgacuccaaggucgggggcaacuacaacuaccuguaccgccuguuccgcaagagcaaccucaagcccuucgagcgggacaucuccaccgagaucuaccaggccggcagcacccccugcaacggggugaagggcuucaacugcuacuucccccugcaguccuacggguuccagccgaccuacggcgugggguaccagcccuaccggguggucgugcugagcuucgagcuccugcacgcccccgccacggugugcggccccaagaaguccaccaaccuggucaagaacaagugcgugaacuucaacuucaacggccucaccgggaccggcgugcugaccgagagcaacaagaaguuccugccguuccagcaguucgggcgcgacaucgccgacacgaccgacgcgguccgcgacccccagacccuggagauccucgacaucacccccugcagcuucggcgggguguccgugaucacgccgggcaccaacaccagcaaccaggucgccgugcuguaccagggcgugaacugcaccgagguccccguggccauccacgccgaccagcugacgcccaccuggcggguguacuccaccggcagcaacgucuuccagacccgcgccgggugccucaucggcgcggagcacgugaacaacuccuacgagugcgacauccccaucggggccggcaucugcgccagcuaccagacgcagaccaacuccccgcggcgcgcccggagcguggcgucccagagcaucaucgccuacaccaugucccugggcgccgagaacagcgucgccuacuccaacaacagcaucgccauccccaccaacuucacgaucuccgugaccaccgagauccugcccgugagcaugaccaagacgagcgucgacugcaccauguacaucugcggggacuccaccgagugcagcaaccuccugcugcaguacggcuccuucugcacccagcucaaccgcgcgcugacggggaucgccguggagcaggacaagaacacccaggagguguucgcccaggucaagcagaucuacaagacgcccccgaucaaggacuucggcggguucaacuucagccagauccugcccgaccccuccaagcccagcaagcgguccuucaucgaggaccuccuguucaacaaggugacccuggccgacgccggcuucaucaagcaguacggcgacugccucggggacaucgcggcccgcgaccugaucugcgcccagaaguucaacggccugaccgugcucccgccccugcugaccgacgagaugaucgcccaguacaccagcgcccuccuggcggggaccaucacguccggcuggaccuucggggccggcgccgcccugcagauccccuucgcgaugcagauggccuaccgguucaacggcaucggggucacccagaacgugcucuacgagaaccagaagcugaucgccaaccaguucaacagcgccaucggcaagauccaggacucccugagcuccaccgccagcgcgcucgggaagcugcaggacguggucaaccagaacgcccaggcccugaacacgcucgugaagcagcuguccagcaacuucggcgccaucuccagcgugcugaacgacauccucucccgccuggacccgcccgaggccgaggugcagaucgaccggcugaucaccgggcgccuccagagccugcagaccuacgugacccagcagcugauccgggcggccgagauccgcgccagcgccaaccucgccgcgaccaagauguccgagugcguccugggccagagcaagcggguggacuucugcggcaagggguaccaccugauguccuucccccagagcgccccgcacggcguggucuuccuccacgugacguacguccccgcccaggagaagaacuucaccaccgcccccgcgaucugccacgacgggaaggcccacuucccccgcgagggcguguucguguccaacgggacccacugguucgucacgcagcggaacuucuacgagccgcagaucaucaccaccgacaacaccuucgugagcggcaacugcgacguggucaucggcaucgugaacaacacgguguacgacccccugcagcccgagcuggacuccuucaaggaggagcucgacaaguacuucaagaaccacaccagccccgacgucgaccugggggacaucuccggcaucaacgccagcguggugaacauccagaaggagaucgaccgccugaacgaggucgccaagaaccucaacgagucccugaucgaccugcaggagcucgggaaguacgagcaguacaucaaguggccgugguacaucuggcugggcuucaucgccggccugaucgcgaucgugauggugaccaucaugcucugcugcaugaccagcugcugcuccugccugaaggggugcugcagcugcggcuccugcugcaaguucgacgaggacgacagcgagcccguccugaagggggugaagcuccacuacacgugaggacuagucccuguucccagagcccacuuuuuuuucuuuuuuugaaauaaaauagccugucuuucagaucuaaaaaaaaaaaaaaaaaaaaaaaaaaaaaaaaaaaaaaaaaaaaaaaaaaaaaaaaaaaaaaaaaaaaaaaaaaaaaaaaaaaaaaaaaaaaaaaaaaaa

SEQ ID NO: 25071 - RNA, 4158 nt, Artificial Sequence
  SARS-CoV-2/Wuhan/WIV05/2019__EPI_ISL_402128 spike protein mRNA gc (1-1273)(K986P_V987P_K986P_V987P_L18F_D80A_D215G_L242del_A243del_ L244del_R246I_K417N_E484K_N501Y_D614G_A701V)
aggagagggcgcuuggcuugcaaggacccugagcugcggcauugaagcacacccaacccaacucgacugaagucagccucacugaaccggaucugagaaucuucucucucugggcuugccagggcucuccgaaccuagcuagcauccucuucaauuccaacuagaaagcuuaccauguucguguuccugguccuccugccccuggugagcucccagugcgugaacuucaccacccgcacgcagcugccgcccgccuacaccaacagcuucacccggggcgucuacuaccccgacaagguguuccgcuccagcgugcugcacuccacccaggaccucuuccugcccuucuucagcaacgucacgugguuccacgccauccacguguccgggaccaacggcaccaagcgguucgccaacccggugcugcccuucaacgacggggucuacuucgcgagcaccgagaaguccaacaucauccgcggcuggaucuucgggacgacccucgacagcaagacccagucccugcugaucgugaacaacgccaccaacguggucaucaaggugugcgaguuccaguucugcaacgaccccuuccucggcguguacuaccacaagaacaacaagagcuggauggaguccgaguuccgggucuacagcuccgccaacaacugcacguucgaguacgugagccagcccuuccugauggaccuggagggcaagcaggggaacuucaagaaccuccgcgaguucguguucaagaacaucgacggcuacuucaagaucuacuccaagcacaccccgaucaaccugguccggggccugccccagggguucagcgcccucgagccccugguggaccugcccaucggcaucaacaucacccgcuuccagacccuccacaucuccuaccucacgccgggggacagcagcuccggcuggaccgcgggcgccgccgccuacuacgugggguaccugcagccccgcaccuuccugcucaaguacaacgagaacggcaccaucacggacgcggucgacugcgcccuggacccccugagcgagaccaagugcacccucaaguccuucaccguggagaaggggaucuaccagacgagcaacuuccgggugcagcccaccgaguccaucguccgcuucccgaacaucaccaaccugugccccuucggcgagguguucaacgccacccgguucgccagcgucuacgccuggaaccgcaagcggaucuccaacugcguggcggacuacagcgugcuguacaacuccgccagcuucuccacguucaagugcuacggcgucagccccaccaagcucaacgaccugugcuucaccaacguguacgccgacuccuucgugauccgcggggacgagguccggcagaucgcccccggccagaccgggaacaucgccgacuacaacuacaagcugccggacgacuucacgggcugcgugaucgcguggaacagcaacaaccucgacuccaaggucgggggcaacuacaacuaccuguaccgccuguuccgcaagagcaaccucaagcccuucgagcgggacaucuccaccgagaucuaccaggccggcagcacccccugcaacggggugaagggcuucaacugcuacuucccccugcaguccuacggguuccagccgaccuacggcgugggguaccagcccuaccggguggucgugcugagcuucgagcuccugcacgcccccgccacggugugcggccccaagaaguccaccaaccuggucaagaacaagugcgugaacuucaacuucaacggccucaccgggaccggcgugcugaccgagagcaacaagaaguuccugccguuccagcaguucgggcgcgacaucgccgacacgaccgacgcgguccgcgacccccagacccuggagauccucgacaucacccccugcagcuucggcgggguguccgugaucacgccgggcaccaacaccagcaaccaggucgccgugcuguaccagggcgugaacugcaccgagguccccguggccauccacgccgaccagcugacgcccaccuggcggguguacuccaccggcagcaacgucuuccagacccgcgccgggugccucaucggcgcggagcacgugaacaacuccuacgagugcgacauccccaucggggccggcaucugcgccagcuaccagacgcagaccaacuccccgcggcgcgcccggagcguggcgucccagagcaucaucgccuacaccaugucccugggcguggagaacagcgucgccuacuccaacaacagcaucgccauccccaccaacuucacgaucuccgugaccaccgagauccugcccgugagcaugaccaagacgagcgucgacugcaccauguacaucugcggggacuccaccgagugcagcaaccuccugcugcaguacggcuccuucugcacccagcucaaccgcgcgcugacggggaucgccguggagcaggacaagaacacccaggagguguucgcccaggucaagcagaucuacaagacgcccccgaucaaggacuucggcggguucaacuucagccagauccugcccgaccccuccaagcccagcaagcgguccuucaucgaggaccuccuguucaacaaggugacccuggccgacgccggcuucaucaagcaguacggcgacugccucggggacaucgcggcccgcgaccugaucugcgcccagaaguucaacggccugaccgugcucccgccccugcugaccgacgagaugaucgcccaguacaccagcgcccuccuggcggggaccaucacguccggcuggaccuucggggccggcgccgcccugcagauccccuucgcgaugcagauggccuaccgguucaacggcaucggggucacccagaacgugcucuacgagaaccagaagcugaucgccaaccaguucaacagcgccaucggcaagauccaggacucccugagcuccaccgccagcgcgcucgggaagcugcaggacguggucaaccagaacgcccaggcccugaacacgcucgugaagcagcuguccagcaacuucggcgccaucuccagcgugcugaacgacauccucucccgccuggacccgcccgaggccgaggugcagaucgaccggcugaucaccgggcgccuccagagccugcagaccuacgugacccagcagcugauccgggcggccgagauccgcgccagcgccaaccucgccgcgaccaagauguccgagugcguccugggccagagcaagcggguggacuucugcggcaagggguaccaccugauguccuucccccagagcgccccgcacggcguggucuuccuccacgugacguacguccccgcccaggagaagaacuucaccaccgcccccgcgaucugccacgacgggaaggcccacuucccccgcgagggcguguucguguccaacgggacccacugguucgucacgcagcggaacuucuacgagccgcagaucaucaccaccgacaacaccuucgugagcggcaacugcgacguggucaucggcaucgugaacaacacgguguacgacccccugcagcccgagcuggacuccuucaaggaggagcucgacaaguacuucaagaaccacaccagccccgacgucgaccugggggacaucuccggcaucaacgccagcguggugaacauccagaaggagaucgaccgccugaacgaggucgccaagaaccucaacgagucccugaucgaccugcaggagcucgggaaguacgagcaguacaucaaguggccgugguacaucuggcugggcuucaucgccggccugaucgcgaucgugauggugaccaucaugcucugcugcaugaccagcugcugcuccugccugaaggggugcugcagcugcggcuccugcugcaaguucgacgaggacgacagcgagcccguccugaagggggugaagcuccacuacacgugaggacuagucccuguucccagagcccacuuuuuuuucuuuuuuugaaauaaaauagccugucuuucagaucuaaaaaaaaaaaaaaaaaaaaaaaaaaaaaaaaaaaaaaaaaaaaaaaaaaaaaaaaaaaaaaaaaaaaaaaaaaaaaaaaaaaaaaaaaaaaaaaaaaaa

SEQ ID NO: 25072 - RNA, 4167 nt, Artificial Sequence
  SARS-CoV-2/Wuhan/WIV05/2019__EPI_ISL_402128 spike protein mRNA gc (1-1273)(K986P_V987P_K986P_V987P_E484K_D614G)
aggagagggcgcuuggcuugcaaggacccugagcugcggcauugaagcacacccaacccaacucgacugaagucagccucacugaaccggaucugagaaucuucucucucugggcuugccagggcucuccgaaccuagcuagcauccucuucaauuccaacuagaaagcuuaccauguucguguuccugguccuccugccccuggugagcucccagugcgugaaccucaccacccgcacgcagcugccgcccgccuacaccaacagcuucacccggggcgucuacuaccccgacaagguguuccgcuccagcgugcugcacuccacccaggaccucuuccugcccuucuucagcaacgucacgugguuccacgccauccacguguccgggaccaacggcaccaagcgguucgacaacccggugcugcccuucaacgacggggucuacuucgcgagcaccgagaaguccaacaucauccgcggcuggaucuucgggacgacccucgacagcaagacccagucccugcugaucgugaacaacgccaccaacguggucaucaaggugugcgaguuccaguucugcaacgaccccuuccucggcguguacuaccacaagaacaacaagagcuggauggaguccgaguuccgggucuacagcuccgccaacaacugcacguucgaguacgugagccagcccuuccugauggaccuggagggcaagcaggggaacuucaagaaccuccgcgaguucguguucaagaacaucgacggcuacuucaagaucuacuccaagcacaccccgaucaaccugguccgggaccugccccagggguucagcgcccucgagccccugguggaccugcccaucggcaucaacaucacccgcuuccagacccuccuggcccugcaccgguccuaccucacgccgggggacagcagcuccggcuggaccgcgggcgccgccgccuacuacgugggguaccugcagccccgcaccuuccugcucaaguacaacgagaacggcaccaucacggacgcggucgacugcgcccuggacccccugagcgagaccaagugcacccucaaguccuucaccguggagaaggggaucuaccagacgagcaacuuccgggugcagcccaccgaguccaucguccgcuucccgaacaucaccaaccugugccccuucggcgagguguucaacgccacccgguucgccagcgucuacgccuggaaccgcaagcggaucuccaacugcguggcggacuacagcgugcuguacaacuccgccagcuucuccacguucaagugcuacggcgucagccccaccaagcucaacgaccugugcuucaccaacguguacgccgacuccuucgugauccgcggggacgagguccggcagaucgcccccggccagaccgggaagaucgccgacuacaacuacaagcugccggacgacuucacgggcugcgugaucgcguggaacagcaacaaccucgacuccaaggucgggggcaacuacaacuaccuguaccgccuguuccgcaagagcaaccucaagcccuucgagcgggacaucuccaccgagaucuaccaggccggcagcacccccugcaacggggugaagggcuucaacugcuacuucccccugcaguccuacggguuccagccgaccaacggcgugggguaccagcccuaccggguggucgugcugagcuucgagcuccugcacgcccccgccacggugugcggccccaagaaguccaccaaccuggucaagaacaagugcgugaacuucaacuucaacggccucaccgggaccggcgugcugaccgagagcaacaagaaguuccugccguuccagcaguucgggcgcgacaucgccgacacgaccgacgcgguccgcgacccccagacccuggagauccucgacaucacccccugcagcuucggcgggguguccgugaucacgccgggcaccaacaccagcaaccaggucgccgugcuguaccagggcgugaacugcaccgagguccccguggccauccacgccgaccagcugacgcccaccuggcggguguacuccaccggcagcaacgucuuccagacccgcgccgggugccucaucggcgcggagcacgugaacaacuccuacgagugcgacauccccaucggggccggcaucugcgccagcuaccagacgcagaccaacuccccgcggcgcgcccggagcguggcgucccagagcaucaucgccuacaccaugucccugggcgccgagaacagcgucgccuacuccaacaacagcaucgccauccccaccaacuucacgaucuccgugaccaccgagauccugcccgugagcaugaccaagacgagcgucgacugcaccauguacaucugcggggacuccaccgagugcagcaaccuccugcugcaguacggcuccuucugcacccagcucaaccgcgcgcugacggggaucgccguggagcaggacaagaacacccaggagguguucgcccaggucaagcagaucuacaagacgcccccgaucaaggacuucggcggguucaacuucagccagauccugcccgaccccuccaagcccagcaagcgguccuucaucgaggaccuccuguucaacaaggugacccuggccgacgccggcuucaucaagcaguacggcgacugccucggggacaucgcggcccgcgaccugaucugcgcccagaaguucaacggccugaccgugcucccgccccugcugaccgacgagaugaucgcccaguacaccagcgcccuccuggcggggaccaucacguccggcuggaccuucggggccggcgccgcccugcagauccccuucgcgaugcagauggccuaccgguucaacggcaucggggucacccagaacgugcucuacgagaaccagaagcugaucgccaaccaguucaacagcgccaucggcaagauccaggacucccugagcuccaccgccagcgcgcucgggaagcugcaggacguggucaaccagaacgcccaggcccugaacacgcucgugaagcagcuguccagcaacuucggcgccaucuccagcgugcugaacgacauccucucccgccuggacccgcccgaggccgaggugcagaucgaccggcugaucaccgggcgccuccagagccugcagaccuacgugacccagcagcugauccgggcggccgagauccgcgccagcgccaaccucgccgcgaccaagauguccgagugcguccugggccagagcaagcggguggacuucugcggcaagggguaccaccugauguccuucccccagagcgccccgcacggcguggucuuccuccacgugacguacguccccgcccaggagaagaacuucaccaccgcccccgcgaucugccacgacgggaaggcccacuucccccgcgagggcguguucguguccaacgggacccacugguucgucacgcagcggaacuucuacgagccgcagaucaucaccaccgacaacaccuucgugagcggcaacugcgacguggucaucggcaucgugaacaacacgguguacgacccccugcagcccgagcuggacuccuucaaggaggagcucgacaaguacuucaagaaccacaccagccccgacgucgaccugggggacaucuccggcaucaacgccagcguggugaacauccagaaggagaucgaccgccugaacgaggucgccaagaaccucaacgagucccugaucgaccugcaggagcucgggaaguacgagcaguacaucaaguggccgugguacaucuggcugggcuucaucgccggccugaucgcgaucgugauggugaccaucaugcucugcugcaugaccagcugcugcuccugccugaaggggugcugcagcugcggcuccugcugcaaguucgacgaggacgacagcgagcccguccugaagggggugaagcuccacuacacgugaggacuagucccuguucccagagcccacuuuuuuuucuuuuuuugaaauaaaauagccugucuuucagaucuaaaaaaaaaaaaaaaaaaaaaaaaaaaaaaaaaaaaaaaaaaaaaaaaaaaaaaaaaaaaaaaaaaaaaaaaaaaaaaaaaaaaaaaaaaaaaaaaaaaa

SEQ ID NO: 25073 - RNA, 4167 nt, Artificial Sequence
  SARS-CoV-2/Wuhan/WIV05/2019__EPI_ISL_402128 spike protein mRNA gc (1-1273)(K986P_V987P_K986P_V987P_L18F_T20N_P26S_D138Y_R190S_K417T _E484K_N501Y_D614G_H655Y_T1027I)
aggagagggcgcuuggcuugcaaggacccugagcugcggcauugaagcacacccaacccaacucgacugaagucagccucacugaaccggaucugagaaucuucucucucugggcuugccagggcucuccgaaccuagcuagcauccucuucaauuccaacuagaaagcuuaccauguucguguuccugguccuccugccccuggugagcucccagugcgugaacuucaccaaccgcacgcagcugccgagcgccuacaccaacagcuucacccggggcgucuacuaccccgacaagguguuccgcuccagcgugcugcacuccacccaggaccucuuccugcccuucuucagcaacgucacgugguuccacgccauccacguguccgggaccaacggcaccaagcgguucgacaacccggugcugcccuucaacgacggggucuacuucgcgagcaccgagaaguccaacaucauccgcggcuggaucuucgggacgacccucgacagcaagacccagucccugcugaucgugaacaacgccaccaacguggucaucaaggugugcgaguuccaguucugcaacuaccccuuccucggcguguacuaccacaagaacaacaagagcuggauggaguccgaguuccgggucuacagcuccgccaacaacugcacguucgaguacgugagccagcccuuccugauggaccuggagggcaagcaggggaacuucaagaaccucagcgaguucguguucaagaacaucgacggcuacuucaagaucuacuccaagcacaccccgaucaaccugguccgggaccugccccagggguucagcgcccucgagccccugguggaccugcccaucggcaucaacaucacccgcuuccagacccuccuggcccugcaccgguccuaccucacgccgggggacagcagcuccggcuggaccgcgggcgccgccgccuacuacgugggguaccugcagccccgcaccuuccugcucaaguacaacgagaacggcaccaucacggacgcggucgacugcgcccuggacccccugagcgagaccaagugcacccucaaguccuucaccguggagaaggggaucuaccagacgagcaacuuccgggugcagcccaccgaguccaucguccgcuucccgaacaucaccaaccugugccccuucggcgagguguucaacgccacccgguucgccagcgucuacgccuggaaccgcaagcggaucuccaacugcguggcggacuacagcgugcuguacaacuccgccagcuucuccacguucaagugcuacggcgucagccccaccaagcucaacgaccugugcuucaccaacguguacgccgacuccuucgugauccgcggggacgagguccggcagaucgcccccggccagaccgggaccaucgccgacuacaacuacaagcugccggacgacuucacgggcugcgugaucgcguggaacagcaacaaccucgacuccaaggucgggggcaacuacaacuaccuguaccgccuguuccgcaagagcaaccucaagcccuucgagcgggacaucuccaccgagaucuaccaggccggcagcacccccugcaacggggugaagggcuucaacugcuacuucccccugcaguccuacggguuccagccgaccuacggcgugggguaccagcccuaccggguggucgugcugagcuucgagcuccugcacgcccccgccacggugugcggccccaagaaguccaccaaccuggucaagaacaagugcgugaacuucaacuucaacggccucaccgggaccggcgugcugaccgagagcaacaagaaguuccugccguuccagcaguucgggcgcgacaucgccgacacgaccgacgcgguccgcgacccccagacccuggagauccucgacaucacccccugcagcuucggcgggguguccgugaucacgccgggcaccaacaccagcaaccaggucgccgugcuguaccagggcgugaacugcaccgagguccccguggccauccacgccgaccagcugacgcccaccuggcggguguacuccaccggcagcaacgucuuccagacccgcgccgggugccucaucggcgcggaguacgugaacaacuccuacgagugcgacauccccaucggggccggcaucugcgccagcuaccagacgcagaccaacuccccgcggcgcgcccggagcguggcgucccagagcaucaucgccuacaccaugucccugggcgccgagaacagcgucgccuacuccaacaacagcaucgccauccccaccaacuucacgaucuccgugaccaccgagauccugcccgugagcaugaccaagacgagcgucgacugcaccauguacaucugcggggacuccaccgagugcagcaaccuccugcugcaguacggcuccuucugcacccagcucaaccgcgcgcugacggggaucgccguggagcaggacaagaacacccaggagguguucgcccaggucaagcagaucuacaagacgcccccgaucaaggacuucggcggguucaacuucagccagauccugcccgaccccuccaagcccagcaagcgguccuucaucgaggaccuccuguucaacaaggugacccuggccgacgccggcuucaucaagcaguacggcgacugccucggggacaucgcggcccgcgaccugaucugcgcccagaaguucaacggccugaccgugcucccgccccugcugaccgacgagaugaucgcccaguacaccagcgcccuccuggcggggaccaucacguccggcuggaccuucggggccggcgccgcccugcagauccccuucgcgaugcagauggccuaccgguucaacggcaucggggucacccagaacgugcucuacgagaaccagaagcugaucgccaaccaguucaacagcgccaucggcaagauccaggacucccugagcuccaccgccagcgcgcucgggaagcugcaggacguggucaaccagaacgcccaggcccugaacacgcucgugaagcagcuguccagcaacuucggcgccaucuccagcgugcugaacgacauccucucccgccuggacccgcccgaggccgaggugcagaucgaccggcugaucaccgggcgccuccagagccugcagaccuacgugacccagcagcugauccgggcggccgagauccgcgccagcgccaaccucgccgcgaucaagauguccgagugcguccugggccagagcaagcggguggacuucugcggcaagggguaccaccugauguccuucccccagagcgccccgcacggcguggucuuccuccacgugacguacguccccgcccaggagaagaacuucaccaccgcccccgcgaucugccacgacgggaaggcccacuucccccgcgagggcguguucguguccaacgggacccacugguucgucacgcagcggaacuucuacgagccgcagaucaucaccaccgacaacaccuucgugagcggcaacugcgacguggucaucggcaucgugaacaacacgguguacgacccccugcagcccgagcuggacuccuucaaggaggagcucgacaaguacuucaagaaccacaccagccccgacgucgaccugggggacaucuccggcaucaacgccagcguggugaacauccagaaggagaucgaccgccugaacgaggucgccaagaaccucaacgagucccugaucgaccugcaggagcucgggaaguacgagcaguacaucaaguggccgugguacaucuggcugggcuucaucgccggccugaucgcgaucgugauggugaccaucaugcucugcugcaugaccagcugcugcuccugccugaaggggugcugcagcugcggcuccugcugcaaguucgacgaggacgacagcgagcccguccugaagggggugaagcuccacuacacgugaggacuagucccuguucccagagcccacuuuuuuuucuuuuuuugaaauaaaauagccugucuuucagaucuaaaaaaaaaaaaaaaaaaaaaaaaaaaaaaaaaaaaaaaaaaaaaaaaaaaaaaaaaaaaaaaaaaaaaaaaaaaaaaaaaaaaaaaaaaaaaaaaaaaa

SEQ ID NO: 25074 - RNA, 4167 nt, Artificial Sequence
  SARS-CoV-2/Wuhan/WIV05/2019__EPI_ISL_402128 spike protein mRNA gc (1-1273)(K986P_V987P_K986P_V987P_S13I_W152C_L452R_D614G)
aggagagggcgcuuggcuugcaaggacccugagcugcggcauugaagcacacccaacccaacucgacugaagucagccucacugaaccggaucugagaaucuucucucucugggcuugccagggcucuccgaaccuagcuagcauccucuucaauuccaacuagaaagcuuaccauguucguguuccugguccuccugccccuggugagcauccagugcgugaaccucaccacccgcacgcagcugccgcccgccuacaccaacagcuucacccggggcgucuacuaccccgacaagguguuccgcuccagcgugcugcacuccacccaggaccucuuccugcccuucuucagcaacgucacgugguuccacgccauccacguguccgggaccaacggcaccaagcgguucgacaacccggugcugcccuucaacgacggggucuacuucgcgagcaccgagaaguccaacaucauccgcggcuggaucuucgggacgacccucgacagcaagacccagucccugcugaucgugaacaacgccaccaacguggucaucaaggugugcgaguuccaguucugcaacgaccccuuccucggcguguacuaccacaagaacaacaagagcugcauggaguccgaguuccgggucuacagcuccgccaacaacugcacguucgaguacgugagccagcccuuccugauggaccuggagggcaagcaggggaacuucaagaaccuccgcgaguucguguucaagaacaucgacggcuacuucaagaucuacuccaagcacaccccgaucaaccugguccgggaccugccccagggguucagcgcccucgagccccugguggaccugcccaucggcaucaacaucacccgcuuccagacccuccuggcccugcaccgguccuaccucacgccgggggacagcagcuccggcuggaccgcgggcgccgccgccuacuacgugggguaccugcagccccgcaccuuccugcucaaguacaacgagaacggcaccaucacggacgcggucgacugcgcccuggacccccugagcgagaccaagugcacccucaaguccuucaccguggagaaggggaucuaccagacgagcaacuuccgggugcagcccaccgaguccaucguccgcuucccgaacaucaccaaccugugccccuucggcgagguguucaacgccacccgguucgccagcgucuacgccuggaaccgcaagcggaucuccaacugcguggcggacuacagcgugcuguacaacuccgccagcuucuccacguucaagugcuacggcgucagccccaccaagcucaacgaccugugcuucaccaacguguacgccgacuccuucgugauccgcggggacgagguccggcagaucgcccccggccagaccgggaagaucgccgacuacaacuacaagcugccggacgacuucacgggcugcgugaucgcguggaacagcaacaaccucgacuccaaggucgggggcaacuacaacuaccgcuaccgccuguuccgcaagagcaaccucaagcccuucgagcgggacaucuccaccgagaucuaccaggccggcagcacccccugcaacgggguggagggcuucaacugcuacuucccccugcaguccuacggguuccagccgaccaacggcgugggguaccagcccuaccggguggucgugcugagcuucgagcuccugcacgcccccgccacggugugcggccccaagaaguccaccaaccuggucaagaacaagugcgugaacuucaacuucaacggccucaccgggaccggcgugcugaccgagagcaacaagaaguuccugccguuccagcaguucgggcgcgacaucgccgacacgaccgacgcgguccgcgacccccagacccuggagauccucgacaucacccccugcagcuucggcgggguguccgugaucacgccgggcaccaacaccagcaaccaggucgccgugcuguaccagggcgugaacugcaccgagguccccguggccauccacgccgaccagcugacgcccaccuggcggguguacuccaccggcagcaacgucuuccagacccgcgccgggugccucaucggcgcggagcacgugaacaacuccuacgagugcgacauccccaucggggccggcaucugcgccagcuaccagacgcagaccaacuccccgcggcgcgcccggagcguggcgucccagagcaucaucgccuacaccaugucccugggcgccgagaacagcgucgccuacuccaacaacagcaucgccauccccaccaacuucacgaucuccgugaccaccgagauccugcccgugagcaugaccaagacgagcgucgacugcaccauguacaucugcggggacuccaccgagugcagcaaccuccugcugcaguacggcuccuucugcacccagcucaaccgcgcgcugacggggaucgccguggagcaggacaagaacacccaggagguguucgcccaggucaagcagaucuacaagacgcccccgaucaaggacuucggcggguucaacuucagccagauccugcccgaccccuccaagcccagcaagcgguccuucaucgaggaccuccuguucaacaaggugacccuggccgacgccggcuucaucaagcaguacggcgacugccucggggacaucgcggcccgcgaccugaucugcgcccagaaguucaacggccugaccgugcucccgccccugcugaccgacgagaugaucgcccaguacaccagcgcccuccuggcggggaccaucacguccggcuggaccuucggggccggcgccgcccugcagauccccuucgcgaugcagauggccuaccgguucaacggcaucggggucacccagaacgugcucuacgagaaccagaagcugaucgccaaccaguucaacagcgccaucggcaagauccaggacucccugagcuccaccgccagcgcgcucgggaagcugcaggacguggucaaccagaacgcccaggcccugaacacgcucgugaagcagcuguccagcaacuucggcgccaucuccagcgugcugaacgacauccucucccgccuggacccgcccgaggccgaggugcagaucgaccggcugaucaccgggcgccuccagagccugcagaccuacgugacccagcagcugauccgggcggccgagauccgcgccagcgccaaccucgccgcgaccaagauguccgagugcguccugggccagagcaagcggguggacuucugcggcaagggguaccaccugauguccuucccccagagcgccccgcacggcguggucuuccuccacgugacguacguccccgcccaggagaagaacuucaccaccgcccccgcgaucugccacgacgggaaggcccacuucccccgcgagggcguguucguguccaacgggacccacugguucgucacgcagcggaacuucuacgagccgcagaucaucaccaccgacaacaccuucgugagcggcaacugcgacguggucaucggcaucgugaacaacacgguguacgacccccugcagcccgagcuggacuccuucaaggaggagcucgacaaguacuucaagaaccacaccagccccgacgucgaccugggggacaucuccggcaucaacgccagcguggugaacauccagaaggagaucgaccgccugaacgaggucgccaagaaccucaacgagucccugaucgaccugcaggagcucgggaaguacgagcaguacaucaaguggccgugguacaucuggcugggcuucaucgccggccugaucgcgaucgugauggugaccaucaugcucugcugcaugaccagcugcugcuccugccugaaggggugcugcagcugcggcuccugcugcaaguucgacgaggacgacagcgagcccguccugaagggggugaagcuccacuacacgugaggacuagucccuguucccagagcccacuuuuuuuucuuuuuuugaaauaaaauagccugucuuucagaucuaaaaaaaaaaaaaaaaaaaaaaaaaaaaaaaaaaaaaaaaaaaaaaaaaaaaaaaaaaaaaaaaaaaaaaaaaaaaaaaaaaaaaaaaaaaaaaaaaaaa

SEQ ID NO: 25075 - RNA, 4167 nt, Artificial Sequence
  SARS-CoV-2/Wuhan/WIV05/2019__EPI_ISL_402128 spike protein mRNA gc (1-1273)(K986P_V987P)
aggagagggcgcuuggcuugcaaggacccugagcugcggcauugaagcacacccaacccaacucgacugaagucagccucacugaaccggaucugagaaucuucucucucugggcuugccagggcucuccgaaccuagcuagcauccucuucaauuccaacuagaaagcuuaccauguucguguuccugguccuccugccccuggugagcucccagugcgugaaccucaccacccgcacgcagcugccgcccgccuacaccaacagcuucacccggggcgucuacuaccccgacaagguguuccgcuccagcgugcugcacuccacccaggaccucuuccugcccuucuucagcaacgucacgugguuccacgccauccacguguccgggaccaacggcaccaagcgguucgacaacccggugcugcccuucaacgacggggucuacuucgcgagcaccgagaaguccaacaucauccgcggcuggaucuucgggacgacccucgacagcaagacccagucccugcugaucgugaacaacgccaccaacguggucaucaaggugugcgaguuccaguucugcaacgaccccuuccucggcguguacuaccacaagaacaacaagagcuggauggaguccgaguuccgggucuacagcuccgccaacaacugcacguucgaguacgugagccagcccuuccugauggaccuggagggcaagcaggggaacuucaagaaccuccgcgaguucguguucaagaacaucgacggcuacuucaagaucuacuccaagcacaccccgaucaaccugguccgggaccugccccagggguucagcgcccucgagccccugguggaccugcccaucggcaucaacaucacccgcuuccagacccuccuggcccugcaccgguccuaccucacgccgggggacagcagcuccggcuggaccgcgggcgccgccgccuacuacgugggguaccugcagccccgcaccuuccugcucaaguacaacgagaacggcaccaucacggacgcggucgacugcgcccuggacccccugagcgagaccaagugcacccucaaguccuucaccguggagaaggggaucuaccagacgagcaacuuccgggugcagcccaccgaguccaucguccgcuucccgaacaucaccaaccugugccccuucggcgagguguucaacgccacccgguucgccagcgucuacgccuggaaccgcaagcggaucuccaacugcguggcggacuacagcgugcuguacaacuccgccagcuucuccacguucaagugcuacggcgucagccccaccaagcucaacgaccugugcuucaccaacguguacgccgacuccuucgugauccgcggggacgagguccggcagaucgcccccggccagaccgggaagaucgccgacuacaacuacaagcugccggacgacuucacgggcugcgugaucgcguggaacagcaacaaccucgacuccaaggucgggggcaacuacaacuaccuguaccgccuguuccgcaagagcaaccucaagcccuucgagcgggacaucuccaccgagaucuaccaggccggcagcacccccugcaacgggguggagggcuucaacugcuacuucccccugcaguccuacggguuccagccgaccaacggcgugggguaccagcccuaccggguggucgugcugagcuucgagcuccugcacgcccccgccacggugugcggccccaagaaguccaccaaccuggucaagaacaagugcgugaacuucaacuucaacggccucaccgggaccggcgugcugaccgagagcaacaagaaguuccugccguuccagcaguucgggcgcgacaucgccgacacgaccgacgcgguccgcgacccccagacccuggagauccucgacaucacccccugcagcuucggcgggguguccgugaucacgccgggcaccaacaccagcaaccaggucgccgugcuguaccaggacgugaacugcaccgagguccccguggccauccacgccgaccagcugacgcccaccuggcggguguacuccaccggcagcaacgucuuccagacccgcgccgggugccucaucggcgcggagcacgugaacaacuccuacgagugcgacauccccaucggggccggcaucugcgccagcuaccagacgcagaccaacuccccgcggcgcgcccggagcguggcgucccagagcaucaucgccuacaccaugucccugggcgccgagaacagcgucgccuacuccaacaacagcaucgccauccccaccaacuucacgaucuccgugaccaccgagauccugcccgugagcaugaccaagacgagcgucgacugcaccauguacaucugcggggacuccaccgagugcagcaaccuccugcugcaguacggcuccuucugcacccagcucaaccgcgcgcugacggggaucgccguggagcaggacaagaacacccaggagguguucgcccaggucaagcagaucuacaagacgcccccgaucaaggacuucggcggguucaacuucagccagauccugcccgaccccuccaagcccagcaagcgguccuucaucgaggaccuccuguucaacaaggugacccuggccgacgccggcuucaucaagcaguacggcgacugccucggggacaucgcggcccgcgaccugaucugcgcccagaaguucaacggccugaccgugcucccgccccugcugaccgacgagaugaucgcccaguacaccagcgcccuccuggcggggaccaucacguccggcuggaccuucggggccggcgccgcccugcagauccccuucgcgaugcagauggccuaccgguucaacggcaucggggucacccagaacgugcucuacgagaaccagaagcugaucgccaaccaguucaacagcgccaucggcaagauccaggacucccugagcuccaccgccagcgcgcucgggaagcugcaggacguggucaaccagaacgcccaggcccugaacacgcucgugaagcagcuguccagcaacuucggcgccaucuccagcgugcugaacgacauccucucccgccuggacccgcccgaggccgagguccagaucgaccggcugaucaccgggcgccuccagagccugcagaccuacgugacccagcagcugauccgggcggccgagauccgcgccagcgccaaccucgccgcgaccaagauguccgagugcgugcugggccagagcaagcgggucgacuucugcggcaagggguaccaccugauguccuucccccagagcgcgccccacggcgugguguuccuccacgucacguacgugcccgcccaggagaagaacuucaccaccgccccggccaucugccacgacgggaaggcccacuucccccgcgagggcgucuucguguccaacgggacccacugguucgugacgcagcggaacuucuacgagccccagaucaucaccaccgacaacaccuucgucagcggcaacugcgacguggugaucggcaucgucaacaacacgguguacgacccccugcagccggagcuggacuccuucaaggaggagcucgacaaguacuucaagaaccacaccagccccgacguggaccugggggacaucuccggcaucaacgccagcgucgugaacauccagaaggagaucgaccgccugaacgagguggccaagaaccucaacgagucccugaucgaccugcaggagcucgggaaguacgagcaguacaucaaguggcccugguacaucuggcugggcuucaucgccggccugaucgcgaucgucauggugaccaucaugcucugcugcaugaccagcugcugcuccugccugaaggggugcugcagcugcggcuccugcugcaaguucgacgaggacgacagcgagccggugcugaagggggucaagcuccacuacacgugaggacuagucccuguucccagagcccacuuuuuuuucuuuuuuugaaauaaaauagccugucuuucagaucuaaaaaaaaaaaaaaaaaaaaaaaaaaaaaaaaaaaaaaaaaaaaaaaaaaaaaaaaaaaaaaaaaaaaaaaaaaaaaaaaaaaaaaaaaaaaaaaaaaaa

SEQ ID NO: 25076 - RNA, 4167 nt, Artificial Sequence
  SARS-CoV-2/Wuhan/WIV05/2019__EPI_ISL_402128 spike protein mRNA gc (1-1273)(K986P_V987P_ D614G)
aggagagggcgcuuggcuugcaaggacccugagcugcggcauugaagcacacccaacccaacucgacugaagucagccucacugaaccggaucugagaaucuucucucucugggcuugccagggcucuccgaaccuagcuagcauccucuucaauuccaacuagaaagcuuaccauguucguguuccugguccuccugccccuggugagcucccagugcgugaaccucaccacccgcacgcagcugccgcccgccuacaccaacagcuucacccggggcgucuacuaccccgacaagguguuccgcuccagcgugcugcacuccacccaggaccucuuccugcccuucuucagcaacgucacgugguuccacgccauccacguguccgggaccaacggcaccaagcgguucgacaacccggugcugcccuucaacgacggggucuacuucgcgagcaccgagaaguccaacaucauccgcggcuggaucuucgggacgacccucgacagcaagacccagucccugcugaucgugaacaacgccaccaacguggucaucaaggugugcgaguuccaguucugcaacgaccccuuccucggcguguacuaccacaagaacaacaagagcuggauggaguccgaguuccgggucuacagcuccgccaacaacugcacguucgaguacgugagccagcccuuccugauggaccuggagggcaagcaggggaacuucaagaaccuccgcgaguucguguucaagaacaucgacggcuacuucaagaucuacuccaagcacaccccgaucaaccugguccgggaccugccccagggguucagcgcccucgagccccugguggaccugcccaucggcaucaacaucacccgcuuccagacccuccuggcccugcaccgguccuaccucacgccgggggacagcagcuccggcuggaccgcgggcgccgccgccuacuacgugggguaccugcagccccgcaccuuccugcucaaguacaacgagaacggcaccaucacggacgcggucgacugcgcccuggacccccugagcgagaccaagugcacccucaaguccuucaccguggagaaggggaucuaccagacgagcaacuuccgggugcagcccaccgaguccaucguccgcuucccgaacaucaccaaccugugccccuucggcgagguguucaacgccacccgguucgccagcgucuacgccuggaaccgcaagcggaucuccaacugcguggcggacuacagcgugcuguacaacuccgccagcuucuccacguucaagugcuacggcgucagccccaccaagcucaacgaccugugcuucaccaacguguacgccgacuccuucgugauccgcggggacgagguccggcagaucgcccccggccagaccgggaagaucgccgacuacaacuacaagcugccggacgacuucacgggcugcgugaucgcguggaacagcaacaaccucgacuccaaggucgggggcaacuacaacuaccuguaccgccuguuccgcaagagcaaccucaagcccuucgagcgggacaucuccaccgagaucuaccaggccggcagcacccccugcaacgggguggagggcuucaacugcuacuucccccugcaguccuacggguuccagccgaccaacggcgugggguaccagcccuaccggguggucgugcugagcuucgagcuccugcacgcccccgccacggugugcggccccaagaaguccaccaaccuggucaagaacaagugcgugaacuucaacuucaacggccucaccgggaccggcgugcugaccgagagcaacaagaaguuccugccguuccagcaguucgggcgcgacaucgccgacacgaccgacgcgguccgcgacccccagacccuggagauccucgacaucacccccugcagcuucggcgggguguccgugaucacgccgggcaccaacaccagcaaccaggucgccgugcuguaccagggcgugaacugcaccgagguccccguggccauccacgccgaccagcugacgcccaccuggcggguguacuccaccgggagcaacgucuuccagacccgcgccggcugccucaucggggcggagcacgugaacaacuccuacgagugcgacauccccaucggcgccggcaucugcgccagcuaccagacgcagaccaacuccccgcggcgcgcccggagcguggcgucccagagcaucaucgccuacaccaugucccugggggccgagaacagcgucgccuacuccaacaacagcaucgccauccccaccaacuucacgaucuccgugaccaccgagauccugcccgugagcaugaccaagacgagcgucgacugcaccauguacaucugcggcgacuccaccgagugcagcaaccuccugcugcaguacggguccuucugcacccagcucaaccgcgcgcugacgggcaucgccguggagcaggacaagaacacccaggagguguucgcccaggucaagcagaucuacaagacgcccccgaucaaggacuucgggggcuucaacuucagccagauccugcccgaccccuccaagcccagcaagcgguccuucaucgaggaccuccuguucaacaaggugacccuggccgacgccggcuucaucaagcaguacggggacugccucggcgacaucgcggcccgcgaccugaucugcgcccagaaguucaacgggcugaccgugcucccgccccugcugaccgacgagaugaucgcccaguacaccagcgcccuccuggcgggcaccaucacguccggguggaccuucggcgccggcgccgcccugcagauccccuucgcgaugcagauggccuaccgguucaacgggaucggcgucacccagaacgugcucuacgagaaccagaagcugaucgccaaccaguucaacagcgccaucgggaagauccaggacucccugagcuccaccgccagcgcgcucggcaagcugcaggacguggucaaccagaacgcccaggcccugaacacgcucgugaagcagcuguccagcaacuucggggccaucuccagcgugcugaacgacauccucucccgccuggacccgcccgaggccgagguccagaucgaccggcugaucaccggccgccuccagagccugcagaccuacgugacccagcagcugauccgggcggccgagauccgcgccagcgccaaccucgccgcgaccaagauguccgagugcgugcugggccagagcaagcgggucgacuucugcgggaagggcuaccaccugauguccuucccccagagcgcgccccacggggugguguuccuccacgucacguacgugcccgcccaggagaagaacuucaccaccgccccggccaucugccacgacggcaaggcccacuucccccgcgagggggucuucguguccaacggcacccacugguucgugacgcagcggaacuucuacgagccccagaucaucaccaccgacaacaccuucgucagcggcaacugcgacguggugaucgggaucgucaacaacacgguguacgacccccugcagccggagcuggacuccuucaaggaggagcucgacaaguacuucaagaaccacaccagccccgacguggaccugggcgacaucuccgggaucaacgccagcgucgugaacauccagaaggagaucgaccgccugaacgagguggccaagaaccucaacgagucccugaucgaccugcaggagcucggcaaguacgagcaguacaucaaguggcccugguacaucuggcugggcuucaucgccgggcugaucgcgaucgucauggugaccaucaugcucugcugcaugaccagcugcugcuccugccugaagggcugcugcagcugcggguccugcugcaaguucgacgaggacgacagcgagccggugcugaagggcgucaagcuccacuacacgugaggacuagucccuguucccagagcccacuuuuuuuucuuuuuuugaaauaaaauagccugucuuucagaucuaaaaaaaaaaaaaaaaaaaaaaaaaaaaaaaaaaaaaaaaaaaaaaaaaaaaaaaaaaaaaaaaaaaaaaaaaaaaaaaaaaaaaaaaaaaaaaaaaaaa

SEQ ID NO: 25077 - RNA, 4167 nt, Artificial Sequence
  SARS-CoV-2/Wuhan/WIV05/2019__EPI_ISL_402128 spike protein mRNA gc (1-1273)(K986P_V987P_A222V_D614G)
aggagagggcgcuuggcuugcaaggacccugagcugcggcauugaagcacacccaacccaacucgacugaagucagccucacugaaccggaucugagaaucuucucucucugggcuugccagggcucuccgaaccuagcuagcauccucuucaauuccaacuagaaagcuuaccauguucguguuccugguccuccugccccuggugagcucccagugcgugaaccucaccacccgcacgcagcugccgcccgccuacaccaacagcuucacccggggcgucuacuaccccgacaagguguuccgcuccagcgugcugcacuccacccaggaccucuuccugcccuucuucagcaacgucacgugguuccacgccauccacguguccgggaccaacggcaccaagcgguucgacaacccggugcugcccuucaacgacggggucuacuucgcgagcaccgagaaguccaacaucauccgcggcuggaucuucgggacgacccucgacagcaagacccagucccugcugaucgugaacaacgccaccaacguggucaucaaggugugcgaguuccaguucugcaacgaccccuuccucggcguguacuaccacaagaacaacaagagcuggauggaguccgaguuccgggucuacagcuccgccaacaacugcacguucgaguacgugagccagcccuuccugauggaccuggagggcaagcaggggaacuucaagaaccuccgcgaguucguguucaagaacaucgacggcuacuucaagaucuacuccaagcacaccccgaucaaccugguccgggaccugccccagggguucagcgugcucgagccccugguggaccugcccaucggcaucaacaucacccgcuuccagacccuccuggcccugcaccgguccuaccucacgccgggggacagcagcuccggcuggaccgccggcgcggccgccuacuacgucggguaccugcagccccgcaccuuccugcucaaguacaacgagaacggcaccaucacggacgccguggacugcgcgcuggacccccugagcgagaccaagugcacccucaaguccuucaccguggagaaggggaucuaccagacgagcaacuuccggguccagcccaccgaguccaucgugcgcuucccgaacaucaccaaccugugccccuucggcgaggucuucaacgccacccgguucgccagcguguacgccuggaaccgcaagcggaucuccaacugcguggccgacuacagcguccuguacaacuccgcgagcuucuccacguucaagugcuacggcgugagccccaccaagcucaacgaccugugcuucaccaacguguacgccgacuccuucgucauccgcggggacgaggugcggcagaucgcccccggccagaccgggaagaucgccgacuacaacuacaagcugccggacgacuucacgggcugcgugaucgccuggaacagcaacaaccucgacuccaaggucgggggcaacuacaacuaccuguaccgccuguuccgcaagagcaaccucaagcccuucgagcgggacaucuccaccgagaucuaccaggcgggcagcacccccugcaacgggguggagggcuucaacugcuacuucccccugcaguccuacggguuccagccgaccaacggcgugggguaccagcccuaccgggucguggugcugagcuucgagcuccugcacgcccccgccacggucugcggccccaagaaguccaccaaccuggugaagaacaagugcgugaacuucaacuucaacggccucaccgggaccggcguccugaccgagagcaacaagaaguuccugccguuccagcaguucgggcgcgacaucgccgacacgaccgacgccgugcgcgacccccagacccuggagauccucgacaucacccccugcagcuucggcgggguguccgucaucacgccgggcaccaacaccagcaaccagguggcggugcuguaccagggcgucaacugcaccgaggugcccguggccauccacgccgaccagcugacgcccaccuggcgggucuacuccaccgggagcaacguguuccagacccgcgccggcugccucaucggggccgagcacgugaacaacuccuacgagugcgacauccccaucggcgcgggcaucugcgccagcuaccagacgcagaccaacuccccgcggcgcgcccggagcgucgccucccagagcaucaucgcguacaccaugucccugggggccgagaacagcguggccuacuccaacaacagcaucgccauccccaccaacuucacgaucuccgugaccaccgagauccugcccgucagcaugaccaagacgagcguggacugcaccauguacaucugcggcgacuccaccgagugcagcaaccuccugcugcaguacggguccuucugcacccagcucaaccgcgcccugacgggcaucgcgguggagcaggacaagaacacccaggaggucuucgcccaggugaagcagaucuacaagacgcccccgaucaaggacuucgggggcuucaacuucagccagauccugcccgaccccuccaagcccagcaagcgguccuucaucgaggaccuccuguucaacaaggugacccuggccgacgccggcuucaucaagcaguacggggacugccucggcgacaucgccgcgcgcgaccugaucugcgcccagaaguucaacgggcugaccguccucccgccccugcugaccgacgagaugaucgcccaguacaccagcgcccuccuggccggcaccaucacguccggguggaccuucggcgcgggcgccgcccugcagauccccuucgccaugcagauggcguaccgguucaacgggaucggcgugacccagaacgugcucuacgagaaccagaagcugaucgccaaccaguucaacagcgccaucgggaagauccaggacucccugagcuccaccgccagcgcccucggcaagcugcaggacgucgugaaccagaacgcgcaggcccugaacacgcucgugaagcagcuguccagcaacuucggggccaucuccagcguccugaacgacauccucucccgccuggacccgcccgaggccgaggugcagaucgaccggcugaucaccggccgccuccagagccugcagaccuacgugacccagcagcugauccgggccgcggagauccgcgccagcgccaaccucgccgccaccaagauguccgagugcguccugggccagagcaagcggguggacuucugcgggaagggcuaccaccugauguccuucccccagagcgcgccccacgggguggucuuccuccacgugacguacguccccgcccaggagaagaacuucaccaccgccccggccaucugccacgacggcaaggcgcacuucccccgcgaggggguguucguguccaacggcacccacugguucgucacgcagcggaacuucuacgagccccagaucaucaccaccgacaacaccuucgugagcggcaacugcgacguggucaucgggaucgugaacaacacgguguacgacccccugcagccggagcuggacuccuucaaggaggagcucgacaaguacuucaagaaccacaccagccccgacgucgaccugggcgacaucuccgggaucaacgccagcguggugaacauccagaaggagaucgaccgccugaacgaggucgccaagaaccucaacgagucccugaucgaccugcaggagcucggcaaguacgagcaguacaucaaguggcccugguacaucuggcugggcuucaucgccgggcugaucgccaucgugauggugaccaucaugcucugcugcaugaccagcugcugcuccugccugaagggcugcugcagcugcggguccugcugcaaguucgacgaggacgacagcgagccgguccugaagggcgugaagcuccacuacacgugaggacuagucccuguucccagagcccacuuuuuuuucuuuuuuugaaauaaaauagccugucuuucagaucuaaaaaaaaaaaaaaaaaaaaaaaaaaaaaaaaaaaaaaaaaaaaaaaaaaaaaaaaaaaaaaaaaaaaaaaaaaaaaaaaaaaaaaaaaaaaaaaaaaaa

SEQ ID NO: 25078 - RNA, 4167 nt, Artificial Sequence
  SARS-CoV-2/Wuhan/WIV05/2019__EPI_ISL_402128 spike protein mRNA gc (1-1273)(K986P_V987P_N439K_D614G)
aggagagggcgcuuggcuugcaaggacccugagcugcggcauugaagcacacccaacccaacucgacugaagucagccucacugaaccggaucugagaaucuucucucucugggcuugccagggcucuccgaaccuagcuagcauccucuucaauuccaacuagaaagcuuaccauguucguguuccugguccuccugccccuggugagcucccagugcgugaaccucaccacccgcacgcagcugccgcccgccuacaccaacagcuucacccggggcgucuacuaccccgacaagguguuccgcuccagcgugcugcacuccacccaggaccucuuccugcccuucuucagcaacgucacgugguuccacgccauccacguguccgggaccaacggcaccaagcgguucgacaacccggugcugcccuucaacgacggggucuacuucgcgagcaccgagaaguccaacaucauccgcggcuggaucuucgggacgacccucgacagcaagacccagucccugcugaucgugaacaacgccaccaacguggucaucaaggugugcgaguuccaguucugcaacgaccccuuccucggcguguacuaccacaagaacaacaagagcuggauggaguccgaguuccgggucuacagcuccgccaacaacugcacguucgaguacgugagccagcccuuccugauggaccuggagggcaagcaggggaacuucaagaaccuccgcgaguucguguucaagaacaucgacggcuacuucaagaucuacuccaagcacaccccgaucaaccugguccgggaccugccccagggguucagcgcccucgagccccugguggaccugcccaucggcaucaacaucacccgcuuccagacccuccuggcccugcaccgguccuaccucacgccgggggacagcagcuccggcuggaccgcgggcgccgccgccuacuacgugggguaccugcagccccgcaccuuccugcucaaguacaacgagaacggcaccaucacggacgcggucgacugcgcccuggacccccugagcgagaccaagugcacccucaaguccuucaccguggagaaggggaucuaccagacgagcaacuuccgggugcagcccaccgaguccaucguccgcuucccgaacaucaccaaccugugccccuucggcgagguguucaacgccacccgguucgccagcgucuacgccuggaaccgcaagcggaucuccaacugcguggcggacuacagcgugcuguacaacuccgccagcuucuccacguucaagugcuacggcgucagccccaccaagcucaacgaccugugcuucaccaacguguacgccgacuccuucgugauccgcggggacgagguccggcagaucgcccccggccagaccgggaagaucgccgacuacaacuacaagcugccggacgacuucacgggcugcgugaucgcguggaacagcaagaaccucgacuccaaggucgggggcaacuacaacuaccuguaccgccuguuccgcaagagcaaccucaagcccuucgagcgggacaucuccaccgagaucuaccaggccggcagcacccccugcaacgggguggagggcuucaacugcuacuucccccugcaguccuacggguuccagccgaccaacggcgugggguaccagcccuaccggguggucgugcugagcuucgagcuccugcacgcccccgccacggugugcggccccaagaaguccaccaaccuggucaagaacaagugcgugaacuucaacuucaacggccucaccgggaccggcgugcugaccgagagcaacaagaaguuccugccguuccagcaguucgggcgcgacaucgccgacacgaccgacgcgguccgcgacccccagacccuggagauccucgacaucacccccugcagcuucggcgggguguccgugaucacgccgggcaccaacaccagcaaccaggucgccgugcuguaccagggcgugaacugcaccgagguccccguggccauccacgccgaccagcugacgcccaccuggcggguguacuccaccgggagcaacgucuuccagacccgcgccggcugccucaucggggcggagcacgugaacaacuccuacgagugcgacauccccaucggcgccggcaucugcgccagcuaccagacgcagaccaacuccccgcggcgcgcccggagcguggcgucccagagcaucaucgccuacaccaugucccugggggccgagaacagcgucgccuacuccaacaacagcaucgccauccccaccaacuucacgaucuccgugaccaccgagauccugcccgugagcaugaccaagacgagcgucgacugcaccauguacaucugcggcgacuccaccgagugcagcaaccuccugcugcaguacggguccuucugcacccagcucaaccgcgcgcugacgggcaucgccguggagcaggacaagaacacccaggagguguucgcccaggucaagcagaucuacaagacgcccccgaucaaggacuucgggggcuucaacuucagccagauccugcccgaccccuccaagcccagcaagcgguccuucaucgaggaccuccuguucaacaaggugacccuggccgacgccggcuucaucaagcaguacggggacugccucggcgacaucgcggcccgcgaccugaucugcgcccagaaguucaacgggcugaccgugcucccgccccugcugaccgacgagaugaucgcccaguacaccagcgcccuccuggcgggcaccaucacguccggguggaccuucggcgccggcgccgcccugcagauccccuucgcgaugcagauggccuaccgguucaacgggaucggcgucacccagaacgugcucuacgagaaccagaagcugaucgccaaccaguucaacagcgccaucgggaagauccaggacucccugagcuccaccgccagcgcgcucggcaagcugcaggacguggucaaccagaacgcccaggcccugaacacgcucgugaagcagcuguccagcaacuucggggccaucuccagcgugcugaacgacauccucucccgccuggacccgcccgaggccgagguccagaucgaccggcugaucaccggccgccuccagagccugcagaccuacgugacccagcagcugauccgggcggccgagauccgcgccagcgccaaccucgccgcgaccaagauguccgagugcgugcugggccagagcaagcgggucgacuucugcgggaagggcuaccaccugauguccuucccccagagcgcgccccacggggugguguuccuccacgucacguacgugcccgcccaggagaagaacuucaccaccgccccggccaucugccacgacggcaaggcccacuucccccgcgagggggucuucguguccaacggcacccacugguucgugacgcagcggaacuucuacgagccccagaucaucaccaccgacaacaccuucgucagcggcaacugcgacguggugaucgggaucgucaacaacacgguguacgacccccugcagccggagcuggacuccuucaaggaggagcucgacaaguacuucaagaaccacaccagccccgacguggaccugggcgacaucuccgggaucaacgccagcgucgugaacauccagaaggagaucgaccgccugaacgagguggccaagaaccucaacgagucccugaucgaccugcaggagcucggcaaguacgagcaguacaucaaguggcccugguacaucuggcugggcuucaucgccgggcugaucgcgaucgucauggugaccaucaugcucugcugcaugaccagcugcugcuccugccugaagggcugcugcagcugcggguccugcugcaaguucgacgaggacgacagcgagccggugcugaagggcgucaagcuccacuacacgugaggacuagucccuguucccagagcccacuuuuuuuucuuuuuuugaaauaaaauagccugucuuucagaucuaaaaaaaaaaaaaaaaaaaaaaaaaaaaaaaaaaaaaaaaaaaaaaaaaaaaaaaaaaaaaaaaaaaaaaaaaaaaaaaaaaaaaaaaaaaaaaaaaaaa

SEQ ID NO: 25079 - RNA, 4167 nt, Artificial Sequence
  SARS-CoV-2/Wuhan/WIV05/2019__EPI_ISL_402128 spike protein mRNA gc (1-1273)(K986P_V987P_S477N_D614G)
aggagagggcgcuuggcuugcaaggacccugagcugcggcauugaagcacacccaacccaacucgacugaagucagccucacugaaccggaucugagaaucuucucucucugggcuugccagggcucuccgaaccuagcuagcauccucuucaauuccaacuagaaagcuuaccauguucguguuccugguccuccugccccuggugagcucccagugcgugaaccucaccacccgcacgcagcugccgcccgccuacaccaacagcuucacccggggcgucuacuaccccgacaagguguuccgcuccagcgugcugcacuccacccaggaccucuuccugcccuucuucagcaacgucacgugguuccacgccauccacguguccgggaccaacggcaccaagcgguucgacaacccggugcugcccuucaacgacggggucuacuucgcgagcaccgagaaguccaacaucauccgcggcuggaucuucgggacgacccucgacagcaagacccagucccugcugaucgugaacaacgccaccaacguggucaucaaggugugcgaguuccaguucugcaacgaccccuuccucggcguguacuaccacaagaacaacaagagcuggauggaguccgaguuccgggucuacagcuccgccaacaacugcacguucgaguacgugagccagcccuuccugauggaccuggagggcaagcaggggaacuucaagaaccuccgcgaguucguguucaagaacaucgacggcuacuucaagaucuacuccaagcacaccccgaucaaccugguccgggaccugccccagggguucagcgcccucgagccccugguggaccugcccaucggcaucaacaucacccgcuuccagacccuccuggcccugcaccgguccuaccucacgccgggggacagcagcuccggcuggaccgcgggcgccgccgccuacuacgugggguaccugcagccccgcaccuuccugcucaaguacaacgagaacggcaccaucacggacgcggucgacugcgcccuggacccccugagcgagaccaagugcacccucaaguccuucaccguggagaaggggaucuaccagacgagcaacuuccgggugcagcccaccgaguccaucguccgcuucccgaacaucaccaaccugugccccuucggcgagguguucaacgccacccgguucgccagcgucuacgccuggaaccgcaagcggaucuccaacugcguggcggacuacagcgugcuguacaacuccgccagcuucuccacguucaagugcuacggcgucagccccaccaagcucaacgaccugugcuucaccaacguguacgccgacuccuucgugauccgcggggacgagguccggcagaucgcccccggccagaccgggaagaucgccgacuacaacuacaagcugccggacgacuucacgggcugcgugaucgcguggaacagcaacaaccucgacuccaaggucgggggcaacuacaacuaccuguaccgccuguuccgcaagagcaaccucaagcccuucgagcgggacaucuccaccgagaucuaccaggccggcaacacccccugcaacgggguggagggcuucaacugcuacuucccccugcagagcuacggguuccagccgaccaacggcgugggguaccagcccuaccggguggucgugcuguccuucgagcuccugcacgcccccgccacggugugcggccccaagaaguccaccaaccuggucaagaacaagugcgugaacuucaacuucaacggccucaccgggaccggcgugcugaccgagagcaacaagaaguuccugccguuccagcaguucgggcgcgacaucgccgacacgaccgacgcgguccgcgacccccagacccuggagauccucgacaucacccccugcagcuucggcggggugagcgugaucacgccgggcaccaacaccuccaaccaggucgccgugcuguaccagggcgugaacugcaccgagguccccguggccauccacgccgaccagcugacgcccaccuggcggguguacagcaccggguccaacgucuuccagacccgcgccggcugccucaucggggcggagcacgugaacaacagcuacgagugcgacauccccaucggcgccggcaucugcgccuccuaccagacgcagaccaacagcccgcggcgcgcccgguccguggcgagccaguccaucaucgccuacaccaugagccugggggccgagaacuccgucgccuacagcaacaacuccaucgccauccccaccaacuucacgaucagcgugaccaccgagauccugcccguguccaugaccaagacgagcgucgacugcaccauguacaucugcggcgacagcaccgagugcuccaaccuccugcugcaguacgggagcuucugcacccagcucaaccgcgcgcugacgggcaucgccguggagcaggacaagaacacccaggagguguucgcccaggucaagcagaucuacaagacgcccccgaucaaggacuucgggggcuucaacuucucccagauccugcccgaccccagcaagcccuccaagcggagcuucaucgaggaccuccuguucaacaaggugacccuggccgacgccggcuucaucaagcaguacggggacugccucggcgacaucgcggcccgcgaccugaucugcgcccagaaguucaacgggcugaccgugcucccgccccugcugaccgacgagaugaucgcccaguacaccuccgcccuccuggcgggcaccaucacgagcggguggaccuucggcgccggcgccgcccugcagauccccuucgcgaugcagauggccuaccgguucaacgggaucggcgucacccagaacgugcucuacgagaaccagaagcugaucgccaaccaguucaacuccgccaucgggaagauccaggacagccuguccagcaccgccuccgcgcucggcaagcugcaggacguggucaaccagaacgcccaggcccugaacacgcucgugaagcagcugagcuccaacuucggggccaucagcuccgugcugaacgacauccucagccgccuggacccgcccgaggccgagguccagaucgaccggcugaucaccggccgccuccagucccugcagaccuacgugacccagcagcugauccgggcggccgagauccgcgccagcgccaaccucgccgcgaccaagaugagcgagugcgugcugggccaguccaagcgggucgacuucugcgggaagggcuaccaccugaugagcuucccccaguccgcgccccacggggugguguuccuccacgucacguacgugcccgcccaggagaagaacuucaccaccgccccggccaucugccacgacggcaaggcccacuucccccgcgagggggucuucgugagcaacggcacccacugguucgugacgcagcggaacuucuacgagccccagaucaucaccaccgacaacaccuucgucuccggcaacugcgacguggugaucgggaucgucaacaacacgguguacgacccccugcagccggagcuggacagcuucaaggaggagcucgacaaguacuucaagaaccacaccucccccgacguggaccugggcgacaucagcgggaucaacgccuccgucgugaacauccagaaggagaucgaccgccugaacgagguggccaagaaccucaacgagagccugaucgaccugcaggagcucggcaaguacgagcaguacaucaaguggcccugguacaucuggcugggcuucaucgccgggcugaucgcgaucgucauggugaccaucaugcucugcugcaugaccuccugcugcagcugccugaagggcugcugcuccugcgggagcugcugcaaguucgacgaggacgacuccgagccggugcugaagggcgucaagcuccacuacacgugaggacuagucccuguucccagagcccacuuuuuuuucuuuuuuugaaauaaaauagccugucuuucagaucuaaaaaaaaaaaaaaaaaaaaaaaaaaaaaaaaaaaaaaaaaaaaaaaaaaaaaaaaaaaaaaaaaaaaaaaaaaaaaaaaaaaaaaaaaaaaaaaaaaaa

SEQ ID NO: 25080 - RNA, 4167 nt, Artificial Sequence
  SARS-CoV-2/Wuhan/WIV05/2019__EPI_ISL_402128 spike protein mRNA gc (1-1273)(K986P_V987P_N501Y_D614G)
aggagagggcgcuuggcuugcaaggacccugagcugcggcauugaagcacacccaacccaacucgacugaagucagccucacugaaccggaucugagaaucuucucucucugggcuugccagggcucuccgaaccuagcuagcauccucuucaauuccaacuagaaagcuuaccauguucguguuccugguccuccugccccuggugagcucccagugcgugaaccucaccacccgcacgcagcugccgcccgccuacaccaacagcuucacccggggcgucuacuaccccgacaagguguuccgcuccagcgugcugcacuccacccaggaccucuuccugcccuucuucagcaacgucacgugguuccacgccauccacguguccgggaccaacggcaccaagcgguucgacaacccggugcugcccuucaacgacggggucuacuucgcgagcaccgagaaguccaacaucauccgcggcuggaucuucgggacgacccucgacagcaagacccagucccugcugaucgugaacaacgccaccaacguggucaucaaggugugcgaguuccaguucugcaacgaccccuuccucggcguguacuaccacaagaacaacaagagcuggauggaguccgaguuccgggucuacagcuccgccaacaacugcacguucgaguacgugagccagcccuuccugauggaccuggagggcaagcaggggaacuucaagaaccuccgcgaguucguguucaagaacaucgacggcuacuucaagaucuacuccaagcacaccccgaucaaccugguccgggaccugccccagggguucagcgcccucgagccccugguggaccugcccaucggcaucaacaucacccgcuuccagacccuccuggcccugcaccgguccuaccucacgccgggggacagcagcuccggcuggaccgcgggcgccgccgccuacuacgugggguaccugcagccccgcaccuuccugcucaaguacaacgagaacggcaccaucacggacgcggucgacugcgcccuggacccccugagcgagaccaagugcacccucaaguccuucaccguggagaaggggaucuaccagacgagcaacuuccgggugcagcccaccgaguccaucguccgcuucccgaacaucaccaaccugugccccuucggcgagguguucaacgccacccgguucgccagcgucuacgccuggaaccgcaagcggaucuccaacugcguggcggacuacagcgugcuguacaacuccgccagcuucuccacguucaagugcuacggcgucagccccaccaagcucaacgaccugugcuucaccaacguguacgccgacuccuucgugauccgcggggacgagguccggcagaucgcccccggccagaccgggaagaucgccgacuacaacuacaagcugccggacgacuucacgggcugcgugaucgcguggaacagcaacaaccucgacuccaaggucgggggcaacuacaacuaccuguaccgccuguuccgcaagagcaaccucaagcccuucgagcgggacaucuccaccgagaucuaccaggccggcagcacccccugcaacgggguggagggcuucaacugcuacuucccccugcaguccuacggguuccagccgaccuacggcgugggguaccagcccuaccggguggucgugcugagcuucgagcuccugcacgcccccgccacggugugcggccccaagaaguccaccaaccuggucaagaacaagugcgugaacuucaacuucaacggccucaccgggaccggcgugcugaccgagagcaacaagaaguuccugccguuccagcaguucgggcgcgacaucgccgacacgaccgacgcgguccgcgacccccagacccuggagauccucgacaucacccccugcagcuucggcgggguguccgugaucacgccgggcaccaacaccagcaaccaggucgccgugcuguaccagggcgugaacugcaccgagguccccguggccauccacgccgaccagcugacgcccaccuggcggguguacuccaccgggagcaacgucuuccagacccgcgccggcugccucaucggggcggagcacgugaacaacuccuacgagugcgacauccccaucggcgccggcaucugcgccagcuaccagacgcagaccaacuccccgcggcgcgcccggagcguggcgucccagagcaucaucgccuacaccaugucccugggggccgagaacagcgucgccuacuccaacaacagcaucgccauccccaccaacuucacgaucuccgugaccaccgagauccugcccgugagcaugaccaagacgagcgucgacugcaccauguacaucugcggcgacuccaccgagugcagcaaccuccugcugcaguacggguccuucugcacccagcucaaccgcgcgcugacgggcaucgccguggagcaggacaagaacacccaggagguguucgcccaggucaagcagaucuacaagacgcccccgaucaaggacuucgggggcuucaacuucagccagauccugcccgaccccuccaagcccagcaagcgguccuucaucgaggaccuccuguucaacaaggugacccuggccgacgccggcuucaucaagcaguacggggacugccucggcgacaucgcggcccgcgaccugaucugcgcccagaaguucaacgggcugaccgugcucccgccccugcugaccgacgagaugaucgcccaguacaccagcgcccuccuggcgggcaccaucacguccggguggaccuucggcgccggcgccgcccugcagauccccuucgcgaugcagauggccuaccgguucaacgggaucggcgucacccagaacgugcucuacgagaaccagaagcugaucgccaaccaguucaacagcgccaucgggaagauccaggacucccugagcuccaccgccagcgcgcucggcaagcugcaggacguggucaaccagaacgcccaggcccugaacacgcucgugaagcagcuguccagcaacuucggggccaucuccagcgugcugaacgacauccucucccgccuggacccgcccgaggccgagguccagaucgaccggcugaucaccggccgccuccagagccugcagaccuacgugacccagcagcugauccgggcggccgagauccgcgccagcgccaaccucgccgcgaccaagauguccgagugcgugcugggccagagcaagcgggucgacuucugcgggaagggcuaccaccugauguccuucccccagagcgcgccccacggggugguguuccuccacgucacguacgugcccgcccaggagaagaacuucaccaccgccccggccaucugccacgacggcaaggcccacuucccccgcgagggggucuucguguccaacggcacccacugguucgugacgcagcggaacuucuacgagccccagaucaucaccaccgacaacaccuucgucagcggcaacugcgacguggugaucgggaucgucaacaacacgguguacgacccccugcagccggagcuggacuccuucaaggaggagcucgacaaguacuucaagaaccacaccagccccgacguggaccugggcgacaucuccgggaucaacgccagcgucgugaacauccagaaggagaucgaccgccugaacgagguggccaagaaccucaacgagucccugaucgaccugcaggagcucggcaaguacgagcaguacaucaaguggcccugguacaucuggcugggcuucaucgccgggcugaucgcgaucgucauggugaccaucaugcucugcugcaugaccagcugcugcuccugccugaagggcugcugcagcugcggguccugcugcaaguucgacgaggacgacagcgagccggugcugaagggcgucaagcuccacuacacgugaggacuagucccuguucccagagcccacuuuuuuuucuuuuuuugaaauaaaauagccugucuuucagaucuaaaaaaaaaaaaaaaaaaaaaaaaaaaaaaaaaaaaaaaaaaaaaaaaaaaaaaaaaaaaaaaaaaaaaaaaaaaaaaaaaaaaaaaaaaaaaaaaaaaa

SEQ ID NO: 25081 - RNA, 4161 nt, Artificial Sequence
  SARS-CoV-2/Wuhan/WIV05/2019__EPI_ISL_402128 spike protein mRNA gc (1-1273)(K986P_V987P_H69del_V70del_D614G)
aggagagggcgcuuggcuugcaaggacccugagcugcggcauugaagcacacccaacccaacucgacugaagucagccucacugaaccggaucugagaaucuucucucucugggcuugccagggcucuccgaaccuagcuagcauccucuucaauuccaacuagaaagcuuaccauguucguguuccugguccuccugccccuggugagcucccagugcgugaaccucaccacccgcacgcagcugccgcccgccuacaccaacagcuucacccggggcgucuacuaccccgacaagguguuccgcuccagcgugcugcacuccacccaggaccucuuccugcccuucuucagcaacgucacgugguuccacgccaucuccgggaccaacggcaccaagcgguucgacaacccggugcugcccuucaacgacgggguguacuucgcgagcaccgagaaguccaacaucauccgcggcuggaucuucgggacgacccucgacagcaagacccagucccugcugaucgucaacaacgccaccaacguggugaucaaggucugcgaguuccaguucugcaacgaccccuuccucggcguguacuaccacaagaacaacaagagcuggauggaguccgaguuccggguguacagcuccgccaacaacugcacguucgaguacgucagccagcccuuccugauggaccuggagggcaagcaggggaacuucaagaaccuccgcgaguucguguucaagaacaucgacggcuacuucaagaucuacuccaagcacaccccgaucaaccuggugcgggaccugccccagggguucagcgcccucgagccccuggucgaccugcccaucggcaucaacaucacccgcuuccagacccuccuggcccugcaccgguccuaccucacgccgggggacagcagcuccggcuggaccgcgggcgccgccgccuacuacgugggguaccugcagccccgcaccuuccugcucaaguacaacgagaacggcaccaucacggacgcgguggacugcgcccuggacccccugagcgagaccaagugcacccucaaguccuucaccgucgagaaggggaucuaccagacgagcaacuuccgggugcagcccaccgaguccaucgugcgcuucccgaacaucaccaaccugugccccuucggcgaggucuucaacgccacccgguucgccagcguguacgccuggaaccgcaagcggaucuccaacugcgucgcggacuacagcgugcuguacaacuccgccagcuucuccacguucaagugcuacggcgugagccccaccaagcucaacgaccugugcuucaccaacgucuacgccgacuccuucgugauccgcggggacgaggugcggcagaucgcccccggccagaccgggaagaucgccgacuacaacuacaagcugccggacgacuucacgggcugcgucaucgcguggaacagcaacaaccucgacuccaaggucgggggcaacuacaacuaccuguaccgccuguuccgcaagagcaaccucaagcccuucgagcgggacaucuccaccgagaucuaccaggccggcagcacccccugcaacgggguggagggcuucaacugcuacuucccccugcaguccuacggguuccagccgaccaacggcgugggguaccagcccuaccggguggugguccugagcuucgagcuccugcacgcccccgccacggugugcggccccaagaaguccaccaaccuggugaagaacaagugcgucaacuucaacuucaacggccucaccgggaccggcgugcugaccgagagcaacaagaaguuccugccguuccagcaguucgggcgcgacaucgccgacacgaccgacgcggugcgcgacccccagacccuggagauccucgacaucacccccugcagcuucggcggggucuccgugaucacgccgggcaccaacaccagcaaccagguggccguccuguaccagggcgugaacugcaccgaggugcccgucgccauccacgccgaccagcugacgcccaccuggcggguguacuccaccgggagcaacguguuccagacccgcgccggcugccucaucggggcggagcacgucaacaacuccuacgagugcgacauccccaucggcgccggcaucugcgccagcuaccagacgcagaccaacuccccgcggcgcgcccggagcguggcgucccagagcaucaucgccuacaccaugucccugggggccgagaacagcguggccuacuccaacaacagcaucgccauccccaccaacuucacgaucuccgucaccaccgagauccugcccgugagcaugaccaagacgagcguggacugcaccauguacaucugcggcgacuccaccgagugcagcaaccuccugcugcaguacggguccuucugcacccagcucaaccgcgcgcugacgggcaucgccgucgagcaggacaagaacacccaggagguguucgcccaggugaagcagaucuacaagacgcccccgaucaaggacuucgggggcuucaacuucagccagauccugcccgaccccuccaagcccagcaagcgguccuucaucgaggaccuccuguucaacaaggucacccuggccgacgccggcuucaucaagcaguacggggacugccucggcgacaucgcggcccgcgaccugaucugcgcccagaaguucaacgggcugaccgugcucccgccccugcugaccgacgagaugaucgcccaguacaccagcgcccuccuggcgggcaccaucacguccggguggaccuucggcgccggcgccgcccugcagauccccuucgcgaugcagauggccuaccgguucaacgggaucggcgugacccagaacguccucuacgagaaccagaagcugaucgccaaccaguucaacagcgccaucgggaagauccaggacucccugagcuccaccgccagcgcgcucggcaagcugcaggacguggugaaccagaacgcccaggcccugaacacgcucgucaagcagcuguccagcaacuucggggccaucuccagcgugcugaacgacauccucucccgccuggacccgcccgaggccgaggugcagaucgaccggcugaucaccggccgccuccagagccugcagaccuacgucacccagcagcugauccgggcggccgagauccgcgccagcgccaaccucgccgcgaccaagauguccgagugcgugcugggccagagcaagcggguggacuucugcgggaagggcuaccaccugauguccuucccccagagcgcgccccacggggucguguuccuccacgugacguacguccccgcccaggagaagaacuucaccaccgccccggccaucugccacgacggcaaggcccacuucccccgcgaggggguguucgucuccaacggcacccacugguucgugacgcagcggaacuucuacgagccccagaucaucaccaccgacaacaccuucgugagcggcaacugcgacgucgugaucgggaucgugaacaacacggucuacgacccccugcagccggagcuggacuccuucaaggaggagcucgacaaguacuucaagaaccacaccagccccgacguggaccugggcgacaucuccgggaucaacgccagcguggucaacauccagaaggagaucgaccgccugaacgagguggccaagaaccucaacgagucccugaucgaccugcaggagcucggcaaguacgagcaguacaucaaguggcccugguacaucuggcugggcuucaucgccgggcugaucgcgaucgugauggucaccaucaugcucugcugcaugaccagcugcugcuccugccugaagggcugcugcagcugcggguccugcugcaaguucgacgaggacgacagcgagccggugcugaagggcgugaagcuccacuacacgugaggacuagucccuguucccagagcccacuuuuuuuucuuuuuuugaaauaaaauagccugucuuucagaucuaaaaaaaaaaaaaaaaaaaaaaaaaaaaaaaaaaaaaaaaaaaaaaaaaaaaaaaaaaaaaaaaaaaaaaaaaaaaaaaaaaaaaaaaaaaaaaaaaaaa

SEQ ID NO: 25082 - RNA, 4167 nt, Artificial Sequence
  SARS-CoV-2/Wuhan/WIV05/2019__EPI_ISL_402128 spike protein mRNA gc (1-1273)(K986P_V987P_Y453F_D614G)
aggagagggcgcuuggcuugcaaggacccugagcugcggcauugaagcacacccaacccaacucgacugaagucagccucacugaaccggaucugagaaucuucucucucugggcuugccagggcucuccgaaccuagcuagcauccucuucaauuccaacuagaaagcuuaccauguucguguuccugguccuccugccccuggugagcucccagugcgugaaccucaccacccgcacgcagcugccgcccgccuacaccaacagcuucacccggggcgucuacuaccccgacaagguguuccgcuccagcgugcugcacuccacccaggaccucuuccugcccuucuucagcaacgucacgugguuccacgccauccacguguccgggaccaacggcaccaagcgguucgacaacccggugcugcccuucaacgacggggucuacuucgcgagcaccgagaaguccaacaucauccgcggcuggaucuucgggacgacccucgacagcaagacccagucccugcugaucgugaacaacgccaccaacguggucaucaaggugugcgaguuccaguucugcaacgaccccuuccucggcguguacuaccacaagaacaacaagagcuggauggaguccgaguuccgggucuacagcuccgccaacaacugcacguucgaguacgugagccagcccuuccugauggaccuggagggcaagcaggggaacuucaagaaccuccgcgaguucguguucaagaacaucgacggcuacuucaagaucuacuccaagcacaccccgaucaaccugguccgggaccugccccagggguucagcgcccucgagccccugguggaccugcccaucggcaucaacaucacccgcuuccagacccuccuggcccugcaccgguccuaccucacgccgggggacagcagcuccggcuggaccgcgggcgccgccgccuacuacgugggguaccugcagccccgcaccuuccugcucaaguacaacgagaacggcaccaucacggacgcggucgacugcgcccuggacccccugagcgagaccaagugcacccucaaguccuucaccguggagaaggggaucuaccagacgagcaacuuccgggugcagcccaccgaguccaucguccgcuucccgaacaucaccaaccugugccccuucggcgagguguucaacgccacccgguucgccagcgucuacgccuggaaccgcaagcggaucuccaacugcguggcggacuacagcgugcuguacaacuccgccagcuucuccacguucaagugcuacggcgucagccccaccaagcucaacgaccugugcuucaccaacguguacgccgacuccuucgugauccgcggggacgagguccggcagaucgcccccggccagaccgggaagaucgccgacuacaacuacaagcugccggacgacuucacgggcugcgugaucgcguggaacagcaacaaccucgacuccaaggucgggggcaacuacaacuaccuguuccgccuguuccgcaagagcaaccucaagcccuucgagcgggacaucuccaccgagaucuaccaggccggcagcacccccugcaacgggguggagggcuucaacugcuacuucccccugcaguccuacggguuccagccgaccaacggcgugggguaccagcccuaccggguggucgugcugagcuucgagcuccugcacgcccccgccacggugugcggccccaagaaguccaccaaccuggucaagaacaagugcgugaacuucaacuucaacggccucaccgggaccggcgugcugaccgagagcaacaagaaguuccugccguuccagcaguucgggcgcgacaucgccgacacgaccgacgcgguccgcgacccccagacccuggagauccucgacaucacccccugcagcuucggcgggguguccgugaucacgccgggcaccaacaccagcaaccaggucgccgugcuguaccagggcgugaacugcaccgagguccccguggccauccacgccgaccagcugacgcccaccuggcggguguacuccaccgggagcaacgucuuccagacccgcgccggcugccucaucggggcggagcacgugaacaacuccuacgagugcgacauccccaucggcgccggcaucugcgccagcuaccagacgcagaccaacuccccgcggcgcgcccggagcguggcgucccagagcaucaucgccuacaccaugucccugggggccgagaacagcgucgccuacuccaacaacagcaucgccauccccaccaacuucacgaucuccgugaccaccgagauccugcccgugagcaugaccaagacgagcgucgacugcaccauguacaucugcggcgacuccaccgagugcagcaaccuccugcugcaguacggguccuucugcacccagcucaaccgcgcgcugacgggcaucgccguggagcaggacaagaacacccaggagguguucgcccaggucaagcagaucuacaagacgcccccgaucaaggacuucgggggcuucaacuucagccagauccugcccgaccccuccaagcccagcaagcgguccuucaucgaggaccuccuguucaacaaggugacccuggccgacgccggcuucaucaagcaguacggggacugccucggcgacaucgcggcccgcgaccugaucugcgcccagaaguucaacgggcugaccgugcucccgccccugcugaccgacgagaugaucgcccaguacaccagcgcccuccuggcgggcaccaucacguccggguggaccuucggcgccggcgccgcccugcagauccccuucgcgaugcagauggccuaccgguucaacgggaucggcgucacccagaacgugcucuacgagaaccagaagcugaucgccaaccaguucaacagcgccaucgggaagauccaggacucccugagcuccaccgccagcgcgcucggcaagcugcaggacguggucaaccagaacgcccaggcccugaacacgcucgugaagcagcuguccagcaacuucggggccaucuccagcgugcugaacgacauccucucccgccuggacccgcccgaggccgagguccagaucgaccggcugaucaccggccgccuccagagccugcagaccuacgugacccagcagcugauccgggcggccgagauccgcgccagcgccaaccucgccgcgaccaagauguccgagugcgugcugggccagagcaagcgggucgacuucugcgggaagggcuaccaccugauguccuucccccagagcgcgccccacggggugguguuccuccacgucacguacgugcccgcccaggagaagaacuucaccaccgccccggccaucugccacgacggcaaggcccacuucccccgcgagggggucuucguguccaacggcacccacugguucgugacgcagcggaacuucuacgagccccagaucaucaccaccgacaacaccuucgucagcggcaacugcgacguggugaucgggaucgucaacaacacgguguacgacccccugcagccggagcuggacuccuucaaggaggagcucgacaaguacuucaagaaccacaccagccccgacguggaccugggcgacaucuccgggaucaacgccagcgucgugaacauccagaaggagaucgaccgccugaacgagguggccaagaaccucaacgagucccugaucgaccugcaggagcucggcaaguacgagcaguacaucaaguggcccugguacaucuggcugggcuucaucgccgggcugaucgcgaucgucauggugaccaucaugcucugcugcaugaccagcugcugcuccugccugaagggcugcugcagcugcggguccugcugcaaguucgacgaggacgacagcgagccggugcugaagggcgucaagcuccacuacacgugaggacuagucccuguucccagagcccacuuuuuuuucuuuuuuugaaauaaaauagccugucuuucagaucuaaaaaaaaaaaaaaaaaaaaaaaaaaaaaaaaaaaaaaaaaaaaaaaaaaaaaaaaaaaaaaaaaaaaaaaaaaaaaaaaaaaaaaaaaaaaaaaaaaaa

SEQ ID NO: 25083 - RNA, 4167 nt, Artificial Sequence
  SARS-CoV-2/Wuhan/WIV05/2019__EPI_ISL_402128 spike protein mRNA gc (1-1273)(K986P_V987P_D614G_I692V)
aggagagggcgcuuggcuugcaaggacccugagcugcggcauugaagcacacccaacccaacucgacugaagucagccucacugaaccggaucugagaaucuucucucucugggcuugccagggcucuccgaaccuagcuagcauccucuucaauuccaacuagaaagcuuaccauguucguguuccugguccuccugccccuggugagcucccagugcgugaaccucaccacccgcacgcagcugccgcccgccuacaccaacagcuucacccggggcgucuacuaccccgacaagguguuccgcuccagcgugcugcacuccacccaggaccucuuccugcccuucuucagcaacgucacgugguuccacgccauccacguguccgggaccaacggcaccaagcgguucgacaacccggugcugcccuucaacgacggggucuacuucgcgagcaccgagaaguccaacaucauccgcggcuggaucuucgggacgacccucgacagcaagacccagucccugcugaucgugaacaacgccaccaacguggucaucaaggugugcgaguuccaguucugcaacgaccccuuccucggcguguacuaccacaagaacaacaagagcuggauggaguccgaguuccgggucuacagcuccgccaacaacugcacguucgaguacgugagccagcccuuccugauggaccuggagggcaagcaggggaacuucaagaaccuccgcgaguucguguucaagaacaucgacggcuacuucaagaucuacuccaagcacaccccgaucaaccugguccgggaccugccccagggguucagcgcccucgagccccugguggaccugcccaucggcaucaacaucacccgcuuccagacccuccuggcccugcaccgguccuaccucacgccgggggacagcagcuccggcuggaccgcgggcgccgccgccuacuacgugggguaccugcagccccgcaccuuccugcucaaguacaacgagaacggcaccaucacggacgcggucgacugcgcccuggacccccugagcgagaccaagugcacccucaaguccuucaccguggagaaggggaucuaccagacgagcaacuuccgggugcagcccaccgaguccaucguccgcuucccgaacaucaccaaccugugccccuucggcgagguguucaacgccacccgguucgccagcgucuacgccuggaaccgcaagcggaucuccaacugcguggcggacuacagcgugcuguacaacuccgccagcuucuccacguucaagugcuacggcgucagccccaccaagcucaacgaccugugcuucaccaacguguacgccgacuccuucgugauccgcggggacgagguccggcagaucgcccccggccagaccgggaagaucgccgacuacaacuacaagcugccggacgacuucacgggcugcgugaucgcguggaacagcaacaaccucgacuccaaggucgggggcaacuacaacuaccuguaccgccuguuccgcaagagcaaccucaagcccuucgagcgggacaucuccaccgagaucuaccaggccggcagcacccccugcaacgggguggagggcuucaacugcuacuucccccugcaguccuacggguuccagccgaccaacggcgugggguaccagcccuaccggguggucgugcugagcuucgagcuccugcacgcccccgccacggugugcggccccaagaaguccaccaaccuggucaagaacaagugcgugaacuucaacuucaacggccucaccgggaccggcgugcugaccgagagcaacaagaaguuccugccguuccagcaguucgggcgcgacaucgccgacacgaccgacgcgguccgcgacccccagacccuggagauccucgacaucacccccugcagcuucggcgggguguccgugaucacgccgggcaccaacaccagcaaccaggucgccgugcuguaccagggcgugaacugcaccgagguccccguggccauccacgccgaccagcugacgcccaccuggcggguguacuccaccgggagcaacgucuuccagacccgcgccggcugccucaucggggcggagcacgugaacaacuccuacgagugcgacauccccaucggcgccggcaucugcgccagcuaccagacgcagaccaacuccccgcggcgcgcccggagcguggcgucccagagcgucaucgccuacaccaugucccugggggccgagaacagcguggccuacuccaacaacagcaucgccauccccaccaacuucacgaucuccgugaccaccgagauccugcccgucagcaugaccaagacgagcguggacugcaccauguacaucugcggcgacuccaccgagugcagcaaccuccugcugcaguacggguccuucugcacccagcucaaccgcgcgcugacgggcaucgccguggagcaggacaagaacacccaggaggucuucgcccaggugaagcagaucuacaagacgcccccgaucaaggacuucgggggcuucaacuucagccagauccugcccgaccccuccaagcccagcaagcgguccuucaucgaggaccuccuguucaacaaggugacccuggccgacgccggcuucaucaagcaguacggggacugccucggcgacaucgcggcccgcgaccugaucugcgcccagaaguucaacgggcugaccguccucccgccccugcugaccgacgagaugaucgcccaguacaccagcgcccuccuggcgggcaccaucacguccggguggaccuucggcgccggcgccgcccugcagauccccuucgcgaugcagauggccuaccgguucaacgggaucggcgugacccagaacgugcucuacgagaaccagaagcugaucgccaaccaguucaacagcgccaucgggaagauccaggacucccugagcuccaccgccagcgcgcucggcaagcugcaggacgucgugaaccagaacgcccaggcccugaacacgcucgugaagcagcuguccagcaacuucggggccaucuccagcguccugaacgacauccucucccgccuggacccgcccgaggccgaggugcagaucgaccggcugaucaccggccgccuccagagccugcagaccuacgugacccagcagcugauccgggcggccgagauccgcgccagcgccaaccucgccgcgaccaagauguccgagugcguccugggccagagcaagcggguggacuucugcgggaagggcuaccaccugauguccuucccccagagcgcgccccacgggguggucuuccuccacgugacguacguccccgcccaggagaagaacuucaccaccgccccggccaucugccacgacggcaaggcccacuucccccgcgaggggguguucguguccaacggcacccacugguucgucacgcagcggaacuucuacgagccccagaucaucaccaccgacaacaccuucgugagcggcaacugcgacguggucaucgggaucgugaacaacacgguguacgacccccugcagccggagcuggacuccuucaaggaggagcucgacaaguacuucaagaaccacaccagccccgacgucgaccugggcgacaucuccgggaucaacgccagcguggugaacauccagaaggagaucgaccgccugaacgaggucgccaagaaccucaacgagucccugaucgaccugcaggagcucggcaaguacgagcaguacaucaaguggcccugguacaucuggcugggcuucaucgccgggcugaucgcgaucgugauggugaccaucaugcucugcugcaugaccagcugcugcuccugccugaagggcugcugcagcugcggguccugcugcaaguucgacgaggacgacagcgagccgguccugaagggcgugaagcuccacuacacgugaggacuagucccuguucccagagcccacuuuuuuuucuuuuuuugaaauaaaauagccugucuuucagaucuaaaaaaaaaaaaaaaaaaaaaaaaaaaaaaaaaaaaaaaaaaaaaaaaaaaaaaaaaaaaaaaaaaaaaaaaaaaaaaaaaaaaaaaaaaaaaaaaaaaa

SEQ ID NO: 25084 - RNA, 4167 nt, Artificial Sequence
  SARS-CoV-2/Wuhan/WIV05/2019__EPI_ISL_402128 spike protein mRNA gc (1-1273)(K986P_V987P_D614G_M1229I)
aggagagggcgcuuggcuugcaaggacccugagcugcggcauugaagcacacccaacccaacucgacugaagucagccucacugaaccggaucugagaaucuucucucucugggcuugccagggcucuccgaaccuagcuagcauccucuucaauuccaacuagaaagcuuaccauguucguguuccugguccuccugccccuggugagcucccagugcgugaaccucaccacccgcacgcagcugccgcccgccuacaccaacagcuucacccggggcgucuacuaccccgacaagguguuccgcuccagcgugcugcacuccacccaggaccucuuccugcccuucuucagcaacgucacgugguuccacgccauccacguguccgggaccaacggcaccaagcgguucgacaacccggugcugcccuucaacgacggggucuacuucgcgagcaccgagaaguccaacaucauccgcggcuggaucuucgggacgacccucgacagcaagacccagucccugcugaucgugaacaacgccaccaacguggucaucaaggugugcgaguuccaguucugcaacgaccccuuccucggcguguacuaccacaagaacaacaagagcuggauggaguccgaguuccgggucuacagcuccgccaacaacugcacguucgaguacgugagccagcccuuccugauggaccuggagggcaagcaggggaacuucaagaaccuccgcgaguucguguucaagaacaucgacggcuacuucaagaucuacuccaagcacaccccgaucaaccugguccgggaccugccccagggguucagcgcccucgagccccugguggaccugcccaucggcaucaacaucacccgcuuccagacccuccuggcccugcaccgguccuaccucacgccgggggacagcagcuccggcuggaccgcgggcgccgccgccuacuacgugggguaccugcagccccgcaccuuccugcucaaguacaacgagaacggcaccaucacggacgcggucgacugcgcccuggacccccugagcgagaccaagugcacccucaaguccuucaccguggagaaggggaucuaccagacgagcaacuuccgggugcagcccaccgaguccaucguccgcuucccgaacaucaccaaccugugccccuucggcgagguguucaacgccacccgguucgccagcgucuacgccuggaaccgcaagcggaucuccaacugcguggcggacuacagcgugcuguacaacuccgccagcuucuccacguucaagugcuacggcgucagccccaccaagcucaacgaccugugcuucaccaacguguacgccgacuccuucgugauccgcggggacgagguccggcagaucgcccccggccagaccgggaagaucgccgacuacaacuacaagcugccggacgacuucacgggcugcgugaucgcguggaacagcaacaaccucgacuccaaggucgggggcaacuacaacuaccuguaccgccuguuccgcaagagcaaccucaagcccuucgagcgggacaucuccaccgagaucuaccaggccggcagcacccccugcaacgggguggagggcuucaacugcuacuucccccugcaguccuacggguuccagccgaccaacggcgugggguaccagcccuaccggguggucgugcugagcuucgagcuccugcacgcccccgccacggugugcggccccaagaaguccaccaaccuggucaagaacaagugcgugaacuucaacuucaacggccucaccgggaccggcgugcugaccgagagcaacaagaaguuccugccguuccagcaguucgggcgcgacaucgccgacacgaccgacgcgguccgcgacccccagacccuggagauccucgacaucacccccugcagcuucggcgggguguccgugaucacgccgggcaccaacaccagcaaccaggucgccgugcuguaccagggcgugaacugcaccgagguccccguggccauccacgccgaccagcugacgcccaccuggcggguguacuccaccgggagcaacgucuuccagacccgcgccggcugccucaucggggcggagcacgugaacaacuccuacgagugcgacauccccaucggcgccggcaucugcgccagcuaccagacgcagaccaacuccccgcggcgcgcccggagcguggcgucccagagcaucaucgccuacaccaugucccugggggccgagaacagcgucgccuacuccaacaacagcaucgccauccccaccaacuucacgaucuccgugaccaccgagauccugcccgugagcaugaccaagacgagcgucgacugcaccauguacaucugcggcgacuccaccgagugcagcaaccuccugcugcaguacggguccuucugcacccagcucaaccgcgcgcugacgggcaucgccguggagcaggacaagaacacccaggagguguucgcccaggucaagcagaucuacaagacgcccccgaucaaggacuucgggggcuucaacuucagccagauccugcccgaccccuccaagcccagcaagcgguccuucaucgaggaccuccuguucaacaaggugacccuggccgacgccggcuucaucaagcaguacggggacugccucggcgacaucgcggcccgcgaccugaucugcgcccagaaguucaacgggcugaccgugcucccgccccugcugaccgacgagaugaucgcccaguacaccagcgcccuccuggcgggcaccaucacguccggguggaccuucggcgccggcgccgcccugcagauccccuucgcgaugcagauggccuaccgguucaacgggaucggcgucacccagaacgugcucuacgagaaccagaagcugaucgccaaccaguucaacagcgccaucgggaagauccaggacucccugagcuccaccgccagcgcgcucggcaagcugcaggacguggucaaccagaacgcccaggcccugaacacgcucgugaagcagcuguccagcaacuucggggccaucuccagcgugcugaacgacauccucucccgccuggacccgcccgaggccgagguccagaucgaccggcugaucaccggccgccuccagagccugcagaccuacgugacccagcagcugauccgggcggccgagauccgcgccagcgccaaccucgccgcgaccaagauguccgagugcgugcugggccagagcaagcgggucgacuucugcgggaagggcuaccaccugauguccuucccccagagcgcgccccacggggugguguuccuccacgucacguacgugcccgcccaggagaagaacuucaccaccgccccggccaucugccacgacggcaaggcccacuucccccgcgagggggucuucguguccaacggcacccacugguucgugacgcagcggaacuucuacgagccccagaucaucaccaccgacaacaccuucgucagcggcaacugcgacguggugaucgggaucgucaacaacacgguguacgacccccugcagccggagcuggacuccuucaaggaggagcucgacaaguacuucaagaaccacaccagccccgacguggaccugggcgacaucuccgggaucaacgccagcgucgugaacauccagaaggagaucgaccgccugaacgagguggccaagaaccucaacgagucccugaucgaccugcaggagcucggcaaguacgagcaguacaucaaguggcccugguacaucuggcugggcuucaucgccgggcugaucgcgaucgucaucgugaccaucaugcucugcugcaugaccagcugcugcuccugccugaagggcugcugcagcugcggguccugcugcaaguucgacgaggacgacagcgagccggugcugaagggcgucaagcuccacuacacgugaggacuagucccuguucccagagcccacuuuuuuuucuuuuuuugaaauaaaauagccugucuuucagaucuaaaaaaaaaaaaaaaaaaaaaaaaaaaaaaaaaaaaaaaaaaaaaaaaaaaaaaaaaaaaaaaaaaaaaaaaaaaaaaaaaaaaaaaaaaaaaaaaaaaa

SEQ ID NO: 25085 - RNA, 4161 nt, Artificial Sequence
  SARS-CoV-2/Wuhan/WIV05/2019__EPI_ISL_402128 spike protein mRNA gc (1-1273)(K986P_V987P_H69del_V70del_A222V_Y453F_S477N_D614G_I692V)
aggagagggcgcuuggcuugcaaggacccugagcugcggcauugaagcacacccaacccaacucgacugaagucagccucacugaaccggaucugagaaucuucucucucugggcuugccagggcucuccgaaccuagcuagcauccucuucaauuccaacuagaaagcuuaccauguucguguuccugguccuccugccccuggugagcucccagugcgugaaccucaccacccgcacgcagcugccgcccgccuacaccaacagcuucacccggggcgucuacuaccccgacaagguguuccgcuccagcgugcugcacuccacccaggaccucuuccugcccuucuucagcaacgucacgugguuccacgccaucuccgggaccaacggcaccaagcgguucgacaacccggugcugcccuucaacgacgggguguacuucgcgagcaccgagaaguccaacaucauccgcggcuggaucuucgggacgacccucgacagcaagacccagucccugcugaucgucaacaacgccaccaacguggugaucaaggucugcgaguuccaguucugcaacgaccccuuccucggcguguacuaccacaagaacaacaagagcuggauggaguccgaguuccggguguacagcuccgccaacaacugcacguucgaguacgucagccagcccuuccugauggaccuggagggcaagcaggggaacuucaagaaccuccgcgaguucguguucaagaacaucgacggcuacuucaagaucuacuccaagcacaccccgaucaaccuggugcgggaccugccccagggguucagcguccucgagccccugguggaccugcccaucggcaucaacaucacccgcuuccagacccuccuggcccugcaccgguccuaccucacgccgggggacagcagcuccggcuggaccgccggcgcggccgccuacuacgugggguaccugcagccccgcaccuuccugcucaaguacaacgagaacggcaccaucacggacgccgucgacugcgcgcuggacccccugagcgagaccaagugcacccucaaguccuucaccguggagaaggggaucuaccagacgagcaacuuccgggugcagcccaccgaguccaucguccgcuucccgaacaucaccaaccugugccccuucggcgagguguucaacgccacccgguucgccagcgucuacgccuggaaccgcaagcggaucuccaacugcguggccgacuacagcgugcuguacaacuccgcgagcuucuccacguucaagugcuacggcgucagccccaccaagcucaacgaccugugcuucaccaacguguacgccgacuccuucgugauccgcggggacgagguccggcagaucgcccccggccagaccgggaagaucgccgacuacaacuacaagcugccggacgacuucacgggcugcgugaucgccuggaacagcaacaaccucgacuccaaggucgggggcaacuacaacuaccuguuccgccuguuccgcaagagcaaccucaagcccuucgagcgggacaucuccaccgagaucuaccaggcgggcaacacccccugcaacgggguggagggcuucaacugcuacuucccccugcagagcuacggguuccagccgaccaacggcgugggguaccagcccuaccggguggucgugcuguccuucgagcuccugcacgcccccgccacggugugcggccccaagaaguccaccaaccuggucaagaacaagugcgugaacuucaacuucaacggccucaccgggaccggcgugcugaccgagagcaacaagaaguuccugccguuccagcaguucgggcgcgacaucgccgacacgaccgacgccguccgcgacccccagacccuggagauccucgacaucacccccugcagcuucggcggggugagcgugaucacgccgggcaccaacaccuccaaccaggucgcggugcuguaccagggcgugaacugcaccgagguccccguggccauccacgccgaccagcugacgcccaccuggcggguguacagcaccggguccaacgucuuccagacccgcgccggcugccucaucggggccgagcacgugaacaacagcuacgagugcgacauccccaucggcgcgggcaucugcgccuccuaccagacgcagaccaacagcccgcggcgcgcccgguccguggccagccaguccgucaucgcguacaccaugagccugggggccgagaacuccguggccuacagcaacaacuccaucgccauccccaccaacuucacgaucagcgugaccaccgagauccugcccgucuccaugaccaagacgagcguggacugcaccauguacaucugcggcgacagcaccgagugcuccaaccuccugcugcaguacgggagcuucugcacccagcucaaccgcgcccugacgggcaucgcgguggagcaggacaagaacacccaggaggucuucgcccaggugaagcagaucuacaagacgcccccgaucaaggacuucgggggcuucaacuucucccagauccugcccgaccccagcaagcccuccaagcggagcuucaucgaggaccuccuguucaacaaggugacccuggccgacgccggcuucaucaagcaguacggggacugccucggcgacaucgccgcgcgcgaccugaucugcgcccagaaguucaacgggcugaccguccucccgccccugcugaccgacgagaugaucgcccaguacaccuccgcccuccuggccggcaccaucacgagcggguggaccuucggcgcgggcgccgcccugcagauccccuucgccaugcagauggcguaccgguucaacgggaucggcgugacccagaacgugcucuacgagaaccagaagcugaucgccaaccaguucaacuccgccaucgggaagauccaggacagccuguccagcaccgccuccgcccucggcaagcugcaggacgucgugaaccagaacgcgcaggcccugaacacgcucgugaagcagcugagcuccaacuucggggccaucagcuccguccugaacgacauccucagccgccuggacccgcccgaggccgaggugcagaucgaccggcugaucaccggccgccuccagucccugcagaccuacgugacccagcagcugauccgggccgcggagauccgcgccagcgccaaccucgccgccaccaagaugagcgagugcguccugggccaguccaagcggguggacuucugcgggaagggcuaccaccugaugagcuucccccaguccgcgccccacgggguggucuuccuccacgugacguacguccccgcccaggagaagaacuucaccaccgccccggccaucugccacgacggcaaggcgcacuucccccgcgaggggguguucgugagcaacggcacccacugguucgucacgcagcggaacuucuacgagccccagaucaucaccaccgacaacaccuucguguccggcaacugcgacguggucaucgggaucgugaacaacacgguguacgacccccugcagccggagcuggacagcuucaaggaggagcucgacaaguacuucaagaaccacaccucccccgacgucgaccugggcgacaucagcgggaucaacgccuccguggugaacauccagaaggagaucgaccgccugaacgaggucgccaagaaccucaacgagagccugaucgaccugcaggagcucggcaaguacgagcaguacaucaaguggcccugguacaucuggcugggcuucaucgccgggcugaucgccaucgugauggugaccaucaugcucugcugcaugaccuccugcugcagcugccugaagggcugcugcuccugcgggagcugcugcaaguucgacgaggacgacuccgagccgguccugaagggcgugaagcuccacuacacgugaggacuagucccuguucccagagcccacuuuuuuuucuuuuuuugaaauaaaauagccugucuuucagaucuaaaaaaaaaaaaaaaaaaaaaaaaaaaaaaaaaaaaaaaaaaaaaaaaaaaaaaaaaaaaaaaaaaaaaaaaaaaaaaaaaaaaaaaaaaaaaaaaaaaa

SEQ ID NO: 25086 - RNA, 4161 nt, Artificial Sequence
  SARS-CoV-2/Wuhan/WIV05/2019__EPI_ISL_402128 spike protein mRNA gc (1-1273)(K986P_V987P_H69del_V70del_Y453F_D614G_I692V_M1229I)
aggagagggcgcuuggcuugcaaggacccugagcugcggcauugaagcacacccaacccaacucgacugaagucagccucacugaaccggaucugagaaucuucucucucugggcuugccagggcucuccgaaccuagcuagcauccucuucaauuccaacuagaaagcuuaccauguucguguuccugguccuccugccccuggugagcucccagugcgugaaccucaccacccgcacgcagcugccgcccgccuacaccaacagcuucacccggggcgucuacuaccccgacaagguguuccgcuccagcgugcugcacuccacccaggaccucuuccugcccuucuucagcaacgucacgugguuccacgccaucuccgggaccaacggcaccaagcgguucgacaacccggugcugcccuucaacgacgggguguacuucgcgagcaccgagaaguccaacaucauccgcggcuggaucuucgggacgacccucgacagcaagacccagucccugcugaucgucaacaacgccaccaacguggugaucaaggucugcgaguuccaguucugcaacgaccccuuccucggcguguacuaccacaagaacaacaagagcuggauggaguccgaguuccggguguacagcuccgccaacaacugcacguucgaguacgucagccagcccuuccugauggaccuggagggcaagcaggggaacuucaagaaccuccgcgaguucguguucaagaacaucgacggcuacuucaagaucuacuccaagcacaccccgaucaaccuggugcgggaccugccccagggguucagcgcccucgagccccuggucgaccugcccaucggcaucaacaucacccgcuuccagacccuccuggcccugcaccgguccuaccucacgccgggggacagcagcuccggcuggaccgcgggcgccgccgccuacuacgugggguaccugcagccccgcaccuuccugcucaaguacaacgagaacggcaccaucacggacgcgguggacugcgcccuggacccccugagcgagaccaagugcacccucaaguccuucaccgucgagaaggggaucuaccagacgagcaacuuccgggugcagcccaccgaguccaucgugcgcuucccgaacaucaccaaccugugccccuucggcgaggucuucaacgccacccgguucgccagcguguacgccuggaaccgcaagcggaucuccaacugcgucgcggacuacagcgugcuguacaacuccgccagcuucuccacguucaagugcuacggcgugagccccaccaagcucaacgaccugugcuucaccaacgucuacgccgacuccuucgugauccgcggggacgaggugcggcagaucgcccccggccagaccgggaagaucgccgacuacaacuacaagcugccggacgacuucacgggcugcgucaucgcguggaacagcaacaaccucgacuccaaggucgggggcaacuacaacuaccuguuccgccuguuccgcaagagcaaccucaagcccuucgagcgggacaucuccaccgagaucuaccaggccggcagcacccccugcaacgggguggagggcuucaacugcuacuucccccugcaguccuacggguuccagccgaccaacggcgugggguaccagcccuaccggguggugguccugagcuucgagcuccugcacgcccccgccacggugugcggccccaagaaguccaccaaccuggugaagaacaagugcgucaacuucaacuucaacggccucaccgggaccggcgugcugaccgagagcaacaagaaguuccugccguuccagcaguucgggcgcgacaucgccgacacgaccgacgcggugcgcgacccccagacccuggagauccucgacaucacccccugcagcuucggcggggucuccgugaucacgccgggcaccaacaccagcaaccagguggccguccuguaccagggcgugaacugcaccgaggugcccgucgccauccacgccgaccagcugacgcccaccuggcggguguacuccaccgggagcaacguguuccagacccgcgccggcugccucaucggggcggagcacgucaacaacuccuacgagugcgacauccccaucggcgccggcaucugcgccagcuaccagacgcagaccaacuccccgcggcgcgcccggagcguggcgucccagagcgugaucgccuacaccaugucccugggggccgagaacagcgucgccuacuccaacaacagcaucgccauccccaccaacuucacgaucuccgugaccaccgagauccugcccgugagcaugaccaagacgagcgucgacugcaccauguacaucugcggcgacuccaccgagugcagcaaccuccugcugcaguacggguccuucugcacccagcucaaccgcgcgcugacgggcaucgccguggagcaggacaagaacacccaggagguguucgcccaggucaagcagaucuacaagacgcccccgaucaaggacuucgggggcuucaacuucagccagauccugcccgaccccuccaagcccagcaagcgguccuucaucgaggaccuccuguucaacaaggugacccuggccgacgccggcuucaucaagcaguacggggacugccucggcgacaucgcggcccgcgaccugaucugcgcccagaaguucaacgggcugaccgugcucccgccccugcugaccgacgagaugaucgcccaguacaccagcgcccuccuggcgggcaccaucacguccggguggaccuucggcgccggcgccgcccugcagauccccuucgcgaugcagauggccuaccgguucaacgggaucggcgucacccagaacgugcucuacgagaaccagaagcugaucgccaaccaguucaacagcgccaucgggaagauccaggacucccugagcuccaccgccagcgcgcucggcaagcugcaggacguggucaaccagaacgcccaggcccugaacacgcucgugaagcagcuguccagcaacuucggggccaucuccagcgugcugaacgacauccucucccgccuggacccgcccgaggccgagguccagaucgaccggcugaucaccggccgccuccagagccugcagaccuacgugacccagcagcugauccgggcggccgagauccgcgccagcgccaaccucgccgcgaccaagauguccgagugcgugcugggccagagcaagcgggucgacuucugcgggaagggcuaccaccugauguccuucccccagagcgcgccccacggggugguguuccuccacgucacguacgugcccgcccaggagaagaacuucaccaccgccccggccaucugccacgacggcaaggcccacuucccccgcgagggggucuucguguccaacggcacccacugguucgugacgcagcggaacuucuacgagccccagaucaucaccaccgacaacaccuucgucagcggcaacugcgacguggugaucgggaucgucaacaacacgguguacgacccccugcagccggagcuggacuccuucaaggaggagcucgacaaguacuucaagaaccacaccagccccgacguggaccugggcgacaucuccgggaucaacgccagcgucgugaacauccagaaggagaucgaccgccugaacgagguggccaagaaccucaacgagucccugaucgaccugcaggagcucggcaaguacgagcaguacaucaaguggcccugguacaucuggcugggcuucaucgccgggcugaucgcgaucgucaucgugaccaucaugcucugcugcaugaccagcugcugcuccugccugaagggcugcugcagcugcggguccugcugcaaguucgacgaggacgacagcgagccggugcugaagggcgucaagcuccacuacacgugaggacuagucccuguucccagagcccacuuuuuuuucuuuuuuugaaauaaaauagccugucuuucagaucuaaaaaaaaaaaaaaaaaaaaaaaaaaaaaaaaaaaaaaaaaaaaaaaaaaaaaaaaaaaaaaaaaaaaaaaaaaaaaaaaaaaaaaaaaaaaaaaaaaaa

SEQ ID NO: 25087 - RNA, 4158 nt, Artificial Sequence
  SARS-CoV-2/Wuhan/WIV05/2019__EPI_ISL_402128 spike protein mRNA gc (1-1273)(K986P_V987P_K986P_V987P_H69del_V70del_Y144del_N501Y_A570 D_D614G_P681H_T716I_S982A_D1118H)
aggagagggcgcuuggcuugcaaggacccugagcugcggcauugaagcacacccaacccaacucgacugaagucagccucacugaaccggaucugagaaucuucucucucugggcuugccagggcucuccgaaccuagcuagcauccucuucaauuccaacuagaaagcuuaccauguucguguuccugguccuccugccccuggugagcucccagugcgugaaccucaccacccgcacgcagcugccgcccgccuacaccaacagcuucacccggggcgucuacuaccccgacaagguguuccgcuccagcgugcugcacuccacccaggaccucuuccugcccuucuucagcaacgucacgugguuccacgccaucuccgggaccaacggcaccaagcgguucgacaacccggugcugcccuucaacgacgggguguacuucgcgagcaccgagaaguccaacaucauccgcggcuggaucuucgggacgacccucgacagcaagacccagucccugcugaucgucaacaacgccaccaacguggugaucaaggucugcgaguuccaguucugcaacgaccccuuccucggcguguaccacaagaacaacaagagcuggauggaguccgaguuccggguguacagcuccgccaacaacugcacguucgaguacgucagccagcccuuccugauggaccuggagggcaagcaggggaacuucaagaaccuccgcgaguucguguucaagaacaucgacggcuacuucaagaucuacuccaagcacaccccgaucaaccuggugcgggaccugccccagggguucagcgcccucgagccccuggucgaccugcccaucggcaucaacaucacccgcuuccagacccuccuggcccugcaccgguccuaccucacgccgggggacagcagcuccggcuggaccgcgggcgccgccgccuacuacgugggguaccugcagccccgcaccuuccugcucaaguacaacgagaacggcaccaucacggacgcgguggacugcgcccuggacccccugagcgagaccaagugcacccucaaguccuucaccgucgagaaggggaucuaccagacgagcaacuuccgggugcagcccaccgaguccaucgugcgcuucccgaacaucaccaaccugugccccuucggcgaggucuucaacgccacccgguucgccagcguguacgccuggaaccgcaagcggaucuccaacugcgucgcggacuacagcgugcuguacaacuccgccagcuucuccacguucaagugcuacggcgugagccccaccaagcucaacgaccugugcuucaccaacgucuacgccgacuccuucgugauccgcggggacgaggugcggcagaucgcccccggccagaccgggaagaucgccgacuacaacuacaagcugccggacgacuucacgggcugcgucaucgcguggaacagcaacaaccucgacuccaaggucgggggcaacuacaacuaccuguaccgccuguuccgcaagagcaaccucaagcccuucgagcgggacaucuccaccgagaucuaccaggccggcagcacccccugcaacgggguggagggcuucaacugcuacuucccccugcaguccuacggguuccagccgaccuacggcgugggguaccagcccuaccggguggugguccugagcuucgagcuccugcacgcccccgccacggugugcggccccaagaaguccaccaaccuggugaagaacaagugcgucaacuucaacuucaacggccucaccgggaccggcgugcugaccgagagcaacaagaaguuccugccguuccagcaguucgggcgcgacaucgacgacacgaccgacgccgugcgcgacccccagacccuggagauccucgacaucacccccugcagcuucggcggggucuccgugaucacgccgggcaccaacaccagcaaccagguggcgguccuguaccagggcgugaacugcaccgaggugcccgucgccauccacgccgaccagcugacgcccaccuggcggguguacuccaccgggagcaacguguuccagacccgcgccggcugccucaucggggccgagcacgucaacaacuccuacgagugcgacauccccaucggcgcgggcaucugcgccagcuaccagacgcagaccaacucccaccggcgcgcccggagcguggccucccagagcaucaucgcguacaccaugucccugggggccgagaacagcguggccuacuccaacaacagcaucgccaucccgaucaacuucaccaucuccgucacgaccgagauccugcccgugagcaugaccaagaccagcguggacugcacgauguacaucugcggcgacuccaccgagugcagcaaccuccugcugcaguacggguccuucugcacccagcucaaccgcgcccugaccggcaucgcggucgagcaggacaagaacacgcaggagguguucgcccaggugaagcagaucuacaagaccccgcccaucaaggacuucgggggcuucaacuucagccagauccugcccgaccccuccaagcccagcaagcgguccuucaucgaggaccuccuguucaacaaggucacccuggccgacgccggcuucaucaagcaguacggggacugccucggcgacaucgccgcgcgcgaccugaucugcgcccagaaguucaacgggcugaccgugcugcccccgcuccugacggacgagaugaucgcccaguacaccagcgcccuccuggccggcaccaucaccuccggguggacguucggcgcgggcgccgcccugcagauccccuucgccaugcagauggcguaccgguucaacgggaucggcgugacccagaacguccucuacgagaaccagaagcugaucgccaaccaguucaacagcgccaucgggaagauccaggacucccugagcuccaccgccagcgcccucggcaagcugcaggacguggugaaccagaacgcgcaggcccugaacacccucgucaagcagcuguccagcaacuucggggccaucuccagcgugcugaacgacauccucgcccgccuggacccgcccgaggccgaggugcagaucgaccggcugaucacgggccgccuccagucccugcagaccuacgucacccagcagcugauccgggcggccgagauccgcgccagcgccaaccucgccgcgaccaagaugagcgagugcgugcugggccaguccaagcggguggacuucugcgggaagggcuaccaccugaugagcuucccccaguccgcgccccacggggucguguuccuccacgugaccuacguccccgcccaggagaagaacuucacgaccgcccccgccaucugccacgacggcaaggcccacuucccgcgcgaggggguguucgucagcaacggcacccacugguucgugacccagcggaacuucuacgagccccagaucaucacgacccacaacaccuucguguccggcaacugcgacgucgugaucgggaucgugaacaacaccgucuacgacccccugcagcccgagcuggacagcuucaaggaggagcucgacaaguacuucaagaaccacacguccccggacguggaccugggcgacaucagcgggaucaacgccuccguggucaacauccagaaggagaucgaccgccugaacgagguggccaagaaccucaacgagagccugaucgaccugcaggagcucggcaaguacgagcaguacaucaaguggcccugguacaucuggcugggcuucaucgccgggcugaucgcgaucgugauggucaccaucaugcucugcugcaugaccuccugcugcagcugccugaagggcugcugcuccugcgggagcugcugcaaguucgacgaggacgacuccgagcccgugcugaagggcgugaagcuccacuacaccugaggacuagucccuguucccagagcccacuuuuuuuucuuuuuuugaaauaaaauagccugucuuucagaucuaaaaaaaaaaaaaaaaaaaaaaaaaaaaaaaaaaaaaaaaaaaaaaaaaaaaaaaaaaaaaaaaaaaaaaaaaaaaaaaaaaaaaaaaaaaaaaaaaaaa

SEQ ID NO: 25088 - RNA, 4167 nt, Artificial Sequence
  SARS-CoV-2/Wuhan/WIV05/2019__EPI_ISL_402128 spike protein mRNA gc (1-1273)(K986P_V987P_K986P_V987P_K417N_E484K_N501Y_D614G)
aggagagggcgcuuggcuugcaaggacccugagcugcggcauugaagcacacccaacccaacucgacugaagucagccucacugaaccggaucugagaaucuucucucucugggcuugccagggcucuccgaaccuagcuagcauccucuucaauuccaacuagaaagcuuaccauguucguguuccugguccuccugccccuggugagcucccagugcgugaaccucaccacccgcacgcagcugccgcccgccuacaccaacagcuucacccggggcgucuacuaccccgacaagguguuccgcuccagcgugcugcacuccacccaggaccucuuccugcccuucuucagcaacgucacgugguuccacgccauccacguguccgggaccaacggcaccaagcgguucgacaacccggugcugcccuucaacgacggggucuacuucgcgagcaccgagaaguccaacaucauccgcggcuggaucuucgggacgacccucgacagcaagacccagucccugcugaucgugaacaacgccaccaacguggucaucaaggugugcgaguuccaguucugcaacgaccccuuccucggcguguacuaccacaagaacaacaagagcuggauggaguccgaguuccgggucuacagcuccgccaacaacugcacguucgaguacgugagccagcccuuccugauggaccuggagggcaagcaggggaacuucaagaaccuccgcgaguucguguucaagaacaucgacggcuacuucaagaucuacuccaagcacaccccgaucaaccugguccgggaccugccccagggguucagcgcccucgagccccugguggaccugcccaucggcaucaacaucacccgcuuccagacccuccuggcccugcaccgguccuaccucacgccgggggacagcagcuccggcuggaccgcgggcgccgccgccuacuacgugggguaccugcagccccgcaccuuccugcucaaguacaacgagaacggcaccaucacggacgcggucgacugcgcccuggacccccugagcgagaccaagugcacccucaaguccuucaccguggagaaggggaucuaccagacgagcaacuuccgggugcagcccaccgaguccaucguccgcuucccgaacaucaccaaccugugccccuucggcgagguguucaacgccacccgguucgccagcgucuacgccuggaaccgcaagcggaucuccaacugcguggcggacuacagcgugcuguacaacuccgccagcuucuccacguucaagugcuacggcgucagccccaccaagcucaacgaccugugcuucaccaacguguacgccgacuccuucgugauccgcggggacgagguccggcagaucgcccccggccagaccgggaacaucgccgacuacaacuacaagcugccggacgacuucacgggcugcgugaucgcguggaacagcaacaaccucgacuccaaggucgggggcaacuacaacuaccuguaccgccuguuccgcaagagcaaccucaagcccuucgagcgggacaucuccaccgagaucuaccaggccggcagcacccccugcaacggggugaagggcuucaacugcuacuucccccugcaguccuacggguuccagccgaccuacggcgugggguaccagcccuaccggguggucgugcugagcuucgagcuccugcacgcccccgccacggugugcggccccaagaaguccaccaaccuggucaagaacaagugcgugaacuucaacuucaacggccucaccgggaccggcgugcugaccgagagcaacaagaaguuccugccguuccagcaguucgggcgcgacaucgccgacacgaccgacgcgguccgcgacccccagacccuggagauccucgacaucacccccugcagcuucggcgggguguccgugaucacgccgggcaccaacaccagcaaccaggucgccgugcuguaccagggcgugaacugcaccgagguccccguggccauccacgccgaccagcugacgcccaccuggcggguguacuccaccgggagcaacgucuuccagacccgcgccggcugccucaucggggcggagcacgugaacaacuccuacgagugcgacauccccaucggcgccggcaucugcgccagcuaccagacgcagaccaacuccccgcggcgcgcccggagcguggcgucccagagcaucaucgccuacaccaugucccugggggccgagaacagcgucgccuacuccaacaacagcaucgccauccccaccaacuucacgaucuccgugaccaccgagauccugcccgugagcaugaccaagacgagcgucgacugcaccauguacaucugcggcgacuccaccgagugcagcaaccuccugcugcaguacggguccuucugcacccagcucaaccgcgcgcugacgggcaucgccguggagcaggacaagaacacccaggagguguucgcccaggucaagcagaucuacaagacgcccccgaucaaggacuucgggggcuucaacuucagccagauccugcccgaccccuccaagcccagcaagcgguccuucaucgaggaccuccuguucaacaaggugacccuggccgacgccggcuucaucaagcaguacggggacugccucggcgacaucgcggcccgcgaccugaucugcgcccagaaguucaacgggcugaccgugcucccgccccugcugaccgacgagaugaucgcccaguacaccagcgcccuccuggcgggcaccaucacguccggguggaccuucggcgccggcgccgcccugcagauccccuucgcgaugcagauggccuaccgguucaacgggaucggcgucacccagaacgugcucuacgagaaccagaagcugaucgccaaccaguucaacagcgccaucgggaagauccaggacucccugagcuccaccgccagcgcgcucggcaagcugcaggacguggucaaccagaacgcccaggcccugaacacgcucgugaagcagcuguccagcaacuucggggccaucuccagcgugcugaacgacauccucucccgccuggacccgcccgaggccgagguccagaucgaccggcugaucaccggccgccuccagagccugcagaccuacgugacccagcagcugauccgggcggccgagauccgcgccagcgccaaccucgccgcgaccaagauguccgagugcgugcugggccagagcaagcgggucgacuucugcgggaagggcuaccaccugauguccuucccccagagcgcgccccacggggugguguuccuccacgucacguacgugcccgcccaggagaagaacuucaccaccgccccggccaucugccacgacggcaaggcccacuucccccgcgagggggucuucguguccaacggcacccacugguucgugacgcagcggaacuucuacgagccccagaucaucaccaccgacaacaccuucgucagcggcaacugcgacguggugaucgggaucgucaacaacacgguguacgacccccugcagccggagcuggacuccuucaaggaggagcucgacaaguacuucaagaaccacaccagccccgacguggaccugggcgacaucuccgggaucaacgccagcgucgugaacauccagaaggagaucgaccgccugaacgagguggccaagaaccucaacgagucccugaucgaccugcaggagcucggcaaguacgagcaguacaucaaguggcccugguacaucuggcugggcuucaucgccgggcugaucgcgaucgucauggugaccaucaugcucugcugcaugaccagcugcugcuccugccugaagggcugcugcagcugcggguccugcugcaaguucgacgaggacgacagcgagccggugcugaagggcgucaagcuccacuacacgugaggacuagucccuguucccagagcccacuuuuuuuucuuuuuuugaaauaaaauagccugucuuucagaucuaaaaaaaaaaaaaaaaaaaaaaaaaaaaaaaaaaaaaaaaaaaaaaaaaaaaaaaaaaaaaaaaaaaaaaaaaaaaaaaaaaaaaaaaaaaaaaaaaaaa

SEQ ID NO: 25089 - RNA, 4158 nt, Artificial Sequence
  SARS-CoV-2/Wuhan/WIV05/2019__EPI_ISL_402128 spike protein mRNA gc (1-1273)(K986P_V987P_K986P_V987P_L18F_D80A_D215G_L242del_A243del_ L244del_R246I_K417N_E484K_N501Y_D614G_A701V)
aggagagggcgcuuggcuugcaaggacccugagcugcggcauugaagcacacccaacccaacucgacugaagucagccucacugaaccggaucugagaaucuucucucucugggcuugccagggcucuccgaaccuagcuagcauccucuucaauuccaacuagaaagcuuaccauguucguguuccugguccuccugccccuggugagcucccagugcgugaacuucaccacccgcacgcagcucccgcccgccuacaccaacagcuucacccggggcgucuacuaccccgacaagguguuccgcuccagcgugcugcacuccacccaggaccuguuccuccccuucuucagcaacgucacgugguuccacgccauccacguguccgggaccaacggcaccaagcgguucgcgaacccggugcugcccuucaacgacggggucuacuucgccagcaccgagaaguccaacaucauccgcggcuggaucuucgggacgacccuggacagcaagacccagucccuccugaucgugaacaacgccaccaacguggucaucaaggugugcgaguuccaguucugcaacgaccccuuccugggcguguacuaccacaagaacaacaagagcuggauggaguccgaguuccgggucuacagcuccgccaacaacugcacguucgaguacgugagccagcccuuccucauggaccuggagggcaagcaggggaacuucaagaaccugcgcgaguucguguucaagaacaucgacggcuacuucaagaucuacuccaagcacaccccgaucaaccucguccgggggcugccccagggcuucagcgcccuggagccccucguggaccugcccaucgggaucaacaucacccgcuuccagacccugcacaucuccuaccucacgccgggcgacagcagcuccggcuggaccgcgggggccgccgccuacuacgugggcuaccugcagccccggaccuuccugcucaaguacaacgagaacgggaccaucacggacgcggucgacugcgcccuggacccccugagcgagaccaagugcacccucaaguccuucaccguggagaagggcaucuaccagacgagcaacuuccgcgugcagcccaccgaguccaucguccgguucccgaacaucaccaaccugugccccuucggcgagguguucaacgccacccgcuucgccagcgucuacgccuggaaccggaagcgcaucuccaacugcguggcggacuacagcgugcuguacaacuccgccagcuucuccacguucaagugcuacggggucagccccaccaagcucaacgaccugugcuucaccaacguguacgccgacuccuucgugauccggggcgacgagguccgccagaucgcccccgggcagaccggcaacaucgccgacuacaacuacaagcugccggacgacuucacggggugcgugaucgcguggaacagcaacaaccucgacuccaaggugggcggcaacuacaacuaccuguaccggcuguuccgcaagagcaaccucaagcccuucgagcgggacaucuccaccgagaucuaccaggccgggagcacccccugcaacggcgucaagggguucaacugcuacuucccccugcaguccuacggcuuccagccgaccuacggggugggcuaccagcccuaccgcguggucgugcugagcuucgagcuccugcacgcccccgccacggugugcggccccaagaaguccaccaaccuggucaagaacaagugcgugaacuucaacuucaacgggcucaccggcaccggggugcugaccgagagcaacaagaaguuccugccguuccagcaguucggccgggacaucgccgacacgaccgacgcgguccgcgacccccagacccucgagauccuggacaucacccccugcagcuucgggggcguguccgugaucacgccgggcaccaacaccagcaaccaggucgccgugcuguaccagggggugaacugcaccgagguccccguggccauccacgccgaccagcugacgcccaccuggcgcguguacuccaccggcagcaacgucuuccagacccgggccgggugccucaucggcgcggagcacgugaacaacuccuacgagugcgacauccccaucggcgccgggaucugcgccagcuaccagacgcagaccaacuccccgcgccgggcccgcagcguggcgucccagagcaucaucgccuacaccaugucccugggcgucgagaacagcguggccuacuccaacaacagcaucgccauccccaccaacuucacgaucuccgugaccaccgagauccugcccgucagcaugaccaagacgagcguggacugcaccauguacaucugcggggacuccaccgagugcagcaaccuccugcugcaguacggcuccuucugcacccagcucaaccgggcccugacggggaucgcgguggagcaggacaagaacacccaggaggucuucgcccaggugaagcagaucuacaagacgcccccgaucaaggacuucggcggcuucaacuucagccagauccugcccgaccccuccaagcccagcaagcgcuccuucaucgaggaccuccuguucaacaaggugacccuggccgacgccggguucaucaagcaguacggcgacugccucggggacaucgccgcgcgggaccugaucugcgcccagaaguucaacggccugaccguccucccgccccugcugaccgacgagaugaucgcccaguacaccagcgcccuccuggccgggaccaucacguccggcuggaccuucggcgcgggggccgcccugcagauccccuucgccaugcagauggcguaccgcuucaacggcaucggggugacccagaacgugcucuacgagaaccagaagcugaucgccaaccaguucaacagcgccaucggcaagauccaggacucccugagcuccaccgccagcgcccucgggaagcugcaggacgucgugaaccagaacgcgcaggcccugaacacgcucgugaagcagcuguccagcaacuucggcgccaucuccagcguccugaacgacauccucucccggcuggacccgcccgaggccgaggugcagaucgaccgccugaucaccggccggcuccagagccugcagaccuacgugacccagcagcugauccgcgccgcggagauccgggccagcgccaaccucgccgccaccaagauguccgagugcguccuggggcagagcaagcgcguggacuucugcggcaagggguaccaccugauguccuucccccagagcgcgccccacggcguggucuuccuccacgugacguacguccccgcccaggagaagaacuucaccaccgccccggccaucugccacgacgggaaggcgcacuucccccgggagggcguguucguguccaacggcacccacugguucgucacgcagcgcaacuucuacgagccccagaucaucaccaccgacaacaccuucgugagcgggaacugcgacguggucaucggcaucgugaacaacacgguguacgacccccugcagccggagcuggacuccuucaaggaggagcucgacaaguacuucaagaaccacaccagccccgacgucgaccugggggacaucuccggcaucaacgccagcguggugaacauccagaaggagaucgaccggcugaacgaggucgccaagaaccucaacgagucccugaucgaccugcaggagcucggcaaguacgagcaguacaucaaguggcccugguacaucuggcugggguucaucgccggccugaucgccaucgugauggugaccaucaugcucugcugcaugaccagcugcugcuccugccugaaggggugcugcagcugcggcuccugcugcaaguucgacgaggacgacagcgagccgguccugaagggggugaagcuccacuacacgugaggacuagucccuguucccagagcccacuuuuuuuucuuuuuuugaaauaaaauagccugucuuucagaucuaaaaaaaaaaaaaaaaaaaaaaaaaaaaaaaaaaaaaaaaaaaaaaaaaaaaaaaaaaaaaaaaaaaaaaaaaaaaaaaaaaaaaaaaaaaaaaaaaaaa

SEQ ID NO: 25090 - RNA, 4167 nt, Artificial Sequence
  SARS-CoV-2/Wuhan/WIV05/2019__EPI_ISL_402128 spike protein mRNA gc (1-1273)(K986P_V987P_K986P_V987P_E484K_D614G)
aggagagggcgcuuggcuugcaaggacccugagcugcggcauugaagcacacccaacccaacucgacugaagucagccucacugaaccggaucugagaaucuucucucucugggcuugccagggcucuccgaaccuagcuagcauccucuucaauuccaacuagaaagcuuaccauguucguguuccugguccuccugccccuggugagcucccagugcgugaaccucaccacccgcacgcagcugccgcccgccuacaccaacagcuucacccggggcgucuacuaccccgacaagguguuccgcuccagcgugcugcacuccacccaggaccucuuccugcccuucuucagcaacgucacgugguuccacgccauccacguguccgggaccaacggcaccaagcgguucgacaacccggugcugcccuucaacgacggggucuacuucgcgagcaccgagaaguccaacaucauccgcggcuggaucuucgggacgacccucgacagcaagacccagucccugcugaucgugaacaacgccaccaacguggucaucaaggugugcgaguuccaguucugcaacgaccccuuccucggcguguacuaccacaagaacaacaagagcuggauggaguccgaguuccgggucuacagcuccgccaacaacugcacguucgaguacgugagccagcccuuccugauggaccuggagggcaagcaggggaacuucaagaaccuccgcgaguucguguucaagaacaucgacggcuacuucaagaucuacuccaagcacaccccgaucaaccugguccgggaccugccccagggguucagcgcccucgagccccugguggaccugcccaucggcaucaacaucacccgcuuccagacccuccuggcccugcaccgguccuaccucacgccgggggacagcagcuccggcuggaccgcgggcgccgccgccuacuacgugggguaccugcagccccgcaccuuccugcucaaguacaacgagaacggcaccaucacggacgcggucgacugcgcccuggacccccugagcgagaccaagugcacccucaaguccuucaccguggagaaggggaucuaccagacgagcaacuuccgggugcagcccaccgaguccaucguccgcuucccgaacaucaccaaccugugccccuucggcgagguguucaacgccacccgguucgccagcgucuacgccuggaaccgcaagcggaucuccaacugcguggcggacuacagcgugcuguacaacuccgccagcuucuccacguucaagugcuacggcgucagccccaccaagcucaacgaccugugcuucaccaacguguacgccgacuccuucgugauccgcggggacgagguccggcagaucgcccccggccagaccgggaagaucgccgacuacaacuacaagcugccggacgacuucacgggcugcgugaucgcguggaacagcaacaaccucgacuccaaggucgggggcaacuacaacuaccuguaccgccuguuccgcaagagcaaccucaagcccuucgagcgggacaucuccaccgagaucuaccaggccggcagcacccccugcaacggggugaagggcuucaacugcuacuucccccugcaguccuacggguuccagccgaccaacggcgugggguaccagcccuaccggguggucgugcugagcuucgagcuccugcacgcccccgccacggugugcggccccaagaaguccaccaaccuggucaagaacaagugcgugaacuucaacuucaacggccucaccgggaccggcgugcugaccgagagcaacaagaaguuccugccguuccagcaguucgggcgcgacaucgccgacacgaccgacgcgguccgcgacccccagacccuggagauccucgacaucacccccugcagcuucggcgggguguccgugaucacgccgggcaccaacaccagcaaccaggucgccgugcuguaccagggcgugaacugcaccgagguccccguggccauccacgccgaccagcugacgcccaccuggcggguguacuccaccgggagcaacgucuuccagacccgcgccggcugccucaucggggcggagcacgugaacaacuccuacgagugcgacauccccaucggcgccggcaucugcgccagcuaccagacgcagaccaacuccccgcggcgcgcccggagcguggcgucccagagcaucaucgccuacaccaugucccugggggccgagaacagcgucgccuacuccaacaacagcaucgccauccccaccaacuucacgaucuccgugaccaccgagauccugcccgugagcaugaccaagacgagcgucgacugcaccauguacaucugcggcgacuccaccgagugcagcaaccuccugcugcaguacggguccuucugcacccagcucaaccgcgcgcugacgggcaucgccguggagcaggacaagaacacccaggagguguucgcccaggucaagcagaucuacaagacgcccccgaucaaggacuucgggggcuucaacuucagccagauccugcccgaccccuccaagcccagcaagcgguccuucaucgaggaccuccuguucaacaaggugacccuggccgacgccggcuucaucaagcaguacggggacugccucggcgacaucgcggcccgcgaccugaucugcgcccagaaguucaacgggcugaccgugcucccgccccugcugaccgacgagaugaucgcccaguacaccagcgcccuccuggcgggcaccaucacguccggguggaccuucggcgccggcgccgcccugcagauccccuucgcgaugcagauggccuaccgguucaacgggaucggcgucacccagaacgugcucuacgagaaccagaagcugaucgccaaccaguucaacagcgccaucgggaagauccaggacucccugagcuccaccgccagcgcgcucggcaagcugcaggacguggucaaccagaacgcccaggcccugaacacgcucgugaagcagcuguccagcaacuucggggccaucuccagcgugcugaacgacauccucucccgccuggacccgcccgaggccgagguccagaucgaccggcugaucaccggccgccuccagagccugcagaccuacgugacccagcagcugauccgggcggccgagauccgcgccagcgccaaccucgccgcgaccaagauguccgagugcgugcugggccagagcaagcgggucgacuucugcgggaagggcuaccaccugauguccuucccccagagcgcgccccacggggugguguuccuccacgucacguacgugcccgcccaggagaagaacuucaccaccgccccggccaucugccacgacggcaaggcccacuucccccgcgagggggucuucguguccaacggcacccacugguucgugacgcagcggaacuucuacgagccccagaucaucaccaccgacaacaccuucgucagcggcaacugcgacguggugaucgggaucgucaacaacacgguguacgacccccugcagccggagcuggacuccuucaaggaggagcucgacaaguacuucaagaaccacaccagccccgacguggaccugggcgacaucuccgggaucaacgccagcgucgugaacauccagaaggagaucgaccgccugaacgagguggccaagaaccucaacgagucccugaucgaccugcaggagcucggcaaguacgagcaguacaucaaguggcccugguacaucuggcugggcuucaucgccgggcugaucgcgaucgucauggugaccaucaugcucugcugcaugaccagcugcugcuccugccugaagggcugcugcagcugcggguccugcugcaaguucgacgaggacgacagcgagccggugcugaagggcgucaagcuccacuacacgugaggacuagucccuguucccagagcccacuuuuuuuucuuuuuuugaaauaaaauagccugucuuucagaucuaaaaaaaaaaaaaaaaaaaaaaaaaaaaaaaaaaaaaaaaaaaaaaaaaaaaaaaaaaaaaaaaaaaaaaaaaaaaaaaaaaaaaaaaaaaaaaaaaaaa

SEQ ID NO: 25091 - RNA, 4167 nt, Artificial Sequence
  SARS-CoV-2/Wuhan/WIV05/2019__EPI_ISL_402128 spike protein mRNA gc (1-1273)(K986P_V987P_K986P_V987P_L18F_T20N_P26S_D138Y_R190S_K417T _E484K_N501Y_D614G_H655Y_T1027I)
aggagagggcgcuuggcuugcaaggacccugagcugcggcauugaagcacacccaacccaacucgacugaagucagccucacugaaccggaucugagaaucuucucucucugggcuugccagggcucuccgaaccuagcuagcauccucuucaauuccaacuagaaagcuuaccauguucguguuccugguccuccugccccuggugagcucccagugcgugaacuucaccaaccgcacccagcucccgagcgccuacacgaacuccuucacccggggcgucuacuaccccgacaagguguuccgcagcuccgugcugcacagcacccaggaccuguuccuccccuucuucuccaacgucaccugguuccacgccauccacgugagcgggacgaacggcaccaagcgguucgacaaccccgugcugccguucaacgacggggucuacuucgcguccaccgagaaguccaacaucauccgcggcuggaucuucgggaccacgcuggacuccaagacccagagccuccugaucgugaacaacgccaccaacguggucaucaaggugugcgaguuccaguucugcaacuaccccuuccugggcguguacuaccacaagaacaacaaguccuggauggagagcgaguuccgggucuacuccagcgccaacaacugcaccuucgaguacgugucccagcccuuccucauggaccuggagggcaagcaggggaacuucaagaaccugagcgaguucguguucaagaacaucgacggcuacuucaagaucuacuccaagcacacgcccaucaaccucguccgcgaccugccgcagggguucagcgcccuggagccccucguggaccugcccaucggcaucaacaucacccgguuccagacccugcucgcccugcaccgcagcuaccugacccccggggacuccagcuccggcuggacggcgggcgccgccgccuacuacgugggguaccuccagccgcggaccuuccugcugaaguacaacgagaacggcaccaucaccgacgcggucgacugcgcccucgacccccugagcgagacgaagugcacccugaaguccuucaccguggagaaggggaucuaccagaccagcaacuuccgcgugcagcccacggaguccaucguccgguuccccaacaucaccaaccucugcccguucggcgagguguucaacgccacccgcuucgccagcgucuacgccuggaaccggaagcgcaucuccaacugcguggcggacuacagcgugcuguacaacuccgccagcuucuccaccuucaagugcuacggcgucagccccacgaagcugaacgaccucugcuucaccaacguguacgccgacuccuucgugauccgcggggacgagguccggcagaucgcccccggccagaccgggaccaucgccgacuacaacuacaagcugcccgacgacuucacgggcugcgugaucgcguggaacagcaacaaccuggacuccaaggucgggggcaacuacaacuaccucuaccggcuguuccgcaagagcaaccugaagccguucgagcgggacaucuccaccgagaucuaccaggccggcagcacccccugcaacggggugaagggcuucaacugcuacuucccccuccagagcuacggguuccagcccaccuacggcgugggguaccagccguaccgcguggucgugcuguccuucgagcugcuccacgcccccgccacggugugcggccccaagaaguccaccaaccuggucaagaacaagugcgugaacuucaacuucaacggccugaccgggaccggcgugcucaccgagagcaacaagaaguuccugcccuuccagcaguucgggcgggacaucgccgacacgaccgacgcgguccgcgacccgcagacccuggagauccuggacaucacccccugcagcuucggcgggguguccgugaucacgcccggcaccaacaccagcaaccaggucgccgugcucuaccagggcgugaacugcaccgaggucccgguggccauccacgccgaccagcugacgcccaccuggcgcguguacuccaccgggagcaacgucuuccagacccgggccggcugccugaucggggcggaguacgugaacaacuccuacgagugcgacauccccaucggcgccggcaucugcgccagcuaccagacgcagaccaacagcccccgccgggcccgcagcguggcgucccagagcaucaucgccuacaccaugucccucggggccgagaacagcgucgccuacuccaacaacagcaucgccaucccgaccaacuucacgaucagcgugaccaccgagauccugcccguguccaugaccaagacgagcgucgacugcaccauguacaucugcggcgacuccaccgagugcagcaaccugcuccugcaguacggguccuucugcacccagcugaaccgggcgcucacgggcaucgccguggagcaggacaagaacacccaggagguguucgcccaggucaagcagaucuacaagaccccgcccaucaaggacuucgggggcuucaacuucagccagauccugcccgaccccuccaagcccagcaagcgcuccuucaucgaggaccuccuguucaacaaggugacccuggccgacgccggcuucaucaagcaguacggggacugccugggcgacaucgcggcccgggaccucaucugcgcccagaaguucaacgggcugacggugcugcccccgcuccugaccgacgagaugaucgcccaguacaccagcgcccugcucgcgggcaccaucacguccggguggaccuucggcgccggcgccgcccugcagauccccuucgcgaugcagauggccuaccgcuucaacgggaucggcgucacccagaacgugcuguacgagaaccagaagcucaucgccaaccaguucaacagcgccaucgggaagauccaggacucccugagcuccaccgccagcgcgcugggcaagcuccaggacguggucaaccagaacgcccaggcccugaacacgcuggugaagcagcucuccagcaacuucggggccaucuccagcgugcugaacgacauccugagccggcucgacccgcccgaggccgagguccagaucgaccgccugaucaccggccggcugcagucccuccagaccuacgugacccagcagcugauccgcgcggccgagauccgggccagcgccaaccuggccgcgaucaagauguccgagugcgugcucggccagagcaagcgcgucgacuucugcgggaagggcuaccaccugauguccuucccccagagcgcgccccacggggugguguuccugcacgucaccuacgugcccgcccaggagaagaacuucacgaccgcccccgccaucugccacgacggcaaggcccacuucccgcgggagggggucuucguguccaacggcacccacugguucgugacccagcgcaacuucuacgagccccagaucaucacgaccgacaacaccuucgucagcggcaacugcgacguggugaucgggaucgucaacaacaccguguacgacccccuccagcccgagcuggacuccuucaaggaggagcuggacaaguacuucaagaaccacacgagcccggacguggaccucggcgacaucuccgggaucaacgccagcgucgugaacauccagaaggagaucgaccggcugaacgagguggccaagaaccugaacgagucccucaucgaccugcaggagcugggcaaguacgagcaguacaucaaguggcccugguacaucuggcucggcuucaucgccgggcugaucgcgaucgucauggugaccaucaugcugugcugcaugaccagcugcugcuccugccucaagggcugcugcagcugcggguccugcugcaaguucgacgaggacgacagcgagcccgugcugaagggcgucaagcugcacuacaccugaggacuagucccuguucccagagcccacuuuuuuuucuuuuuuugaaauaaaauagccugucuuucagaucuaaaaaaaaaaaaaaaaaaaaaaaaaaaaaaaaaaaaaaaaaaaaaaaaaaaaaaaaaaaaaaaaaaaaaaaaaaaaaaaaaaaaaaaaaaaaaaaaaaaa

SEQ ID NO: 25092 - RNA, 4167 nt, Artificial Sequence
  SARS-CoV-2/Wuhan/WIV05/2019__EPI_ISL_402128 spike protein mRNA gc (1-1273)(K986P_V987P_K986P_V987P_S13I_W152C_L452R_D614G)
aggagagggcgcuuggcuugcaaggacccugagcugcggcauugaagcacacccaacccaacucgacugaagucagccucacugaaccggaucugagaaucuucucucucugggcuugccagggcucuccgaaccuagcuagcauccucuucaauuccaacuagaaagcuuaccauguucguguuccugguccuccugccccuggugagcauccagugcgugaaccucaccacccgcacgcagcugccgcccgccuacaccaacuccuucacccggggcgucuacuaccccgacaagguguuccgcagcuccgugcugcacagcacccaggaccucuuccugcccuucuucuccaacgucacgugguuccacgccauccacgugagcgggaccaacggcaccaagcgguucgacaacccggugcugcccuucaacgacggggucuacuucgcguccaccgagaaguccaacaucauccgcggcuggaucuucgggacgacccucgacagcaagacccagagccugcugaucgugaacaacgccaccaacguggucaucaaggugugcgaguuccaguucugcaacgaccccuuccucggcguguacuaccacaagaacaacaaguccugcauggagagcgaguuccgggucuacuccagcgccaacaacugcacguucgaguacgugucccagcccuuccugauggaccuggagggcaagcaggggaacuucaagaaccuccgcgaguucguguucaagaacaucgacggcuacuucaagaucuacagcaagcacaccccgaucaaccugguccgggaccugccccagggguucuccgcccucgagccccugguggaccugcccaucggcaucaacaucacccgcuuccagacccuccuggcccugcaccggagcuaccucacgccgggggacuccagcagcggcuggaccgcgggcgccgccgccuacuacgugggguaccugcagccccgcaccuuccugcucaaguacaacgagaacggcaccaucacggacgcggucgacugcgcccuggacccccuguccgagaccaagugcacccucaagagcuucaccguggagaaggggaucuaccagacguccaacuuccgggugcagcccaccgagagcaucguccgcuucccgaacaucaccaaccugugccccuucggcgagguguucaacgccacccgguucgccuccgucuacgccuggaaccgcaagcggaucagcaacugcguggcggacuacuccgugcuguacaacagcgccuccuucagcacguucaagugcuacggcgucucccccaccaagcucaacgaccugugcuucaccaacguguacgccgacagcuucgugauccgcggggacgagguccggcagaucgcccccggccagaccgggaagaucgccgacuacaacuacaagcugccggacgacuucacgggcugcgugaucgcguggaacuccaacaaccucgacagcaaggucgggggcaacuacaacuaccgcuaccggcuguuccgcaaguccaaccugaagcccuucgagcgggacaucagcaccgagaucuaccaggccggcuccacccccugcaacgggguggagggcuucaacugcuacuucccccuccagagcuacggguuccagccgaccaacggcgugggguaccagcccuaccgcguggucgugcuguccuucgagcugcuccacgcccccgccacggugugcggccccaagaaguccaccaaccuggucaagaacaagugcgugaacuucaacuucaacggccugaccgggaccggcgugcucaccgagagcaacaagaaguuccugccguuccagcaguucgggcgcgacaucgccgacacgaccgacgcgguccgggacccccagacccuggagauccuggacaucacccccugcagcuucggcggggugagcgugaucacgccgggcaccaacaccuccaaccaggucgccgugcucuaccagggcgugaacugcaccgagguccccguggccauccacgccgaccagcugacgcccaccuggcgcguguacagcaccggguccaacgucuuccagacccgggccggcugccugaucggggcggagcacgugaacaacagcuacgagugcgacauccccaucggcgccggcaucugcgccuccuaccagacgcagaccaacagcccgcgccgggcccgcuccguggcgagccaguccaucaucgccuacaccaugagccucggggccgagaacuccgucgccuacagcaacaacuccaucgccauccccaccaacuucacgaucagcgugaccaccgagauccugcccguguccaugaccaagacgagcgucgacugcaccauguacaucugcggcgacagcaccgagugcuccaaccugcuccugcaguacgggagcuucugcacccagcugaaccgggcgcucacgggcaucgccguggagcaggacaagaacacccaggagguguucgcccaggucaagcagaucuacaagacgcccccgaucaaggacuucgggggcuucaacuucucccagauccugcccgaccccagcaagcccuccaagcgcagcuucaucgaggaccuccuguucaacaaggugacccuggccgacgccggcuucaucaagcaguacggggacugccugggcgacaucgcggcccgggaccucaucugcgcccagaaguucaacgggcugaccgugcugccgccccuccugaccgacgagaugaucgcccaguacaccuccgcccugcucgcgggcaccaucacgagcggguggaccuucggcgccggcgccgcccugcagauccccuucgcgaugcagauggccuaccgcuucaacgggaucggcgucacccagaacgugcuguacgagaaccagaagcucaucgccaaccaguucaacuccgccaucgggaagauccaggacagccuguccagcaccgccuccgcgcugggcaagcuccaggacguggucaaccagaacgcccaggcccugaacacgcuggugaagcagcucagcuccaacuucggggccaucagcuccgugcugaacgacauccugagccggcucgacccgcccgaggccgagguccagaucgaccgccugaucaccggccggcugcagucccuccagaccuacgugacccagcagcugauccgcgcggccgagauccgggccagcgccaaccuggccgcgaccaagaugagcgagugcgugcucggccaguccaagcgcgucgacuucugcgggaagggcuaccaccugaugagcuucccccaguccgcgccccacggggugguguuccugcacgucacguacgugcccgcccaggagaagaacuucaccaccgccccggccaucugccacgacggcaaggcccacuucccccgggagggggucuucgugagcaacggcacccacugguucgugacgcagcgcaacuucuacgagccccagaucaucaccaccgacaacaccuucgucuccggcaacugcgacguggugaucgggaucgucaacaacacgguguacgacccccuccagccggagcuggacagcuucaaggaggagcuggacaaguacuucaagaaccacaccucccccgacguggaccucggcgacaucagcgggaucaacgccuccgucgugaacauccagaaggagaucgaccggcugaacgagguggccaagaaccugaacgagagccucaucgaccugcaggagcugggcaaguacgagcaguacaucaaguggcccugguacaucuggcucggcuucaucgccgggcugaucgcgaucgucauggugaccaucaugcugugcugcaugaccuccugcugcagcugccucaagggcugcugcuccugcgggagcugcugcaaguucgacgaggacgacuccgagccggugcugaagggcgucaagcugcacuacacgugaggacuagucccuguucccagagcccacuuuuuuuucuuuuuuugaaauaaaauagccugucuuucagaucuaaaaaaaaaaaaaaaaaaaaaaaaaaaaaaaaaaaaaaaaaaaaaaaaaaaaaaaaaaaaaaaaaaaaaaaaaaaaaaaaaaaaaaaaaaaaaaaaaaaa

SEQ ID NO: 25093 - RNA, 4167 nt, Artificial Sequence
  SARS-CoV-2/Wuhan/WIV05/2019__EPI_ISL_402128 spike protein mRNA gc (1-1273)(K986P_V987P)
aggagagggcgcuuggcuugcaaggacccugagcugcggcauugaagcacacccaacccaacucgacugaagucagccucacugaaccggaucugagaaucuucucucucugggcuugccagggcucuccgaaccuagcuagcauccucuucaauuccaacuagaaagcuuaccauguucguguuccuggugcugcugccccuggugagcagccagugcgugaaccugaccacccggacccagcugccaccagccuacaccaacagcuucacccggggcgucuacuaccccgacaagguguuccggagcagcguccugcacagcacccaggaccuguuccugcccuucuucagcaacgugaccugguuccacgccauccacgugagcggcaccaacggcaccaagcgguucgacaaccccgugcugcccuucaacgacggcguguacuucgccagcaccgagaagagcaacaucauccggggcuggaucuucggcaccacccuggacagcaagacccagagccugcugaucgugaauaacgccaccaacguggugaucaaggugugcgaguuccaguucugcaacgaccccuuccugggcguguacuaccacaagaacaacaagagcuggauggagagcgaguuccggguguacagcagcgccaacaacugcaccuucgaguacgugagccagcccuuccugauggaccuggagggcaagcagggcaacuucaagaaccugcgggaguucguguucaagaacaucgacggcuacuucaagaucuacagcaagcacaccccaaucaaccuggugcgggaucugccccagggcuucucagcccuggagccccugguggaccugcccaucggcaucaacaucacccgguuccagacccugcuggcccugcaccggagcuaccugaccccaggcgacagcagcagcggguggacagcaggcgcggcugcuuacuacgugggcuaccugcagccccggaccuuccugcugaaguacaacgagaacggcaccaucaccgacgccguggacugcgcccuggacccucugagcgagaccaagugcacccugaagagcuucaccguggagaagggcaucuaccagaccagcaacuuccgggugcagcccaccgagagcaucgugcgguuccccaacaucaccaaccugugccccuucggcgagguguucaacgccacccgguucgccagcguguacgccuggaaccggaagcggaucagcaacugcguggccgacuacagcgugcuguacaacagcgccagcuucagcaccuucaagugcuacggcgugagccccaccaagcugaacgaccugugcuucaccaacguguacgccgacagcuucgugauccguggcgacgaggugcggcagaucgcacccggccagacaggcaagaucgccgacuacaacuacaagcugcccgacgacuucaccggcugcgugaucgccuggaacagcaacaaccucgacagcaaggugggcggcaacuacaacuaccuguaccggcuguuccggaagagcaaccugaagcccuucgagcgggacaucagcaccgagaucuaccaagccggcuccaccccuugcaacggcguggagggcuucaacugcuacuucccucugcagagcuacggcuuccagcccaccaacggcgugggcuaccagcccuaccgggugguggugcugagcuucgagcugcugcacgccccagccaccguguguggccccaagaagagcaccaaccuggugaagaacaagugcgugaacuucaacuucaacggccuuaccggcaccggcgugcugaccgagagcaacaagaaauuccugcccuuucagcaguucggccgggacaucgccgacaccaccgacgcugugcgggauccccagacccuggagauccuggacaucaccccuugcagcuucggcggcgugagcgugaucaccccaggcaccaacaccagcaaccagguggccgugcuguaccaggacgugaacugcaccgaggugcccguggccauccacgccgaccagcugacacccaccuggcgggucuacagcaccggcagcaacguguuccagacccgggccgguugccugaucggcgccgagcacgugaacaacagcuacgagugcgacauccccaucggcgccggcaucugugccagcuaccagacccagaccaauucaccccggagggcaaggagcguggccagccagagcaucaucgccuacaccaugagccugggcgccgagaacagcguggccuacagcaacaacagcaucgccauccccaccaacuucaccaucagcgugaccaccgagauucugcccgugagcaugaccaagaccagcguggacugcaccauguacaucugcggcgacagcaccgagugcagcaaccugcugcugcaguacggcagcuucugcacccagcugaaccgggcccugaccggcaucgccguggagcaggacaagaacacccaggagguguucgcccaggugaagcagaucuacaagaccccucccaucaaggacuucggcggcuucaacuucagccagauccugcccgaccccagcaagcccagcaagcggagcuucaucgaggaccugcuguucaacaaggugacccuagccgacgccggcuucaucaagcaguacggcgacugccucggcgacauagccgcccgggaccugaucugcgcccagaaguucaacggccugaccgugcugccuccccugcugaccgacgagaugaucgcccaguacaccagcgcccuguuagccggaaccaucaccagcggcuggacuuucggcgcuggagccgcucugcagauccccuucgccaugcagauggccuaccgguucaacggcaucggcgugacccagaacgugcuguacgagaaccagaagcugaucgccaaccaguucaacagcgccaucggcaagauccaggacagccugagcagcaccgcuagcgcccugggcaagcugcaggacguggugaaccagaacgcccaggcccugaacacccuggugaagcagcugagcagcaacuucggcgccaucagcagcgugcugaacgacauccugagccggcuggacccucccgaggccgaggugcagaucgaccggcugaucacuggccggcugcagagccugcagaccuacgugacccagcagcugauccgggccgccgagauucgggccagcgccaaccuggccgccaccaagaugagcgagugcgugcugggccagagcaagcggguggacuucugcggcaagggcuaccaccugaugagcuuuccccagagcgcaccccacggagugguguuccugcacgugaccuacgugcccgcccaggagaagaacuucaccaccgccccagccaucugccacgacggcaaggcccacuuuccccgggagggcguguucgugagcaacggcacccacugguucgugacccagcggaacuucuacgagccccagaucaucaccaccgacaacaccuucgugagcggcaacugcgacguggugaucggcaucgugaacaacaccguguacgauccccugcagcccgagcuggacagcuucaaggaggagcuggacaaguacuucaagaaucacaccagccccgacguggaccugggcgacaucagcggcaucaacgccagcguggugaacauccagaaggagaucgaucggcugaacgagguggccaagaaccugaacgagagccugaucgaccugcaggagcugggcaaguacgagcaguacaucaaguggcccugguacaucuggcugggcuucaucgccggccugaucgccaucgugauggugaccaucaugcugugcugcaugaccagcugcugcagcugccugaagggcuguugcagcugcggcagcugcugcaaguucgacgaggacgacagcgagcccgugcugaagggcgugaagcugcacuacaccugaggacuagucccuguucccagagcccacuuuuuuuucuuuuuuugaaauaaaauagccugucuuucagaucuaaaaaaaaaaaaaaaaaaaaaaaaaaaaaaaaaaaaaaaaaaaaaaaaaaaaaaaaaaaaaaaaaaaaaaaaaaaaaaaaaaaaaaaaaaaaaaaaaaaa

SEQ ID NO: 25094 - RNA, 4167 nt, Artificial Sequence
  SARS-CoV-2/Wuhan/WIV05/2019__EPI_ISL_402128 spike protein mRNA gc (1-1273)(K986P_V987P_ D614G)
aggagagggcgcuuggcuugcaaggacccugagcugcggcauugaagcacacccaacccaacucgacugaagucagccucacugaaccggaucugagaaucuucucucucugggcuugccagggcucuccgaaccuagcuagcauccucuucaauuccaacuagaaagcuuaccauguucguguuccuggugcugcugccccuggugagcagccagugcgugaaccugaccacccggacccagcugccaccagccuacaccaacagcuucacccggggcgucuacuaccccgacaagguguuccggagcagcguccugcacagcacccaggaccuguuccugcccuucuucagcaacgugaccugguuccacgccauccacgugagcggcaccaacggcaccaagcgguucgacaaccccgugcugcccuucaacgacggcguguacuucgccagcaccgagaagagcaacaucauccggggcuggaucuucggcaccacccuggacagcaagacccagagccugcugaucgugaauaacgccaccaacguggugaucaaggugugcgaguuccaguucugcaacgaccccuuccugggcguguacuaccacaagaacaacaagagcuggauggagagcgaguuccggguguacagcagcgccaacaacugcaccuucgaguacgugagccagcccuuccugauggaccuggagggcaagcagggcaacuucaagaaccugcgggaguucguguucaagaacaucgacggcuacuucaagaucuacagcaagcacaccccaaucaaccuggugcgggaucugccccagggcuucucagcccuggagccccugguggaccugcccaucggcaucaacaucacccgguuccagacccugcuggcccugcaccggagcuaccugaccccaggcgacagcagcagcggguggacagcaggcgcggcugcuuacuacgugggcuaccugcagccccggaccuuccugcugaaguacaacgagaacggcaccaucaccgacgccguggacugcgcccuggacccucugagcgagaccaagugcacccugaagagcuucaccguggagaagggcaucuaccagaccagcaacuuccgggugcagcccaccgagagcaucgugcgguuccccaacaucaccaaccugugccccuucggcgagguguucaacgccacccgguucgccagcguguacgccuggaaccggaagcggaucagcaacugcguggccgacuacagcgugcuguacaacagcgccagcuucagcaccuucaagugcuacggcgugagccccaccaagcugaacgaccugugcuucaccaacguguacgccgacagcuucgugauccguggcgacgaggugcggcagaucgcacccggccagacaggcaagaucgccgacuacaacuacaagcugcccgacgacuucaccggcugcgugaucgccuggaacagcaacaaccucgacagcaaggugggcggcaacuacaacuaccuguaccggcuguuccggaagagcaaccugaagcccuucgagcgggacaucagcaccgagaucuaccaagccggcuccaccccuugcaacggcguggagggcuucaacugcuacuucccucugcagagcuacggcuuccagcccaccaacggcgugggcuaccagcccuaccgggugguggugcugagcuucgagcugcugcacgccccagccaccguguguggccccaagaagagcaccaaccuggugaagaacaagugcgugaacuucaacuucaacggccuuaccggcaccggcgugcugaccgagagcaacaagaaauuccugcccuuucagcaguucggccgggacaucgccgacaccaccgacgcugugcgggauccccagacccuggagauccuggacaucaccccuugcagcuucggcggcgugagcgugaucaccccaggcaccaacaccagcaaccagguggccgugcuguaccagggcgugaacugcaccgaggugcccguggccauccacgccgaccagcugacacccaccuggcgggucuacagcaccggcagcaacguguuccagacccgggccgguugccugaucggcgccgagcacgugaacaacagcuacgagugcgacauccccaucggcgccggcaucugugccagcuaccagacccagaccaauucaccccggagggcaaggagcguggccagccagagcaucaucgccuacaccaugagccugggcgccgagaacagcguggccuacagcaacaacagcaucgccauccccaccaacuucaccaucagcgugaccaccgagauucugcccgugagcaugaccaagaccagcguggacugcaccauguacaucugcggcgacagcaccgagugcagcaaccugcugcugcaguacggcagcuucugcacccagcugaaccgggcccugaccggcaucgccguggagcaggacaagaacacccaggagguguucgcccaggugaagcagaucuacaagaccccucccaucaaggacuucggcggcuucaacuucagccagauccugcccgaccccagcaagcccagcaagcggagcuucaucgaggaccugcuguucaacaaggugacccuagccgacgccggcuucaucaagcaguacggcgacugccucggcgacauagccgcccgggaccugaucugcgcccagaaguucaacggccugaccgugcugccuccccugcugaccgacgagaugaucgcccaguacaccagcgcccuguuagccggaaccaucaccagcggcuggacuuucggcgcuggagccgcucugcagauccccuucgccaugcagauggccuaccgguucaacggcaucggcgugacccagaacgugcuguacgagaaccagaagcugaucgccaaccaguucaacagcgccaucggcaagauccaggacagccugagcagcaccgcuagcgcccugggcaagcugcaggacguggugaaccagaacgcccaggcccugaacacccuggugaagcagcugagcagcaacuucggcgccaucagcagcgugcugaacgacauccugagccggcuggacccucccgaggccgaggugcagaucgaccggcugaucacuggccggcugcagagccugcagaccuacgugacccagcagcugauccgggccgccgagauucgggccagcgccaaccuggccgccaccaagaugagcgagugcgugcugggccagagcaagcggguggacuucugcggcaagggcuaccaccugaugagcuuuccccagagcgcaccccacggagugguguuccugcacgugaccuacgugcccgcccaggagaagaacuucaccaccgccccagccaucugccacgacggcaaggcccacuuuccccgggagggcguguucgugagcaacggcacccacugguucgugacccagcggaacuucuacgagccccagaucaucaccaccgacaacaccuucgugagcggcaacugcgacguggugaucggcaucgugaacaacaccguguacgauccccugcagcccgagcuggacagcuucaaggaggagcuggacaaguacuucaagaaucacaccagccccgacguggaccugggcgacaucagcggcaucaacgccagcguggugaacauccagaaggagaucgaucggcugaacgagguggccaagaaccugaacgagagccugaucgaccugcaggagcugggcaaguacgagcaguacaucaaguggcccugguacaucuggcugggcuucaucgccggccugaucgccaucgugauggugaccaucaugcugugcugcaugaccagcugcugcagcugccugaagggcuguugcagcugcggcagcugcugcaaguucgacgaggacgacagcgagcccgugcugaagggcgugaagcugcacuacaccugaggacuagucccuguucccagagcccacuuuuuuuucuuuuuuugaaauaaaauagccugucuuucagaucuaaaaaaaaaaaaaaaaaaaaaaaaaaaaaaaaaaaaaaaaaaaaaaaaaaaaaaaaaaaaaaaaaaaaaaaaaaaaaaaaaaaaaaaaaaaaaaaaaaaa

SEQ ID NO: 25095 - RNA, 4167 nt, Artificial Sequence
  SARS-CoV-2/Wuhan/WIV05/2019__EPI_ISL_402128 spike protein mRNA gc (1-1273)(K986P_V987P_A222V_D614G)
aggagagggcgcuuggcuugcaaggacccugagcugcggcauugaagcacacccaacccaacucgacugaagucagccucacugaaccggaucugagaaucuucucucucugggcuugccagggcucuccgaaccuagcuagcauccucuucaauuccaacuagaaagcuuaccauguucguguuccuggugcugcugccccuggugagcagccagugcgugaaccugaccacccggacccagcugccaccagccuacaccaacagcuucacccggggcgucuacuaccccgacaagguguuccggagcagcguccugcacagcacccaggaccuguuccugcccuucuucagcaacgugaccugguuccacgccauccacgugagcggcaccaacggcaccaagcgguucgacaaccccgugcugcccuucaacgacggcguguacuucgccagcaccgagaagagcaacaucauccggggcuggaucuucggcaccacccuggacagcaagacccagagccugcugaucgugaauaacgccaccaacguggugaucaaggugugcgaguuccaguucugcaacgaccccuuccugggcguguacuaccacaagaacaacaagagcuggauggagagcgaguuccggguguacagcagcgccaacaacugcaccuucgaguacgugagccagcccuuccugauggaccuggagggcaagcagggcaacuucaagaaccugcgggaguucguguucaagaacaucgacggcuacuucaagaucuacagcaagcacaccccaaucaaccuggugcgggaucugccccagggcuucucagugcuggagccccugguggaccugcccaucggcaucaacaucacccgguuccagacccugcuggcccugcaccggagcuaccugaccccaggcgacagcagcagcggguggacagcaggcgcggcugcuuacuacgugggcuaccugcagccccggaccuuccugcugaaguacaacgagaacggcaccaucaccgacgccguggacugcgcccuggacccucugagcgagaccaagugcacccugaagagcuucaccguggagaagggcaucuaccagaccagcaacuuccgggugcagcccaccgagagcaucgugcgguuccccaacaucaccaaccugugccccuucggcgagguguucaacgccacccgguucgccagcguguacgccuggaaccggaagcggaucagcaacugcguggccgacuacagcgugcuguacaacagcgccagcuucagcaccuucaagugcuacggcgugagccccaccaagcugaacgaccugugcuucaccaacguguacgccgacagcuucgugauccguggcgacgaggugcggcagaucgcacccggccagacaggcaagaucgccgacuacaacuacaagcugcccgacgacuucaccggcugcgugaucgccuggaacagcaacaaccucgacagcaaggugggcggcaacuacaacuaccuguaccggcuguuccggaagagcaaccugaagcccuucgagcgggacaucagcaccgagaucuaccaagccggcuccaccccuugcaacggcguggagggcuucaacugcuacuucccucugcagagcuacggcuuccagcccaccaacggcgugggcuaccagcccuaccgggugguggugcugagcuucgagcugcugcacgccccagccaccguguguggccccaagaagagcaccaaccuggugaagaacaagugcgugaacuucaacuucaacggccuuaccggcaccggcgugcugaccgagagcaacaagaaauuccugcccuuucagcaguucggccgggacaucgccgacaccaccgacgcugugcgggauccccagacccuggagauccuggacaucaccccuugcagcuucggcggcgugagcgugaucaccccaggcaccaacaccagcaaccagguggccgugcuguaccagggcgugaacugcaccgaggugcccguggccauccacgccgaccagcugacacccaccuggcgggucuacagcaccggcagcaacguguuccagacccgggccgguugccugaucggcgccgagcacgugaacaacagcuacgagugcgacauccccaucggcgccggcaucugugccagcuaccagacccagaccaauucaccccggagggcaaggagcguggccagccagagcaucaucgccuacaccaugagccugggcgccgagaacagcguggccuacagcaacaacagcaucgccauccccaccaacuucaccaucagcgugaccaccgagauucugcccgugagcaugaccaagaccagcguggacugcaccauguacaucugcggcgacagcaccgagugcagcaaccugcugcugcaguacggcagcuucugcacccagcugaaccgggcccugaccggcaucgccguggagcaggacaagaacacccaggagguguucgcccaggugaagcagaucuacaagaccccucccaucaaggacuucggcggcuucaacuucagccagauccugcccgaccccagcaagcccagcaagcggagcuucaucgaggaccugcuguucaacaaggugacccuagccgacgccggcuucaucaagcaguacggcgacugccucggcgacauagccgcccgggaccugaucugcgcccagaaguucaacggccugaccgugcugccuccccugcugaccgacgagaugaucgcccaguacaccagcgcccuguuagccggaaccaucaccagcggcuggacuuucggcgcuggagccgcucugcagauccccuucgccaugcagauggccuaccgguucaacggcaucggcgugacccagaacgugcuguacgagaaccagaagcugaucgccaaccaguucaacagcgccaucggcaagauccaggacagccugagcagcaccgcuagcgcccugggcaagcugcaggacguggugaaccagaacgcccaggcccugaacacccuggugaagcagcugagcagcaacuucggcgccaucagcagcgugcugaacgacauccugagccggcuggacccucccgaggccgaggugcagaucgaccggcugaucacuggccggcugcagagccugcagaccuacgugacccagcagcugauccgggccgccgagauucgggccagcgccaaccuggccgccaccaagaugagcgagugcgugcugggccagagcaagcggguggacuucugcggcaagggcuaccaccugaugagcuuuccccagagcgcaccccacggagugguguuccugcacgugaccuacgugcccgcccaggagaagaacuucaccaccgccccagccaucugccacgacggcaaggcccacuuuccccgggagggcguguucgugagcaacggcacccacugguucgugacccagcggaacuucuacgagccccagaucaucaccaccgacaacaccuucgugagcggcaacugcgacguggugaucggcaucgugaacaacaccguguacgauccccugcagcccgagcuggacagcuucaaggaggagcuggacaaguacuucaagaaucacaccagccccgacguggaccugggcgacaucagcggcaucaacgccagcguggugaacauccagaaggagaucgaucggcugaacgagguggccaagaaccugaacgagagccugaucgaccugcaggagcugggcaaguacgagcaguacaucaaguggcccugguacaucuggcugggcuucaucgccggccugaucgccaucgugauggugaccaucaugcugugcugcaugaccagcugcugcagcugccugaagggcuguugcagcugcggcagcugcugcaaguucgacgaggacgacagcgagcccgugcugaagggcgugaagcugcacuacaccugaggacuagucccuguucccagagcccacuuuuuuuucuuuuuuugaaauaaaauagccugucuuucagaucuaaaaaaaaaaaaaaaaaaaaaaaaaaaaaaaaaaaaaaaaaaaaaaaaaaaaaaaaaaaaaaaaaaaaaaaaaaaaaaaaaaaaaaaaaaaaaaaaaaaa

SEQ ID NO: 25096 - RNA, 4167 nt, Artificial Sequence
  SARS-CoV-2/Wuhan/WIV05/2019__EPI_ISL_402128 spike protein mRNA gc (1-1273)(K986P_V987P_N439K_D614G)
aggagagggcgcuuggcuugcaaggacccugagcugcggcauugaagcacacccaacccaacucgacugaagucagccucacugaaccggaucugagaaucuucucucucugggcuugccagggcucuccgaaccuagcuagcauccucuucaauuccaacuagaaagcuuaccauguucguguuccuggugcugcugccccuggugagcagccagugcgugaaccugaccacccggacccagcugccaccagccuacaccaacagcuucacccggggcgucuacuaccccgacaagguguuccggagcagcguccugcacagcacccaggaccuguuccugcccuucuucagcaacgugaccugguuccacgccauccacgugagcggcaccaacggcaccaagcgguucgacaaccccgugcugcccuucaacgacggcguguacuucgccagcaccgagaagagcaacaucauccggggcuggaucuucggcaccacccuggacagcaagacccagagccugcugaucgugaauaacgccaccaacguggugaucaaggugugcgaguuccaguucugcaacgaccccuuccugggcguguacuaccacaagaacaacaagagcuggauggagagcgaguuccggguguacagcagcgccaacaacugcaccuucgaguacgugagccagcccuuccugauggaccuggagggcaagcagggcaacuucaagaaccugcgggaguucguguucaagaacaucgacggcuacuucaagaucuacagcaagcacaccccaaucaaccuggugcgggaucugccccagggcuucucagcccuggagccccugguggaccugcccaucggcaucaacaucacccgguuccagacccugcuggcccugcaccggagcuaccugaccccaggcgacagcagcagcggguggacagcaggcgcggcugcuuacuacgugggcuaccugcagccccggaccuuccugcugaaguacaacgagaacggcaccaucaccgacgccguggacugcgcccuggacccucugagcgagaccaagugcacccugaagagcuucaccguggagaagggcaucuaccagaccagcaacuuccgggugcagcccaccgagagcaucgugcgguuccccaacaucaccaaccugugccccuucggcgagguguucaacgccacccgguucgccagcguguacgccuggaaccggaagcggaucagcaacugcguggccgacuacagcgugcuguacaacagcgccagcuucagcaccuucaagugcuacggcgugagccccaccaagcugaacgaccugugcuucaccaacguguacgccgacagcuucgugauccguggcgacgaggugcggcagaucgcacccggccagacaggcaagaucgccgacuacaacuacaagcugcccgacgacuucaccggcugcgugaucgccuggaacagcaagaaccucgacagcaaggugggcggcaacuacaacuaccuguaccggcuguuccggaagagcaaccugaagcccuucgagcgggacaucagcaccgagaucuaccaagccggcuccaccccuugcaacggcguggagggcuucaacugcuacuucccucugcagagcuacggcuuccagcccaccaacggcgugggcuaccagcccuaccgggugguggugcugagcuucgagcugcugcacgccccagccaccguguguggccccaagaagagcaccaaccuggugaagaacaagugcgugaacuucaacuucaacggccuuaccggcaccggcgugcugaccgagagcaacaagaaauuccugcccuuucagcaguucggccgggacaucgccgacaccaccgacgcugugcgggauccccagacccuggagauccuggacaucaccccuugcagcuucggcggcgugagcgugaucaccccaggcaccaacaccagcaaccagguggccgugcuguaccagggcgugaacugcaccgaggugcccguggccauccacgccgaccagcugacacccaccuggcgggucuacagcaccggcagcaacguguuccagacccgggccgguugccugaucggcgccgagcacgugaacaacagcuacgagugcgacauccccaucggcgccggcaucugugccagcuaccagacccagaccaauucaccccggagggcaaggagcguggccagccagagcaucaucgccuacaccaugagccugggcgccgagaacagcguggccuacagcaacaacagcaucgccauccccaccaacuucaccaucagcgugaccaccgagauucugcccgugagcaugaccaagaccagcguggacugcaccauguacaucugcggcgacagcaccgagugcagcaaccugcugcugcaguacggcagcuucugcacccagcugaaccgggcccugaccggcaucgccguggagcaggacaagaacacccaggagguguucgcccaggugaagcagaucuacaagaccccucccaucaaggacuucggcggcuucaacuucagccagauccugcccgaccccagcaagcccagcaagcggagcuucaucgaggaccugcuguucaacaaggugacccuagccgacgccggcuucaucaagcaguacggcgacugccucggcgacauagccgcccgggaccugaucugcgcccagaaguucaacggccugaccgugcugccuccccugcugaccgacgagaugaucgcccaguacaccagcgcccuguuagccggaaccaucaccagcggcuggacuuucggcgcuggagccgcucugcagauccccuucgccaugcagauggccuaccgguucaacggcaucggcgugacccagaacgugcuguacgagaaccagaagcugaucgccaaccaguucaacagcgccaucggcaagauccaggacagccugagcagcaccgcuagcgcccugggcaagcugcaggacguggugaaccagaacgcccaggcccugaacacccuggugaagcagcugagcagcaacuucggcgccaucagcagcgugcugaacgacauccugagccggcuggacccucccgaggccgaggugcagaucgaccggcugaucacuggccggcugcagagccugcagaccuacgugacccagcagcugauccgggccgccgagauucgggccagcgccaaccuggccgccaccaagaugagcgagugcgugcugggccagagcaagcggguggacuucugcggcaagggcuaccaccugaugagcuuuccccagagcgcaccccacggagugguguuccugcacgugaccuacgugcccgcccaggagaagaacuucaccaccgccccagccaucugccacgacggcaaggcccacuuuccccgggagggcguguucgugagcaacggcacccacugguucgugacccagcggaacuucuacgagccccagaucaucaccaccgacaacaccuucgugagcggcaacugcgacguggugaucggcaucgugaacaacaccguguacgauccccugcagcccgagcuggacagcuucaaggaggagcuggacaaguacuucaagaaucacaccagccccgacguggaccugggcgacaucagcggcaucaacgccagcguggugaacauccagaaggagaucgaucggcugaacgagguggccaagaaccugaacgagagccugaucgaccugcaggagcugggcaaguacgagcaguacaucaaguggcccugguacaucuggcugggcuucaucgccggccugaucgccaucgugauggugaccaucaugcugugcugcaugaccagcugcugcagcugccugaagggcuguugcagcugcggcagcugcugcaaguucgacgaggacgacagcgagcccgugcugaagggcgugaagcugcacuacaccugaggacuagucccuguucccagagcccacuuuuuuuucuuuuuuugaaauaaaauagccugucuuucagaucuaaaaaaaaaaaaaaaaaaaaaaaaaaaaaaaaaaaaaaaaaaaaaaaaaaaaaaaaaaaaaaaaaaaaaaaaaaaaaaaaaaaaaaaaaaaaaaaaaaaa

SEQ ID NO: 25097 - RNA, 4167 nt, Artificial Sequence
  SARS-CoV-2/Wuhan/WIV05/2019__EPI_ISL_402128 spike protein mRNA gc (1-1273)(K986P_V987P_S477N_D614G)
aggagagggcgcuuggcuugcaaggacccugagcugcggcauugaagcacacccaacccaacucgacugaagucagccucacugaaccggaucugagaaucuucucucucugggcuugccagggcucuccgaaccuagcuagcauccucuucaauuccaacuagaaagcuuaccauguucguguuccuggugcugcugccccuggugagcagccagugcgugaaccugaccacccggacccagcugccaccagccuacaccaacagcuucacccggggcgucuacuaccccgacaagguguuccggagcagcguccugcacagcacccaggaccuguuccugcccuucuucagcaacgugaccugguuccacgccauccacgugagcggcaccaacggcaccaagcgguucgacaaccccgugcugcccuucaacgacggcguguacuucgccagcaccgagaagagcaacaucauccggggcuggaucuucggcaccacccuggacagcaagacccagagccugcugaucgugaauaacgccaccaacguggugaucaaggugugcgaguuccaguucugcaacgaccccuuccugggcguguacuaccacaagaacaacaagagcuggauggagagcgaguuccggguguacagcagcgccaacaacugcaccuucgaguacgugagccagcccuuccugauggaccuggagggcaagcagggcaacuucaagaaccugcgggaguucguguucaagaacaucgacggcuacuucaagaucuacagcaagcacaccccaaucaaccuggugcgggaucugccccagggcuucucagcccuggagccccugguggaccugcccaucggcaucaacaucacccgguuccagacccugcuggcccugcaccggagcuaccugaccccaggcgacagcagcagcggguggacagcaggcgcggcugcuuacuacgugggcuaccugcagccccggaccuuccugcugaaguacaacgagaacggcaccaucaccgacgccguggacugcgcccuggacccucugagcgagaccaagugcacccugaagagcuucaccguggagaagggcaucuaccagaccagcaacuuccgggugcagcccaccgagagcaucgugcgguuccccaacaucaccaaccugugccccuucggcgagguguucaacgccacccgguucgccagcguguacgccuggaaccggaagcggaucagcaacugcguggccgacuacagcgugcuguacaacagcgccagcuucagcaccuucaagugcuacggcgugagccccaccaagcugaacgaccugugcuucaccaacguguacgccgacagcuucgugauccguggcgacgaggugcggcagaucgcacccggccagacaggcaagaucgccgacuacaacuacaagcugcccgacgacuucaccggcugcgugaucgccuggaacagcaacaaccucgacagcaaggugggcggcaacuacaacuaccuguaccggcuguuccggaagagcaaccugaagcccuucgagcgggacaucagcaccgagaucuaccaagccggcaacaccccuugcaacggcguggagggcuucaacugcuacuucccucugcagagcuacggcuuccagcccaccaacggcgugggcuaccagcccuaccgggugguggugcugagcuucgagcugcugcacgccccagccaccguguguggccccaagaagagcaccaaccuggugaagaacaagugcgugaacuucaacuucaacggccuuaccggcaccggcgugcugaccgagagcaacaagaaauuccugcccuuucagcaguucggccgggacaucgccgacaccaccgacgcugugcgggauccccagacccuggagauccuggacaucaccccuugcagcuucggcggcgugagcgugaucaccccaggcaccaacaccagcaaccagguggccgugcuguaccagggcgugaacugcaccgaggugcccguggccauccacgccgaccagcugacacccaccuggcgggucuacagcaccggcagcaacguguuccagacccgggccgguugccugaucggcgccgagcacgugaacaacagcuacgagugcgacauccccaucggcgccggcaucugugccagcuaccagacccagaccaauucaccccggagggcaaggagcguggccagccagagcaucaucgccuacaccaugagccugggcgccgagaacagcguggccuacagcaacaacagcaucgccauccccaccaacuucaccaucagcgugaccaccgagauucugcccgugagcaugaccaagaccagcguggacugcaccauguacaucugcggcgacagcaccgagugcagcaaccugcugcugcaguacggcagcuucugcacccagcugaaccgggcccugaccggcaucgccguggagcaggacaagaacacccaggagguguucgcccaggugaagcagaucuacaagaccccucccaucaaggacuucggcggcuucaacuucagccagauccugcccgaccccagcaagcccagcaagcggagcuucaucgaggaccugcuguucaacaaggugacccuagccgacgccggcuucaucaagcaguacggcgacugccucggcgacauagccgcccgggaccugaucugcgcccagaaguucaacggccugaccgugcugccuccccugcugaccgacgagaugaucgcccaguacaccagcgcccuguuagccggaaccaucaccagcggcuggacuuucggcgcuggagccgcucugcagauccccuucgccaugcagauggccuaccgguucaacggcaucggcgugacccagaacgugcuguacgagaaccagaagcugaucgccaaccaguucaacagcgccaucggcaagauccaggacagccugagcagcaccgcuagcgcccugggcaagcugcaggacguggugaaccagaacgcccaggcccugaacacccuggugaagcagcugagcagcaacuucggcgccaucagcagcgugcugaacgacauccugagccggcuggacccucccgaggccgaggugcagaucgaccggcugaucacuggccggcugcagagccugcagaccuacgugacccagcagcugauccgggccgccgagauucgggccagcgccaaccuggccgccaccaagaugagcgagugcgugcugggccagagcaagcggguggacuucugcggcaagggcuaccaccugaugagcuuuccccagagcgcaccccacggagugguguuccugcacgugaccuacgugcccgcccaggagaagaacuucaccaccgccccagccaucugccacgacggcaaggcccacuuuccccgggagggcguguucgugagcaacggcacccacugguucgugacccagcggaacuucuacgagccccagaucaucaccaccgacaacaccuucgugagcggcaacugcgacguggugaucggcaucgugaacaacaccguguacgauccccugcagcccgagcuggacagcuucaaggaggagcuggacaaguacuucaagaaucacaccagccccgacguggaccugggcgacaucagcggcaucaacgccagcguggugaacauccagaaggagaucgaucggcugaacgagguggccaagaaccugaacgagagccugaucgaccugcaggagcugggcaaguacgagcaguacaucaaguggcccugguacaucuggcugggcuucaucgccggccugaucgccaucgugauggugaccaucaugcugugcugcaugaccagcugcugcagcugccugaagggcuguugcagcugcggcagcugcugcaaguucgacgaggacgacagcgagcccgugcugaagggcgugaagcugcacuacaccugaggacuagucccuguucccagagcccacuuuuuuuucuuuuuuugaaauaaaauagccugucuuucagaucuaaaaaaaaaaaaaaaaaaaaaaaaaaaaaaaaaaaaaaaaaaaaaaaaaaaaaaaaaaaaaaaaaaaaaaaaaaaaaaaaaaaaaaaaaaaaaaaaaaaa

SEQ ID NO: 25098 - RNA, 4167 nt, Artificial Sequence
  SARS-CoV-2/Wuhan/WIV05/2019__EPI_ISL_402128 spike protein mRNA gc (1-1273)(K986P_V987P_N501Y_D614G)
aggagagggcgcuuggcuugcaaggacccugagcugcggcauugaagcacacccaacccaacucgacugaagucagccucacugaaccggaucugagaaucuucucucucugggcuugccagggcucuccgaaccuagcuagcauccucuucaauuccaacuagaaagcuuaccauguucguguuccuggugcugcugccccuggugagcagccagugcgugaaccugaccacccggacccagcugccaccagccuacaccaacagcuucacccggggcgucuacuaccccgacaagguguuccggagcagcguccugcacagcacccaggaccuguuccugcccuucuucagcaacgugaccugguuccacgccauccacgugagcggcaccaacggcaccaagcgguucgacaaccccgugcugcccuucaacgacggcguguacuucgccagcaccgagaagagcaacaucauccggggcuggaucuucggcaccacccuggacagcaagacccagagccugcugaucgugaauaacgccaccaacguggugaucaaggugugcgaguuccaguucugcaacgaccccuuccugggcguguacuaccacaagaacaacaagagcuggauggagagcgaguuccggguguacagcagcgccaacaacugcaccuucgaguacgugagccagcccuuccugauggaccuggagggcaagcagggcaacuucaagaaccugcgggaguucguguucaagaacaucgacggcuacuucaagaucuacagcaagcacaccccaaucaaccuggugcgggaucugccccagggcuucucagcccuggagccccugguggaccugcccaucggcaucaacaucacccgguuccagacccugcuggcccugcaccggagcuaccugaccccaggcgacagcagcagcggguggacagcaggcgcggcugcuuacuacgugggcuaccugcagccccggaccuuccugcugaaguacaacgagaacggcaccaucaccgacgccguggacugcgcccuggacccucugagcgagaccaagugcacccugaagagcuucaccguggagaagggcaucuaccagaccagcaacuuccgggugcagcccaccgagagcaucgugcgguuccccaacaucaccaaccugugccccuucggcgagguguucaacgccacccgguucgccagcguguacgccuggaaccggaagcggaucagcaacugcguggccgacuacagcgugcuguacaacagcgccagcuucagcaccuucaagugcuacggcgugagccccaccaagcugaacgaccugugcuucaccaacguguacgccgacagcuucgugauccguggcgacgaggugcggcagaucgcacccggccagacaggcaagaucgccgacuacaacuacaagcugcccgacgacuucaccggcugcgugaucgccuggaacagcaacaaccucgacagcaaggugggcggcaacuacaacuaccuguaccggcuguuccggaagagcaaccugaagcccuucgagcgggacaucagcaccgagaucuaccaagccggcuccaccccuugcaacggcguggagggcuucaacugcuacuucccucugcagagcuacggcuuccagcccaccuacggcgugggcuaccagcccuaccgggugguggugcugagcuucgagcugcugcacgccccagccaccguguguggccccaagaagagcaccaaccuggugaagaacaagugcgugaacuucaacuucaacggccuuaccggcaccggcgugcugaccgagagcaacaagaaauuccugcccuuucagcaguucggccgggacaucgccgacaccaccgacgcugugcgggauccccagacccuggagauccuggacaucaccccuugcagcuucggcggcgugagcgugaucaccccaggcaccaacaccagcaaccagguggccgugcuguaccagggcgugaacugcaccgaggugcccguggccauccacgccgaccagcugacacccaccuggcgggucuacagcaccggcagcaacguguuccagacccgggccgguugccugaucggcgccgagcacgugaacaacagcuacgagugcgacauccccaucggcgccggcaucugugccagcuaccagacccagaccaauucaccccggagggcaaggagcguggccagccagagcaucaucgccuacaccaugagccugggcgccgagaacagcguggccuacagcaacaacagcaucgccauccccaccaacuucaccaucagcgugaccaccgagauucugcccgugagcaugaccaagaccagcguggacugcaccauguacaucugcggcgacagcaccgagugcagcaaccugcugcugcaguacggcagcuucugcacccagcugaaccgggcccugaccggcaucgccguggagcaggacaagaacacccaggagguguucgcccaggugaagcagaucuacaagaccccucccaucaaggacuucggcggcuucaacuucagccagauccugcccgaccccagcaagcccagcaagcggagcuucaucgaggaccugcuguucaacaaggugacccuagccgacgccggcuucaucaagcaguacggcgacugccucggcgacauagccgcccgggaccugaucugcgcccagaaguucaacggccugaccgugcugccuccccugcugaccgacgagaugaucgcccaguacaccagcgcccuguuagccggaaccaucaccagcggcuggacuuucggcgcuggagccgcucugcagauccccuucgccaugcagauggccuaccgguucaacggcaucggcgugacccagaacgugcuguacgagaaccagaagcugaucgccaaccaguucaacagcgccaucggcaagauccaggacagccugagcagcaccgcuagcgcccugggcaagcugcaggacguggugaaccagaacgcccaggcccugaacacccuggugaagcagcugagcagcaacuucggcgccaucagcagcgugcugaacgacauccugagccggcuggacccucccgaggccgaggugcagaucgaccggcugaucacuggccggcugcagagccugcagaccuacgugacccagcagcugauccgggccgccgagauucgggccagcgccaaccuggccgccaccaagaugagcgagugcgugcugggccagagcaagcggguggacuucugcggcaagggcuaccaccugaugagcuuuccccagagcgcaccccacggagugguguuccugcacgugaccuacgugcccgcccaggagaagaacuucaccaccgccccagccaucugccacgacggcaaggcccacuuuccccgggagggcguguucgugagcaacggcacccacugguucgugacccagcggaacuucuacgagccccagaucaucaccaccgacaacaccuucgugagcggcaacugcgacguggugaucggcaucgugaacaacaccguguacgauccccugcagcccgagcuggacagcuucaaggaggagcuggacaaguacuucaagaaucacaccagccccgacguggaccugggcgacaucagcggcaucaacgccagcguggugaacauccagaaggagaucgaucggcugaacgagguggccaagaaccugaacgagagccugaucgaccugcaggagcugggcaaguacgagcaguacaucaaguggcccugguacaucuggcugggcuucaucgccggccugaucgccaucgugauggugaccaucaugcugugcugcaugaccagcugcugcagcugccugaagggcuguugcagcugcggcagcugcugcaaguucgacgaggacgacagcgagcccgugcugaagggcgugaagcugcacuacaccugaggacuagucccuguucccagagcccacuuuuuuuucuuuuuuugaaauaaaauagccugucuuucagaucuaaaaaaaaaaaaaaaaaaaaaaaaaaaaaaaaaaaaaaaaaaaaaaaaaaaaaaaaaaaaaaaaaaaaaaaaaaaaaaaaaaaaaaaaaaaaaaaaaaaa

SEQ ID NO: 25099 - RNA, 4161 nt, Artificial Sequence
  SARS-CoV-2/Wuhan/WIV05/2019__EPI_ISL_402128 spike protein mRNA gc (1-1273)(K986P_V987P_H69del_V70del_D614G)
aggagagggcgcuuggcuugcaaggacccugagcugcggcauugaagcacacccaacccaacucgacugaagucagccucacugaaccggaucugagaaucuucucucucugggcuugccagggcucuccgaaccuagcuagcauccucuucaauuccaacuagaaagcuuaccauguucguguuccuggugcugcugccccuggugagcagccagugcgugaaccugaccacccggacccagcugccaccagccuacaccaacagcuucacccggggcgucuacuaccccgacaagguguuccggagcagcguccugcacagcacccaggaccuguuccugcccuucuucagcaacgugaccugguuccacgccaucagcggcaccaacggcaccaagcgguucgacaaccccgugcugcccuucaacgacggcguguacuucgccagcaccgagaagagcaacaucauccggggcuggaucuucggcaccacccuggacagcaagacccagagccugcugaucgugaauaacgccaccaacguggugaucaaggugugcgaguuccaguucugcaacgaccccuuccugggcguguacuaccacaagaacaacaagagcuggauggagagcgaguuccggguguacagcagcgccaacaacugcaccuucgaguacgugagccagcccuuccugauggaccuggagggcaagcagggcaacuucaagaaccugcgggaguucguguucaagaacaucgacggcuacuucaagaucuacagcaagcacaccccaaucaaccuggugcgggaucugccccagggcuucucagcccuggagccccugguggaccugcccaucggcaucaacaucacccgguuccagacccugcuggcccugcaccggagcuaccugaccccaggcgacagcagcagcggguggacagcaggcgcggcugcuuacuacgugggcuaccugcagccccggaccuuccugcugaaguacaacgagaacggcaccaucaccgacgccguggacugcgcccuggacccucugagcgagaccaagugcacccugaagagcuucaccguggagaagggcaucuaccagaccagcaacuuccgggugcagcccaccgagagcaucgugcgguuccccaacaucaccaaccugugccccuucggcgagguguucaacgccacccgguucgccagcguguacgccuggaaccggaagcggaucagcaacugcguggccgacuacagcgugcuguacaacagcgccagcuucagcaccuucaagugcuacggcgugagccccaccaagcugaacgaccugugcuucaccaacguguacgccgacagcuucgugauccguggcgacgaggugcggcagaucgcacccggccagacaggcaagaucgccgacuacaacuacaagcugcccgacgacuucaccggcugcgugaucgccuggaacagcaacaaccucgacagcaaggugggcggcaacuacaacuaccuguaccggcuguuccggaagagcaaccugaagcccuucgagcgggacaucagcaccgagaucuaccaagccggcuccaccccuugcaacggcguggagggcuucaacugcuacuucccucugcagagcuacggcuuccagcccaccaacggcgugggcuaccagcccuaccgggugguggugcugagcuucgagcugcugcacgccccagccaccguguguggccccaagaagagcaccaaccuggugaagaacaagugcgugaacuucaacuucaacggccuuaccggcaccggcgugcugaccgagagcaacaagaaauuccugcccuuucagcaguucggccgggacaucgccgacaccaccgacgcugugcgggauccccagacccuggagauccuggacaucaccccuugcagcuucggcggcgugagcgugaucaccccaggcaccaacaccagcaaccagguggccgugcuguaccagggcgugaacugcaccgaggugcccguggccauccacgccgaccagcugacacccaccuggcgggucuacagcaccggcagcaacguguuccagacccgggccgguugccugaucggcgccgagcacgugaacaacagcuacgagugcgacauccccaucggcgccggcaucugugccagcuaccagacccagaccaauucaccccggagggcaaggagcguggccagccagagcaucaucgccuacaccaugagccugggcgccgagaacagcguggccuacagcaacaacagcaucgccauccccaccaacuucaccaucagcgugaccaccgagauucugcccgugagcaugaccaagaccagcguggacugcaccauguacaucugcggcgacagcaccgagugcagcaaccugcugcugcaguacggcagcuucugcacccagcugaaccgggcccugaccggcaucgccguggagcaggacaagaacacccaggagguguucgcccaggugaagcagaucuacaagaccccucccaucaaggacuucggcggcuucaacuucagccagauccugcccgaccccagcaagcccagcaagcggagcuucaucgaggaccugcuguucaacaaggugacccuagccgacgccggcuucaucaagcaguacggcgacugccucggcgacauagccgcccgggaccugaucugcgcccagaaguucaacggccugaccgugcugccuccccugcugaccgacgagaugaucgcccaguacaccagcgcccuguuagccggaaccaucaccagcggcuggacuuucggcgcuggagccgcucugcagauccccuucgccaugcagauggccuaccgguucaacggcaucggcgugacccagaacgugcuguacgagaaccagaagcugaucgccaaccaguucaacagcgccaucggcaagauccaggacagccugagcagcaccgcuagcgcccugggcaagcugcaggacguggugaaccagaacgcccaggcccugaacacccuggugaagcagcugagcagcaacuucggcgccaucagcagcgugcugaacgacauccugagccggcuggacccucccgaggccgaggugcagaucgaccggcugaucacuggccggcugcagagccugcagaccuacgugacccagcagcugauccgggccgccgagauucgggccagcgccaaccuggccgccaccaagaugagcgagugcgugcugggccagagcaagcggguggacuucugcggcaagggcuaccaccugaugagcuuuccccagagcgcaccccacggagugguguuccugcacgugaccuacgugcccgcccaggagaagaacuucaccaccgccccagccaucugccacgacggcaaggcccacuuuccccgggagggcguguucgugagcaacggcacccacugguucgugacccagcggaacuucuacgagccccagaucaucaccaccgacaacaccuucgugagcggcaacugcgacguggugaucggcaucgugaacaacaccguguacgauccccugcagcccgagcuggacagcuucaaggaggagcuggacaaguacuucaagaaucacaccagccccgacguggaccugggcgacaucagcggcaucaacgccagcguggugaacauccagaaggagaucgaucggcugaacgagguggccaagaaccugaacgagagccugaucgaccugcaggagcugggcaaguacgagcaguacaucaaguggcccugguacaucuggcugggcuucaucgccggccugaucgccaucgugauggugaccaucaugcugugcugcaugaccagcugcugcagcugccugaagggcuguugcagcugcggcagcugcugcaaguucgacgaggacgacagcgagcccgugcugaagggcgugaagcugcacuacaccugaggacuagucccuguucccagagcccacuuuuuuuucuuuuuuugaaauaaaauagccugucuuucagaucuaaaaaaaaaaaaaaaaaaaaaaaaaaaaaaaaaaaaaaaaaaaaaaaaaaaaaaaaaaaaaaaaaaaaaaaaaaaaaaaaaaaaaaaaaaaaaaaaaaaa

SEQ ID NO: 25100 - RNA, 4167 nt, Artificial Sequence
  SARS-CoV-2/Wuhan/WIV05/2019__EPI_ISL_402128 spike protein mRNA gc (1-1273)(K986P_V987P_Y453F_D614G)
aggagagggcgcuuggcuugcaaggacccugagcugcggcauugaagcacacccaacccaacucgacugaagucagccucacugaaccggaucugagaaucuucucucucugggcuugccagggcucuccgaaccuagcuagcauccucuucaauuccaacuagaaagcuuaccauguucguguuccuggugcugcugccccuggugagcagccagugcgugaaccugaccacccggacccagcugccaccagccuacaccaacagcuucacccggggcgucuacuaccccgacaagguguuccggagcagcguccugcacagcacccaggaccuguuccugcccuucuucagcaacgugaccugguuccacgccauccacgugagcggcaccaacggcaccaagcgguucgacaaccccgugcugcccuucaacgacggcguguacuucgccagcaccgagaagagcaacaucauccggggcuggaucuucggcaccacccuggacagcaagacccagagccugcugaucgugaauaacgccaccaacguggugaucaaggugugcgaguuccaguucugcaacgaccccuuccugggcguguacuaccacaagaacaacaagagcuggauggagagcgaguuccggguguacagcagcgccaacaacugcaccuucgaguacgugagccagcccuuccugauggaccuggagggcaagcagggcaacuucaagaaccugcgggaguucguguucaagaacaucgacggcuacuucaagaucuacagcaagcacaccccaaucaaccuggugcgggaucugccccagggcuucucagcccuggagccccugguggaccugcccaucggcaucaacaucacccgguuccagacccugcuggcccugcaccggagcuaccugaccccaggcgacagcagcagcggguggacagcaggcgcggcugcuuacuacgugggcuaccugcagccccggaccuuccugcugaaguacaacgagaacggcaccaucaccgacgccguggacugcgcccuggacccucugagcgagaccaagugcacccugaagagcuucaccguggagaagggcaucuaccagaccagcaacuuccgggugcagcccaccgagagcaucgugcgguuccccaacaucaccaaccugugccccuucggcgagguguucaacgccacccgguucgccagcguguacgccuggaaccggaagcggaucagcaacugcguggccgacuacagcgugcuguacaacagcgccagcuucagcaccuucaagugcuacggcgugagccccaccaagcugaacgaccugugcuucaccaacguguacgccgacagcuucgugauccguggcgacgaggugcggcagaucgcacccggccagacaggcaagaucgccgacuacaacuacaagcugcccgacgacuucaccggcugcgugaucgccuggaacagcaacaaccucgacagcaaggugggcggcaacuacaacuaccuguuccggcuguuccggaagagcaaccugaagcccuucgagcgggacaucagcaccgagaucuaccaagccggcuccaccccuugcaacggcguggagggcuucaacugcuacuucccucugcagagcuacggcuuccagcccaccaacggcgugggcuaccagcccuaccgggugguggugcugagcuucgagcugcugcacgccccagccaccguguguggccccaagaagagcaccaaccuggugaagaacaagugcgugaacuucaacuucaacggccuuaccggcaccggcgugcugaccgagagcaacaagaaauuccugcccuuucagcaguucggccgggacaucgccgacaccaccgacgcugugcgggauccccagacccuggagauccuggacaucaccccuugcagcuucggcggcgugagcgugaucaccccaggcaccaacaccagcaaccagguggccgugcuguaccagggcgugaacugcaccgaggugcccguggccauccacgccgaccagcugacacccaccuggcgggucuacagcaccggcagcaacguguuccagacccgggccgguugccugaucggcgccgagcacgugaacaacagcuacgagugcgacauccccaucggcgccggcaucugugccagcuaccagacccagaccaauucaccccggagggcaaggagcguggccagccagagcaucaucgccuacaccaugagccugggcgccgagaacagcguggccuacagcaacaacagcaucgccauccccaccaacuucaccaucagcgugaccaccgagauucugcccgugagcaugaccaagaccagcguggacugcaccauguacaucugcggcgacagcaccgagugcagcaaccugcugcugcaguacggcagcuucugcacccagcugaaccgggcccugaccggcaucgccguggagcaggacaagaacacccaggagguguucgcccaggugaagcagaucuacaagaccccucccaucaaggacuucggcggcuucaacuucagccagauccugcccgaccccagcaagcccagcaagcggagcuucaucgaggaccugcuguucaacaaggugacccuagccgacgccggcuucaucaagcaguacggcgacugccucggcgacauagccgcccgggaccugaucugcgcccagaaguucaacggccugaccgugcugccuccccugcugaccgacgagaugaucgcccaguacaccagcgcccuguuagccggaaccaucaccagcggcuggacuuucggcgcuggagccgcucugcagauccccuucgccaugcagauggccuaccgguucaacggcaucggcgugacccagaacgugcuguacgagaaccagaagcugaucgccaaccaguucaacagcgccaucggcaagauccaggacagccugagcagcaccgcuagcgcccugggcaagcugcaggacguggugaaccagaacgcccaggcccugaacacccuggugaagcagcugagcagcaacuucggcgccaucagcagcgugcugaacgacauccugagccggcuggacccucccgaggccgaggugcagaucgaccggcugaucacuggccggcugcagagccugcagaccuacgugacccagcagcugauccgggccgccgagauucgggccagcgccaaccuggccgccaccaagaugagcgagugcgugcugggccagagcaagcggguggacuucugcggcaagggcuaccaccugaugagcuuuccccagagcgcaccccacggagugguguuccugcacgugaccuacgugcccgcccaggagaagaacuucaccaccgccccagccaucugccacgacggcaaggcccacuuuccccgggagggcguguucgugagcaacggcacccacugguucgugacccagcggaacuucuacgagccccagaucaucaccaccgacaacaccuucgugagcggcaacugcgacguggugaucggcaucgugaacaacaccguguacgauccccugcagcccgagcuggacagcuucaaggaggagcuggacaaguacuucaagaaucacaccagccccgacguggaccugggcgacaucagcggcaucaacgccagcguggugaacauccagaaggagaucgaucggcugaacgagguggccaagaaccugaacgagagccugaucgaccugcaggagcugggcaaguacgagcaguacaucaaguggcccugguacaucuggcugggcuucaucgccggccugaucgccaucgugauggugaccaucaugcugugcugcaugaccagcugcugcagcugccugaagggcuguugcagcugcggcagcugcugcaaguucgacgaggacgacagcgagcccgugcugaagggcgugaagcugcacuacaccugaggacuagucccuguucccagagcccacuuuuuuuucuuuuuuugaaauaaaauagccugucuuucagaucuaaaaaaaaaaaaaaaaaaaaaaaaaaaaaaaaaaaaaaaaaaaaaaaaaaaaaaaaaaaaaaaaaaaaaaaaaaaaaaaaaaaaaaaaaaaaaaaaaaaa

SEQ ID NO: 25101 - RNA, 4167 nt, Artificial Sequence
  SARS-CoV-2/Wuhan/WIV05/2019__EPI_ISL_402128 spike protein mRNA gc (1-1273)(K986P_V987P_D614G_I692V)
aggagagggcgcuuggcuugcaaggacccugagcugcggcauugaagcacacccaacccaacucgacugaagucagccucacugaaccggaucugagaaucuucucucucugggcuugccagggcucuccgaaccuagcuagcauccucuucaauuccaacuagaaagcuuaccauguucguguuccuggugcugcugccccuggugagcagccagugcgugaaccugaccacccggacccagcugccaccagccuacaccaacagcuucacccggggcgucuacuaccccgacaagguguuccggagcagcguccugcacagcacccaggaccuguuccugcccuucuucagcaacgugaccugguuccacgccauccacgugagcggcaccaacggcaccaagcgguucgacaaccccgugcugcccuucaacgacggcguguacuucgccagcaccgagaagagcaacaucauccggggcuggaucuucggcaccacccuggacagcaagacccagagccugcugaucgugaauaacgccaccaacguggugaucaaggugugcgaguuccaguucugcaacgaccccuuccugggcguguacuaccacaagaacaacaagagcuggauggagagcgaguuccggguguacagcagcgccaacaacugcaccuucgaguacgugagccagcccuuccugauggaccuggagggcaagcagggcaacuucaagaaccugcgggaguucguguucaagaacaucgacggcuacuucaagaucuacagcaagcacaccccaaucaaccuggugcgggaucugccccagggcuucucagcccuggagccccugguggaccugcccaucggcaucaacaucacccgguuccagacccugcuggcccugcaccggagcuaccugaccccaggcgacagcagcagcggguggacagcaggcgcggcugcuuacuacgugggcuaccugcagccccggaccuuccugcugaaguacaacgagaacggcaccaucaccgacgccguggacugcgcccuggacccucugagcgagaccaagugcacccugaagagcuucaccguggagaagggcaucuaccagaccagcaacuuccgggugcagcccaccgagagcaucgugcgguuccccaacaucaccaaccugugccccuucggcgagguguucaacgccacccgguucgccagcguguacgccuggaaccggaagcggaucagcaacugcguggccgacuacagcgugcuguacaacagcgccagcuucagcaccuucaagugcuacggcgugagccccaccaagcugaacgaccugugcuucaccaacguguacgccgacagcuucgugauccguggcgacgaggugcggcagaucgcacccggccagacaggcaagaucgccgacuacaacuacaagcugcccgacgacuucaccggcugcgugaucgccuggaacagcaacaaccucgacagcaaggugggcggcaacuacaacuaccuguaccggcuguuccggaagagcaaccugaagcccuucgagcgggacaucagcaccgagaucuaccaagccggcuccaccccuugcaacggcguggagggcuucaacugcuacuucccucugcagagcuacggcuuccagcccaccaacggcgugggcuaccagcccuaccgggugguggugcugagcuucgagcugcugcacgccccagccaccguguguggccccaagaagagcaccaaccuggugaagaacaagugcgugaacuucaacuucaacggccuuaccggcaccggcgugcugaccgagagcaacaagaaauuccugcccuuucagcaguucggccgggacaucgccgacaccaccgacgcugugcgggauccccagacccuggagauccuggacaucaccccuugcagcuucggcggcgugagcgugaucaccccaggcaccaacaccagcaaccagguggccgugcuguaccagggcgugaacugcaccgaggugcccguggccauccacgccgaccagcugacacccaccuggcgggucuacagcaccggcagcaacguguuccagacccgggccgguugccugaucggcgccgagcacgugaacaacagcuacgagugcgacauccccaucggcgccggcaucugugccagcuaccagacccagaccaauucaccccggagggcaaggagcguggccagccagagcgugaucgccuacaccaugagccugggcgccgagaacagcguggccuacagcaacaacagcaucgccauccccaccaacuucaccaucagcgugaccaccgagauucugcccgugagcaugaccaagaccagcguggacugcaccauguacaucugcggcgacagcaccgagugcagcaaccugcugcugcaguacggcagcuucugcacccagcugaaccgggcccugaccggcaucgccguggagcaggacaagaacacccaggagguguucgcccaggugaagcagaucuacaagaccccucccaucaaggacuucggcggcuucaacuucagccagauccugcccgaccccagcaagcccagcaagcggagcuucaucgaggaccugcuguucaacaaggugacccuagccgacgccggcuucaucaagcaguacggcgacugccucggcgacauagccgcccgggaccugaucugcgcccagaaguucaacggccugaccgugcugccuccccugcugaccgacgagaugaucgcccaguacaccagcgcccuguuagccggaaccaucaccagcggcuggacuuucggcgcuggagccgcucugcagauccccuucgccaugcagauggccuaccgguucaacggcaucggcgugacccagaacgugcuguacgagaaccagaagcugaucgccaaccaguucaacagcgccaucggcaagauccaggacagccugagcagcaccgcuagcgcccugggcaagcugcaggacguggugaaccagaacgcccaggcccugaacacccuggugaagcagcugagcagcaacuucggcgccaucagcagcgugcugaacgacauccugagccggcuggacccucccgaggccgaggugcagaucgaccggcugaucacuggccggcugcagagccugcagaccuacgugacccagcagcugauccgggccgccgagauucgggccagcgccaaccuggccgccaccaagaugagcgagugcgugcugggccagagcaagcggguggacuucugcggcaagggcuaccaccugaugagcuuuccccagagcgcaccccacggagugguguuccugcacgugaccuacgugcccgcccaggagaagaacuucaccaccgccccagccaucugccacgacggcaaggcccacuuuccccgggagggcguguucgugagcaacggcacccacugguucgugacccagcggaacuucuacgagccccagaucaucaccaccgacaacaccuucgugagcggcaacugcgacguggugaucggcaucgugaacaacaccguguacgauccccugcagcccgagcuggacagcuucaaggaggagcuggacaaguacuucaagaaucacaccagccccgacguggaccugggcgacaucagcggcaucaacgccagcguggugaacauccagaaggagaucgaucggcugaacgagguggccaagaaccugaacgagagccugaucgaccugcaggagcugggcaaguacgagcaguacaucaaguggcccugguacaucuggcugggcuucaucgccggccugaucgccaucgugauggugaccaucaugcugugcugcaugaccagcugcugcagcugccugaagggcuguugcagcugcggcagcugcugcaaguucgacgaggacgacagcgagcccgugcugaagggcgugaagcugcacuacaccugaggacuagucccuguucccagagcccacuuuuuuuucuuuuuuugaaauaaaauagccugucuuucagaucuaaaaaaaaaaaaaaaaaaaaaaaaaaaaaaaaaaaaaaaaaaaaaaaaaaaaaaaaaaaaaaaaaaaaaaaaaaaaaaaaaaaaaaaaaaaaaaaaaaaa

SEQ ID NO: 25102 - RNA, 4167 nt, Artificial Sequence
  SARS-CoV-2/Wuhan/WIV05/2019__EPI_ISL_402128 spike protein mRNA gc (1-1273)(K986P_V987P_D614G_M1229I)
aggagagggcgcuuggcuugcaaggacccugagcugcggcauugaagcacacccaacccaacucgacugaagucagccucacugaaccggaucugagaaucuucucucucugggcuugccagggcucuccgaaccuagcuagcauccucuucaauuccaacuagaaagcuuaccauguucguguuccuggugcugcugccccuggugagcagccagugcgugaaccugaccacccggacccagcugccaccagccuacaccaacagcuucacccggggcgucuacuaccccgacaagguguuccggagcagcguccugcacagcacccaggaccuguuccugcccuucuucagcaacgugaccugguuccacgccauccacgugagcggcaccaacggcaccaagcgguucgacaaccccgugcugcccuucaacgacggcguguacuucgccagcaccgagaagagcaacaucauccggggcuggaucuucggcaccacccuggacagcaagacccagagccugcugaucgugaauaacgccaccaacguggugaucaaggugugcgaguuccaguucugcaacgaccccuuccugggcguguacuaccacaagaacaacaagagcuggauggagagcgaguuccggguguacagcagcgccaacaacugcaccuucgaguacgugagccagcccuuccugauggaccuggagggcaagcagggcaacuucaagaaccugcgggaguucguguucaagaacaucgacggcuacuucaagaucuacagcaagcacaccccaaucaaccuggugcgggaucugccccagggcuucucagcccuggagccccugguggaccugcccaucggcaucaacaucacccgguuccagacccugcuggcccugcaccggagcuaccugaccccaggcgacagcagcagcggguggacagcaggcgcggcugcuuacuacgugggcuaccugcagccccggaccuuccugcugaaguacaacgagaacggcaccaucaccgacgccguggacugcgcccuggacccucugagcgagaccaagugcacccugaagagcuucaccguggagaagggcaucuaccagaccagcaacuuccgggugcagcccaccgagagcaucgugcgguuccccaacaucaccaaccugugccccuucggcgagguguucaacgccacccgguucgccagcguguacgccuggaaccggaagcggaucagcaacugcguggccgacuacagcgugcuguacaacagcgccagcuucagcaccuucaagugcuacggcgugagccccaccaagcugaacgaccugugcuucaccaacguguacgccgacagcuucgugauccguggcgacgaggugcggcagaucgcacccggccagacaggcaagaucgccgacuacaacuacaagcugcccgacgacuucaccggcugcgugaucgccuggaacagcaacaaccucgacagcaaggugggcggcaacuacaacuaccuguaccggcuguuccggaagagcaaccugaagcccuucgagcgggacaucagcaccgagaucuaccaagccggcuccaccccuugcaacggcguggagggcuucaacugcuacuucccucugcagagcuacggcuuccagcccaccaacggcgugggcuaccagcccuaccgggugguggugcugagcuucgagcugcugcacgccccagccaccguguguggccccaagaagagcaccaaccuggugaagaacaagugcgugaacuucaacuucaacggccuuaccggcaccggcgugcugaccgagagcaacaagaaauuccugcccuuucagcaguucggccgggacaucgccgacaccaccgacgcugugcgggauccccagacccuggagauccuggacaucaccccuugcagcuucggcggcgugagcgugaucaccccaggcaccaacaccagcaaccagguggccgugcuguaccagggcgugaacugcaccgaggugcccguggccauccacgccgaccagcugacacccaccuggcgggucuacagcaccggcagcaacguguuccagacccgggccgguugccugaucggcgccgagcacgugaacaacagcuacgagugcgacauccccaucggcgccggcaucugugccagcuaccagacccagaccaauucaccccggagggcaaggagcguggccagccagagcaucaucgccuacaccaugagccugggcgccgagaacagcguggccuacagcaacaacagcaucgccauccccaccaacuucaccaucagcgugaccaccgagauucugcccgugagcaugaccaagaccagcguggacugcaccauguacaucugcggcgacagcaccgagugcagcaaccugcugcugcaguacggcagcuucugcacccagcugaaccgggcccugaccggcaucgccguggagcaggacaagaacacccaggagguguucgcccaggugaagcagaucuacaagaccccucccaucaaggacuucggcggcuucaacuucagccagauccugcccgaccccagcaagcccagcaagcggagcuucaucgaggaccugcuguucaacaaggugacccuagccgacgccggcuucaucaagcaguacggcgacugccucggcgacauagccgcccgggaccugaucugcgcccagaaguucaacggccugaccgugcugccuccccugcugaccgacgagaugaucgcccaguacaccagcgcccuguuagccggaaccaucaccagcggcuggacuuucggcgcuggagccgcucugcagauccccuucgccaugcagauggccuaccgguucaacggcaucggcgugacccagaacgugcuguacgagaaccagaagcugaucgccaaccaguucaacagcgccaucggcaagauccaggacagccugagcagcaccgcuagcgcccugggcaagcugcaggacguggugaaccagaacgcccaggcccugaacacccuggugaagcagcugagcagcaacuucggcgccaucagcagcgugcugaacgacauccugagccggcuggacccucccgaggccgaggugcagaucgaccggcugaucacuggccggcugcagagccugcagaccuacgugacccagcagcugauccgggccgccgagauucgggccagcgccaaccuggccgccaccaagaugagcgagugcgugcugggccagagcaagcggguggacuucugcggcaagggcuaccaccugaugagcuuuccccagagcgcaccccacggagugguguuccugcacgugaccuacgugcccgcccaggagaagaacuucaccaccgccccagccaucugccacgacggcaaggcccacuuuccccgggagggcguguucgugagcaacggcacccacugguucgugacccagcggaacuucuacgagccccagaucaucaccaccgacaacaccuucgugagcggcaacugcgacguggugaucggcaucgugaacaacaccguguacgauccccugcagcccgagcuggacagcuucaaggaggagcuggacaaguacuucaagaaucacaccagccccgacguggaccugggcgacaucagcggcaucaacgccagcguggugaacauccagaaggagaucgaucggcugaacgagguggccaagaaccugaacgagagccugaucgaccugcaggagcugggcaaguacgagcaguacaucaaguggcccugguacaucuggcugggcuucaucgccggccugaucgccaucgugaucgugaccaucaugcugugcugcaugaccagcugcugcagcugccugaagggcuguugcagcugcggcagcugcugcaaguucgacgaggacgacagcgagcccgugcugaagggcgugaagcugcacuacaccugaggacuagucccuguucccagagcccacuuuuuuuucuuuuuuugaaauaaaauagccugucuuucagaucuaaaaaaaaaaaaaaaaaaaaaaaaaaaaaaaaaaaaaaaaaaaaaaaaaaaaaaaaaaaaaaaaaaaaaaaaaaaaaaaaaaaaaaaaaaaaaaaaaaaa

SEQ ID NO: 25103 - RNA, 4161 nt, Artificial Sequence
  SARS-CoV-2/Wuhan/WIV05/2019__EPI_ISL_402128 spike protein mRNA gc (1-1273)(K986P_V987P_H69del_V70del_A222V_Y453F_S477N_D614G_I692V)
aggagagggcgcuuggcuugcaaggacccugagcugcggcauugaagcacacccaacccaacucgacugaagucagccucacugaaccggaucugagaaucuucucucucugggcuugccagggcucuccgaaccuagcuagcauccucuucaauuccaacuagaaagcuuaccauguucguguuccuggugcugcugccccuggugagcagccagugcgugaaccugaccacccggacccagcugccaccagccuacaccaacagcuucacccggggcgucuacuaccccgacaagguguuccggagcagcguccugcacagcacccaggaccuguuccugcccuucuucagcaacgugaccugguuccacgccaucagcggcaccaacggcaccaagcgguucgacaaccccgugcugcccuucaacgacggcguguacuucgccagcaccgagaagagcaacaucauccggggcuggaucuucggcaccacccuggacagcaagacccagagccugcugaucgugaauaacgccaccaacguggugaucaaggugugcgaguuccaguucugcaacgaccccuuccugggcguguacuaccacaagaacaacaagagcuggauggagagcgaguuccggguguacagcagcgccaacaacugcaccuucgaguacgugagccagcccuuccugauggaccuggagggcaagcagggcaacuucaagaaccugcgggaguucguguucaagaacaucgacggcuacuucaagaucuacagcaagcacaccccaaucaaccuggugcgggaucugccccagggcuucucagugcuggagccccugguggaccugcccaucggcaucaacaucacccgguuccagacccugcuggcccugcaccggagcuaccugaccccaggcgacagcagcagcggguggacagcaggcgcggcugcuuacuacgugggcuaccugcagccccggaccuuccugcugaaguacaacgagaacggcaccaucaccgacgccguggacugcgcccuggacccucugagcgagaccaagugcacccugaagagcuucaccguggagaagggcaucuaccagaccagcaacuuccgggugcagcccaccgagagcaucgugcgguuccccaacaucaccaaccugugccccuucggcgagguguucaacgccacccgguucgccagcguguacgccuggaaccggaagcggaucagcaacugcguggccgacuacagcgugcuguacaacagcgccagcuucagcaccuucaagugcuacggcgugagccccaccaagcugaacgaccugugcuucaccaacguguacgccgacagcuucgugauccguggcgacgaggugcggcagaucgcacccggccagacaggcaagaucgccgacuacaacuacaagcugcccgacgacuucaccggcugcgugaucgccuggaacagcaacaaccucgacagcaaggugggcggcaacuacaacuaccuguuccggcuguuccggaagagcaaccugaagcccuucgagcgggacaucagcaccgagaucuaccaagccggcaacaccccuugcaacggcguggagggcuucaacugcuacuucccucugcagagcuacggcuuccagcccaccaacggcgugggcuaccagcccuaccgggugguggugcugagcuucgagcugcugcacgccccagccaccguguguggccccaagaagagcaccaaccuggugaagaacaagugcgugaacuucaacuucaacggccuuaccggcaccggcgugcugaccgagagcaacaagaaauuccugcccuuucagcaguucggccgggacaucgccgacaccaccgacgcugugcgggauccccagacccuggagauccuggacaucaccccuugcagcuucggcggcgugagcgugaucaccccaggcaccaacaccagcaaccagguggccgugcuguaccagggcgugaacugcaccgaggugcccguggccauccacgccgaccagcugacacccaccuggcgggucuacagcaccggcagcaacguguuccagacccgggccgguugccugaucggcgccgagcacgugaacaacagcuacgagugcgacauccccaucggcgccggcaucugugccagcuaccagacccagaccaauucaccccggagggcaaggagcguggccagccagagcgugaucgccuacaccaugagccugggcgccgagaacagcguggccuacagcaacaacagcaucgccauccccaccaacuucaccaucagcgugaccaccgagauucugcccgugagcaugaccaagaccagcguggacugcaccauguacaucugcggcgacagcaccgagugcagcaaccugcugcugcaguacggcagcuucugcacccagcugaaccgggcccugaccggcaucgccguggagcaggacaagaacacccaggagguguucgcccaggugaagcagaucuacaagaccccucccaucaaggacuucggcggcuucaacuucagccagauccugcccgaccccagcaagcccagcaagcggagcuucaucgaggaccugcuguucaacaaggugacccuagccgacgccggcuucaucaagcaguacggcgacugccucggcgacauagccgcccgggaccugaucugcgcccagaaguucaacggccugaccgugcugccuccccugcugaccgacgagaugaucgcccaguacaccagcgcccuguuagccggaaccaucaccagcggcuggacuuucggcgcuggagccgcucugcagauccccuucgccaugcagauggccuaccgguucaacggcaucggcgugacccagaacgugcuguacgagaaccagaagcugaucgccaaccaguucaacagcgccaucggcaagauccaggacagccugagcagcaccgcuagcgcccugggcaagcugcaggacguggugaaccagaacgcccaggcccugaacacccuggugaagcagcugagcagcaacuucggcgccaucagcagcgugcugaacgacauccugagccggcuggacccucccgaggccgaggugcagaucgaccggcugaucacuggccggcugcagagccugcagaccuacgugacccagcagcugauccgggccgccgagauucgggccagcgccaaccuggccgccaccaagaugagcgagugcgugcugggccagagcaagcggguggacuucugcggcaagggcuaccaccugaugagcuuuccccagagcgcaccccacggagugguguuccugcacgugaccuacgugcccgcccaggagaagaacuucaccaccgccccagccaucugccacgacggcaaggcccacuuuccccgggagggcguguucgugagcaacggcacccacugguucgugacccagcggaacuucuacgagccccagaucaucaccaccgacaacaccuucgugagcggcaacugcgacguggugaucggcaucgugaacaacaccguguacgauccccugcagcccgagcuggacagcuucaaggaggagcuggacaaguacuucaagaaucacaccagccccgacguggaccugggcgacaucagcggcaucaacgccagcguggugaacauccagaaggagaucgaucggcugaacgagguggccaagaaccugaacgagagccugaucgaccugcaggagcugggcaaguacgagcaguacaucaaguggcccugguacaucuggcugggcuucaucgccggccugaucgccaucgugauggugaccaucaugcugugcugcaugaccagcugcugcagcugccugaagggcuguugcagcugcggcagcugcugcaaguucgacgaggacgacagcgagcccgugcugaagggcgugaagcugcacuacaccugaggacuagucccuguucccagagcccacuuuuuuuucuuuuuuugaaauaaaauagccugucuuucagaucuaaaaaaaaaaaaaaaaaaaaaaaaaaaaaaaaaaaaaaaaaaaaaaaaaaaaaaaaaaaaaaaaaaaaaaaaaaaaaaaaaaaaaaaaaaaaaaaaaaaa

SEQ ID NO: 25104 - RNA, 4161 nt, Artificial Sequence
  SARS-CoV-2/Wuhan/WIV05/2019__EPI_ISL_402128 spike protein mRNA gc (1-1273)(K986P_V987P_H69del_V70del_Y453F_D614G_I692V_M1229I)
aggagagggcgcuuggcuugcaaggacccugagcugcggcauugaagcacacccaacccaacucgacugaagucagccucacugaaccggaucugagaaucuucucucucugggcuugccagggcucuccgaaccuagcuagcauccucuucaauuccaacuagaaagcuuaccauguucguguuccuggugcugcugccccuggugagcagccagugcgugaaccugaccacccggacccagcugccaccagccuacaccaacagcuucacccggggcgucuacuaccccgacaagguguuccggagcagcguccugcacagcacccaggaccuguuccugcccuucuucagcaacgugaccugguuccacgccaucagcggcaccaacggcaccaagcgguucgacaaccccgugcugcccuucaacgacggcguguacuucgccagcaccgagaagagcaacaucauccggggcuggaucuucggcaccacccuggacagcaagacccagagccugcugaucgugaauaacgccaccaacguggugaucaaggugugcgaguuccaguucugcaacgaccccuuccugggcguguacuaccacaagaacaacaagagcuggauggagagcgaguuccggguguacagcagcgccaacaacugcaccuucgaguacgugagccagcccuuccugauggaccuggagggcaagcagggcaacuucaagaaccugcgggaguucguguucaagaacaucgacggcuacuucaagaucuacagcaagcacaccccaaucaaccuggugcgggaucugccccagggcuucucagcccuggagccccugguggaccugcccaucggcaucaacaucacccgguuccagacccugcuggcccugcaccggagcuaccugaccccaggcgacagcagcagcggguggacagcaggcgcggcugcuuacuacgugggcuaccugcagccccggaccuuccugcugaaguacaacgagaacggcaccaucaccgacgccguggacugcgcccuggacccucugagcgagaccaagugcacccugaagagcuucaccguggagaagggcaucuaccagaccagcaacuuccgggugcagcccaccgagagcaucgugcgguuccccaacaucaccaaccugugccccuucggcgagguguucaacgccacccgguucgccagcguguacgccuggaaccggaagcggaucagcaacugcguggccgacuacagcgugcuguacaacagcgccagcuucagcaccuucaagugcuacggcgugagccccaccaagcugaacgaccugugcuucaccaacguguacgccgacagcuucgugauccguggcgacgaggugcggcagaucgcacccggccagacaggcaagaucgccgacuacaacuacaagcugcccgacgacuucaccggcugcgugaucgccuggaacagcaacaaccucgacagcaaggugggcggcaacuacaacuaccuguuccggcuguuccggaagagcaaccugaagcccuucgagcgggacaucagcaccgagaucuaccaagccggcuccaccccuugcaacggcguggagggcuucaacugcuacuucccucugcagagcuacggcuuccagcccaccaacggcgugggcuaccagcccuaccgggugguggugcugagcuucgagcugcugcacgccccagccaccguguguggccccaagaagagcaccaaccuggugaagaacaagugcgugaacuucaacuucaacggccuuaccggcaccggcgugcugaccgagagcaacaagaaauuccugcccuuucagcaguucggccgggacaucgccgacaccaccgacgcugugcgggauccccagacccuggagauccuggacaucaccccuugcagcuucggcggcgugagcgugaucaccccaggcaccaacaccagcaaccagguggccgugcuguaccagggcgugaacugcaccgaggugcccguggccauccacgccgaccagcugacacccaccuggcgggucuacagcaccggcagcaacguguuccagacccgggccgguugccugaucggcgccgagcacgugaacaacagcuacgagugcgacauccccaucggcgccggcaucugugccagcuaccagacccagaccaauucaccccggagggcaaggagcguggccagccagagcgugaucgccuacaccaugagccugggcgccgagaacagcguggccuacagcaacaacagcaucgccauccccaccaacuucaccaucagcgugaccaccgagauucugcccgugagcaugaccaagaccagcguggacugcaccauguacaucugcggcgacagcaccgagugcagcaaccugcugcugcaguacggcagcuucugcacccagcugaaccgggcccugaccggcaucgccguggagcaggacaagaacacccaggagguguucgcccaggugaagcagaucuacaagaccccucccaucaaggacuucggcggcuucaacuucagccagauccugcccgaccccagcaagcccagcaagcggagcuucaucgaggaccugcuguucaacaaggugacccuagccgacgccggcuucaucaagcaguacggcgacugccucggcgacauagccgcccgggaccugaucugcgcccagaaguucaacggccugaccgugcugccuccccugcugaccgacgagaugaucgcccaguacaccagcgcccuguuagccggaaccaucaccagcggcuggacuuucggcgcuggagccgcucugcagauccccuucgccaugcagauggccuaccgguucaacggcaucggcgugacccagaacgugcuguacgagaaccagaagcugaucgccaaccaguucaacagcgccaucggcaagauccaggacagccugagcagcaccgcuagcgcccugggcaagcugcaggacguggugaaccagaacgcccaggcccugaacacccuggugaagcagcugagcagcaacuucggcgccaucagcagcgugcugaacgacauccugagccggcuggacccucccgaggccgaggugcagaucgaccggcugaucacuggccggcugcagagccugcagaccuacgugacccagcagcugauccgggccgccgagauucgggccagcgccaaccuggccgccaccaagaugagcgagugcgugcugggccagagcaagcggguggacuucugcggcaagggcuaccaccugaugagcuuuccccagagcgcaccccacggagugguguuccugcacgugaccuacgugcccgcccaggagaagaacuucaccaccgccccagccaucugccacgacggcaaggcccacuuuccccgggagggcguguucgugagcaacggcacccacugguucgugacccagcggaacuucuacgagccccagaucaucaccaccgacaacaccuucgugagcggcaacugcgacguggugaucggcaucgugaacaacaccguguacgauccccugcagcccgagcuggacagcuucaaggaggagcuggacaaguacuucaagaaucacaccagccccgacguggaccugggcgacaucagcggcaucaacgccagcguggugaacauccagaaggagaucgaucggcugaacgagguggccaagaaccugaacgagagccugaucgaccugcaggagcugggcaaguacgagcaguacaucaaguggcccugguacaucuggcugggcuucaucgccggccugaucgccaucgugaucgugaccaucaugcugugcugcaugaccagcugcugcagcugccugaagggcuguugcagcugcggcagcugcugcaaguucgacgaggacgacagcgagcccgugcugaagggcgugaagcugcacuacaccugaggacuagucccuguucccagagcccacuuuuuuuucuuuuuuugaaauaaaauagccugucuuucagaucuaaaaaaaaaaaaaaaaaaaaaaaaaaaaaaaaaaaaaaaaaaaaaaaaaaaaaaaaaaaaaaaaaaaaaaaaaaaaaaaaaaaaaaaaaaaaaaaaaaaa

SEQ ID NO: 25105 - RNA, 4158 nt, Artificial Sequence
  SARS-CoV-2/Wuhan/WIV05/2019__EPI_ISL_402128 spike protein mRNA gc (1-1273)(K986P_V987P_K986P_V987P_H69del_V70del_Y144del_N501Y_A570 D_D614G_P681H_T716I_S982A_D1118H)
aggagagggcgcuuggcuugcaaggacccugagcugcggcauugaagcacacccaacccaacucgacugaagucagccucacugaaccggaucugagaaucuucucucucugggcuugccagggcucuccgaaccuagcuagcauccucuucaauuccaacuagaaagcuuaccauguucguguuccuggugcugcugccccuggugagcagccagugcgugaaccugaccacccggacccagcugccaccagccuacaccaacagcuucacccggggcgucuacuaccccgacaagguguuccggagcagcguccugcacagcacccaggaccuguuccugcccuucuucagcaacgugaccugguuccacgccaucagcggcaccaacggcaccaagcgguucgacaaccccgugcugcccuucaacgacggcguguacuucgccagcaccgagaagagcaacaucauccggggcuggaucuucggcaccacccuggacagcaagacccagagccugcugaucgugaauaacgccaccaacguggugaucaaggugugcgaguuccaguucugcaacgaccccuuccugggcguguaccacaagaacaacaagagcuggauggagagcgaguuccggguguacagcagcgccaacaacugcaccuucgaguacgugagccagcccuuccugauggaccuggagggcaagcagggcaacuucaagaaccugcgggaguucguguucaagaacaucgacggcuacuucaagaucuacagcaagcacaccccaaucaaccuggugcgggaucugccccagggcuucucagcccuggagccccugguggaccugcccaucggcaucaacaucacccgguuccagacccugcuggcccugcaccggagcuaccugaccccaggcgacagcagcagcggguggacagcaggcgcggcugcuuacuacgugggcuaccugcagccccggaccuuccugcugaaguacaacgagaacggcaccaucaccgacgccguggacugcgcccuggacccucugagcgagaccaagugcacccugaagagcuucaccguggagaagggcaucuaccagaccagcaacuuccgggugcagcccaccgagagcaucgugcgguuccccaacaucaccaaccugugccccuucggcgagguguucaacgccacccgguucgccagcguguacgccuggaaccggaagcggaucagcaacugcguggccgacuacagcgugcuguacaacagcgccagcuucagcaccuucaagugcuacggcgugagccccaccaagcugaacgaccugugcuucaccaacguguacgccgacagcuucgugauccguggcgacgaggugcggcagaucgcacccggccagacaggcaagaucgccgacuacaacuacaagcugcccgacgacuucaccggcugcgugaucgccuggaacagcaacaaccucgacagcaaggugggcggcaacuacaacuaccuguaccggcuguuccggaagagcaaccugaagcccuucgagcgggacaucagcaccgagaucuaccaagccggcuccaccccuugcaacggcguggagggcuucaacugcuacuucccucugcagagcuacggcuuccagcccaccuacggcgugggcuaccagcccuaccgggugguggugcugagcuucgagcugcugcacgccccagccaccguguguggccccaagaagagcaccaaccuggugaagaacaagugcgugaacuucaacuucaacggccuuaccggcaccggcgugcugaccgagagcaacaagaaauuccugcccuuucagcaguucggccgggacaucgacgacaccaccgacgcugugcgggauccccagacccuggagauccuggacaucaccccuugcagcuucggcggcgugagcgugaucaccccaggcaccaacaccagcaaccagguggccgugcuguaccagggcgugaacugcaccgaggugcccguggccauccacgccgaccagcugacacccaccuggcgggucuacagcaccggcagcaacguguuccagacccgggccgguugccugaucggcgccgagcacgugaacaacagcuacgagugcgacauccccaucggcgccggcaucugugccagcuaccagacccagaccaauucacaccggagggcaaggagcguggccagccagagcaucaucgccuacaccaugagccugggcgccgagaacagcguggccuacagcaacaacagcaucgccauccccaucaacuucaccaucagcgugaccaccgagauucugcccgugagcaugaccaagaccagcguggacugcaccauguacaucugcggcgacagcaccgagugcagcaaccugcugcugcaguacggcagcuucugcacccagcugaaccgggcccugaccggcaucgccguggagcaggacaagaacacccaggagguguucgcccaggugaagcagaucuacaagaccccucccaucaaggacuucggcggcuucaacuucagccagauccugcccgaccccagcaagcccagcaagcggagcuucaucgaggaccugcuguucaacaaggugacccuagccgacgccggcuucaucaagcaguacggcgacugccucggcgacauagccgcccgggaccugaucugcgcccagaaguucaacggccugaccgugcugccuccccugcugaccgacgagaugaucgcccaguacaccagcgcccuguuagccggaaccaucaccagcggcuggacuuucggcgcuggagccgcucugcagauccccuucgccaugcagauggccuaccgguucaacggcaucggcgugacccagaacgugcuguacgagaaccagaagcugaucgccaaccaguucaacagcgccaucggcaagauccaggacagccugagcagcaccgcuagcgcccugggcaagcugcaggacguggugaaccagaacgcccaggcccugaacacccuggugaagcagcugagcagcaacuucggcgccaucagcagcgugcugaacgacauccuggcccggcuggacccucccgaggccgaggugcagaucgaccggcugaucacuggccggcugcagagccugcagaccuacgugacccagcagcugauccgggccgccgagauucgggccagcgccaaccuggccgccaccaagaugagcgagugcgugcugggccagagcaagcggguggacuucugcggcaagggcuaccaccugaugagcuuuccccagagcgcaccccacggagugguguuccugcacgugaccuacgugcccgcccaggagaagaacuucaccaccgccccagccaucugccacgacggcaaggcccacuuuccccgggagggcguguucgugagcaacggcacccacugguucgugacccagcggaacuucuacgagccccagaucaucaccacccacaacaccuucgugagcggcaacugcgacguggugaucggcaucgugaacaacaccguguacgauccccugcagcccgagcuggacagcuucaaggaggagcuggacaaguacuucaagaaucacaccagccccgacguggaccugggcgacaucagcggcaucaacgccagcguggugaacauccagaaggagaucgaucggcugaacgagguggccaagaaccugaacgagagccugaucgaccugcaggagcugggcaaguacgagcaguacaucaaguggcccugguacaucuggcugggcuucaucgccggccugaucgccaucgugauggugaccaucaugcugugcugcaugaccagcugcugcagcugccugaagggcuguugcagcugcggcagcugcugcaaguucgacgaggacgacagcgagcccgugcugaagggcgugaagcugcacuacaccugaggacuagucccuguucccagagcccacuuuuuuuucuuuuuuugaaauaaaauagccugucuuucagaucuaaaaaaaaaaaaaaaaaaaaaaaaaaaaaaaaaaaaaaaaaaaaaaaaaaaaaaaaaaaaaaaaaaaaaaaaaaaaaaaaaaaaaaaaaaaaaaaaaaaa

SEQ ID NO: 25106 - RNA, 4167 nt, Artificial Sequence
  SARS-CoV-2/Wuhan/WIV05/2019__EPI_ISL_402128 spike protein mRNA gc (1-1273)(K986P_V987P_K986P_V987P_K417N_E484K_N501Y_D614G)
aggagagggcgcuuggcuugcaaggacccugagcugcggcauugaagcacacccaacccaacucgacugaagucagccucacugaaccggaucugagaaucuucucucucugggcuugccagggcucuccgaaccuagcuagcauccucuucaauuccaacuagaaagcuuaccauguucguguuccuggugcugcugccccuggugagcagccagugcgugaaccugaccacccggacccagcugccaccagccuacaccaacagcuucacccggggcgucuacuaccccgacaagguguuccggagcagcguccugcacagcacccaggaccuguuccugcccuucuucagcaacgugaccugguuccacgccauccacgugagcggcaccaacggcaccaagcgguucgacaaccccgugcugcccuucaacgacggcguguacuucgccagcaccgagaagagcaacaucauccggggcuggaucuucggcaccacccuggacagcaagacccagagccugcugaucgugaauaacgccaccaacguggugaucaaggugugcgaguuccaguucugcaacgaccccuuccugggcguguacuaccacaagaacaacaagagcuggauggagagcgaguuccggguguacagcagcgccaacaacugcaccuucgaguacgugagccagcccuuccugauggaccuggagggcaagcagggcaacuucaagaaccugcgggaguucguguucaagaacaucgacggcuacuucaagaucuacagcaagcacaccccaaucaaccuggugcgggaucugccccagggcuucucagcccuggagccccugguggaccugcccaucggcaucaacaucacccgguuccagacccugcuggcccugcaccggagcuaccugaccccaggcgacagcagcagcggguggacagcaggcgcggcugcuuacuacgugggcuaccugcagccccggaccuuccugcugaaguacaacgagaacggcaccaucaccgacgccguggacugcgcccuggacccucugagcgagaccaagugcacccugaagagcuucaccguggagaagggcaucuaccagaccagcaacuuccgggugcagcccaccgagagcaucgugcgguuccccaacaucaccaaccugugccccuucggcgagguguucaacgccacccgguucgccagcguguacgccuggaaccggaagcggaucagcaacugcguggccgacuacagcgugcuguacaacagcgccagcuucagcaccuucaagugcuacggcgugagccccaccaagcugaacgaccugugcuucaccaacguguacgccgacagcuucgugauccguggcgacgaggugcggcagaucgcacccggccagacaggcaacaucgccgacuacaacuacaagcugcccgacgacuucaccggcugcgugaucgccuggaacagcaacaaccucgacagcaaggugggcggcaacuacaacuaccuguaccggcuguuccggaagagcaaccugaagcccuucgagcgggacaucagcaccgagaucuaccaagccggcuccaccccuugcaacggcgugaagggcuucaacugcuacuucccucugcagagcuacggcuuccagcccaccuacggcgugggcuaccagcccuaccgggugguggugcugagcuucgagcugcugcacgccccagccaccguguguggccccaagaagagcaccaaccuggugaagaacaagugcgugaacuucaacuucaacggccuuaccggcaccggcgugcugaccgagagcaacaagaaauuccugcccuuucagcaguucggccgggacaucgccgacaccaccgacgcugugcgggauccccagacccuggagauccuggacaucaccccuugcagcuucggcggcgugagcgugaucaccccaggcaccaacaccagcaaccagguggccgugcuguaccagggcgugaacugcaccgaggugcccguggccauccacgccgaccagcugacacccaccuggcgggucuacagcaccggcagcaacguguuccagacccgggccgguugccugaucggcgccgagcacgugaacaacagcuacgagugcgacauccccaucggcgccggcaucugugccagcuaccagacccagaccaauucaccccggagggcaaggagcguggccagccagagcaucaucgccuacaccaugagccugggcgccgagaacagcguggccuacagcaacaacagcaucgccauccccaccaacuucaccaucagcgugaccaccgagauucugcccgugagcaugaccaagaccagcguggacugcaccauguacaucugcggcgacagcaccgagugcagcaaccugcugcugcaguacggcagcuucugcacccagcugaaccgggcccugaccggcaucgccguggagcaggacaagaacacccaggagguguucgcccaggugaagcagaucuacaagaccccucccaucaaggacuucggcggcuucaacuucagccagauccugcccgaccccagcaagcccagcaagcggagcuucaucgaggaccugcuguucaacaaggugacccuagccgacgccggcuucaucaagcaguacggcgacugccucggcgacauagccgcccgggaccugaucugcgcccagaaguucaacggccugaccgugcugccuccccugcugaccgacgagaugaucgcccaguacaccagcgcccuguuagccggaaccaucaccagcggcuggacuuucggcgcuggagccgcucugcagauccccuucgccaugcagauggccuaccgguucaacggcaucggcgugacccagaacgugcuguacgagaaccagaagcugaucgccaaccaguucaacagcgccaucggcaagauccaggacagccugagcagcaccgcuagcgcccugggcaagcugcaggacguggugaaccagaacgcccaggcccugaacacccuggugaagcagcugagcagcaacuucggcgccaucagcagcgugcugaacgacauccugagccggcuggacccucccgaggccgaggugcagaucgaccggcugaucacuggccggcugcagagccugcagaccuacgugacccagcagcugauccgggccgccgagauucgggccagcgccaaccuggccgccaccaagaugagcgagugcgugcugggccagagcaagcggguggacuucugcggcaagggcuaccaccugaugagcuuuccccagagcgcaccccacggagugguguuccugcacgugaccuacgugcccgcccaggagaagaacuucaccaccgccccagccaucugccacgacggcaaggcccacuuuccccgggagggcguguucgugagcaacggcacccacugguucgugacccagcggaacuucuacgagccccagaucaucaccaccgacaacaccuucgugagcggcaacugcgacguggugaucggcaucgugaacaacaccguguacgauccccugcagcccgagcuggacagcuucaaggaggagcuggacaaguacuucaagaaucacaccagccccgacguggaccugggcgacaucagcggcaucaacgccagcguggugaacauccagaaggagaucgaucggcugaacgagguggccaagaaccugaacgagagccugaucgaccugcaggagcugggcaaguacgagcaguacaucaaguggcccugguacaucuggcugggcuucaucgccggccugaucgccaucgugauggugaccaucaugcugugcugcaugaccagcugcugcagcugccugaagggcuguugcagcugcggcagcugcugcaaguucgacgaggacgacagcgagcccgugcugaagggcgugaagcugcacuacaccugaggacuagucccuguucccagagcccacuuuuuuuucuuuuuuugaaauaaaauagccugucuuucagaucuaaaaaaaaaaaaaaaaaaaaaaaaaaaaaaaaaaaaaaaaaaaaaaaaaaaaaaaaaaaaaaaaaaaaaaaaaaaaaaaaaaaaaaaaaaaaaaaaaaaa

SEQ ID NO: 25107 - RNA, 4158 nt, Artificial Sequence
  SARS-CoV-2/Wuhan/WIV05/2019__EPI_ISL_402128 spike protein mRNA gc (1-1273)(K986P_V987P_K986P_V987P_L18F_D80A_D215G_L242del_A243del_ L244del_R246I_K417N_E484K_N501Y_D614G_A701V)
aggagagggcgcuuggcuugcaaggacccugagcugcggcauugaagcacacccaacccaacucgacugaagucagccucacugaaccggaucugagaaucuucucucucugggcuugccagggcucuccgaaccuagcuagcauccucuucaauuccaacuagaaagcuuaccauguucguguuccuggugcugcugccccuggugagcagccagugcgugaacuucaccacccggacccagcugccaccagccuacaccaacagcuucacccggggcgucuacuaccccgacaagguguuccggagcagcguccugcacagcacccaggaccuguuccugcccuucuucagcaacgugaccugguuccacgccauccacgugagcggcaccaacggcaccaagcgguucgccaaccccgugcugcccuucaacgacggcguguacuucgccagcaccgagaagagcaacaucauccggggcuggaucuucggcaccacccuggacagcaagacccagagccugcugaucgugaauaacgccaccaacguggugaucaaggugugcgaguuccaguucugcaacgaccccuuccugggcguguacuaccacaagaacaacaagagcuggauggagagcgaguuccggguguacagcagcgccaacaacugcaccuucgaguacgugagccagcccuuccugauggaccuggagggcaagcagggcaacuucaagaaccugcgggaguucguguucaagaacaucgacggcuacuucaagaucuacagcaagcacaccccaaucaaccuggugcggggccugccccagggcuucucagcccuggagccccugguggaccugcccaucggcaucaacaucacccgguuccagacccugcacaucagcuaccugaccccaggcgacagcagcagcggguggacagcaggcgcggcugcuuacuacgugggcuaccugcagccccggaccuuccugcugaaguacaacgagaacggcaccaucaccgacgccguggacugcgcccuggacccucugagcgagaccaagugcacccugaagagcuucaccguggagaagggcaucuaccagaccagcaacuuccgggugcagcccaccgagagcaucgugcgguuccccaacaucaccaaccugugccccuucggcgagguguucaacgccacccgguucgccagcguguacgccuggaaccggaagcggaucagcaacugcguggccgacuacagcgugcuguacaacagcgccagcuucagcaccuucaagugcuacggcgugagccccaccaagcugaacgaccugugcuucaccaacguguacgccgacagcuucgugauccguggcgacgaggugcggcagaucgcacccggccagacaggcaacaucgccgacuacaacuacaagcugcccgacgacuucaccggcugcgugaucgccuggaacagcaacaaccucgacagcaaggugggcggcaacuacaacuaccuguaccggcuguuccggaagagcaaccugaagcccuucgagcgggacaucagcaccgagaucuaccaagccggcuccaccccuugcaacggcgugaagggcuucaacugcuacuucccucugcagagcuacggcuuccagcccaccuacggcgugggcuaccagcccuaccgggugguggugcugagcuucgagcugcugcacgccccagccaccguguguggccccaagaagagcaccaaccuggugaagaacaagugcgugaacuucaacuucaacggccuuaccggcaccggcgugcugaccgagagcaacaagaaauuccugcccuuucagcaguucggccgggacaucgccgacaccaccgacgcugugcgggauccccagacccuggagauccuggacaucaccccuugcagcuucggcggcgugagcgugaucaccccaggcaccaacaccagcaaccagguggccgugcuguaccagggcgugaacugcaccgaggugcccguggccauccacgccgaccagcugacacccaccuggcgggucuacagcaccggcagcaacguguuccagacccgggccgguugccugaucggcgccgagcacgugaacaacagcuacgagugcgacauccccaucggcgccggcaucugugccagcuaccagacccagaccaauucaccccggagggcaaggagcguggccagccagagcaucaucgccuacaccaugagccugggcguggagaacagcguggccuacagcaacaacagcaucgccauccccaccaacuucaccaucagcgugaccaccgagauucugcccgugagcaugaccaagaccagcguggacugcaccauguacaucugcggcgacagcaccgagugcagcaaccugcugcugcaguacggcagcuucugcacccagcugaaccgggcccugaccggcaucgccguggagcaggacaagaacacccaggagguguucgcccaggugaagcagaucuacaagaccccucccaucaaggacuucggcggcuucaacuucagccagauccugcccgaccccagcaagcccagcaagcggagcuucaucgaggaccugcuguucaacaaggugacccuagccgacgccggcuucaucaagcaguacggcgacugccucggcgacauagccgcccgggaccugaucugcgcccagaaguucaacggccugaccgugcugccuccccugcugaccgacgagaugaucgcccaguacaccagcgcccuguuagccggaaccaucaccagcggcuggacuuucggcgcuggagccgcucugcagauccccuucgccaugcagauggccuaccgguucaacggcaucggcgugacccagaacgugcuguacgagaaccagaagcugaucgccaaccaguucaacagcgccaucggcaagauccaggacagccugagcagcaccgcuagcgcccugggcaagcugcaggacguggugaaccagaacgcccaggcccugaacacccuggugaagcagcugagcagcaacuucggcgccaucagcagcgugcugaacgacauccugagccggcuggacccucccgaggccgaggugcagaucgaccggcugaucacuggccggcugcagagccugcagaccuacgugacccagcagcugauccgggccgccgagauucgggccagcgccaaccuggccgccaccaagaugagcgagugcgugcugggccagagcaagcggguggacuucugcggcaagggcuaccaccugaugagcuuuccccagagcgcaccccacggagugguguuccugcacgugaccuacgugcccgcccaggagaagaacuucaccaccgccccagccaucugccacgacggcaaggcccacuuuccccgggagggcguguucgugagcaacggcacccacugguucgugacccagcggaacuucuacgagccccagaucaucaccaccgacaacaccuucgugagcggcaacugcgacguggugaucggcaucgugaacaacaccguguacgauccccugcagcccgagcuggacagcuucaaggaggagcuggacaaguacuucaagaaucacaccagccccgacguggaccugggcgacaucagcggcaucaacgccagcguggugaacauccagaaggagaucgaucggcugaacgagguggccaagaaccugaacgagagccugaucgaccugcaggagcugggcaaguacgagcaguacaucaaguggcccugguacaucuggcugggcuucaucgccggccugaucgccaucgugauggugaccaucaugcugugcugcaugaccagcugcugcagcugccugaagggcuguugcagcugcggcagcugcugcaaguucgacgaggacgacagcgagcccgugcugaagggcgugaagcugcacuacaccugaggacuagucccuguucccagagcccacuuuuuuuucuuuuuuugaaauaaaauagccugucuuucagaucuaaaaaaaaaaaaaaaaaaaaaaaaaaaaaaaaaaaaaaaaaaaaaaaaaaaaaaaaaaaaaaaaaaaaaaaaaaaaaaaaaaaaaaaaaaaaaaaaaaaa

SEQ ID NO: 25108 - RNA, 4167 nt, Artificial Sequence
  SARS-CoV-2/Wuhan/WIV05/2019__EPI_ISL_402128 spike protein mRNA gc (1-1273)(K986P_V987P_K986P_V987P_E484K_D614G)
aggagagggcgcuuggcuugcaaggacccugagcugcggcauugaagcacacccaacccaacucgacugaagucagccucacugaaccggaucugagaaucuucucucucugggcuugccagggcucuccgaaccuagcuagcauccucuucaauuccaacuagaaagcuuaccauguucguguuccuggugcugcugccccuggugagcagccagugcgugaaccugaccacccggacccagcugccaccagccuacaccaacagcuucacccggggcgucuacuaccccgacaagguguuccggagcagcguccugcacagcacccaggaccuguuccugcccuucuucagcaacgugaccugguuccacgccauccacgugagcggcaccaacggcaccaagcgguucgacaaccccgugcugcccuucaacgacggcguguacuucgccagcaccgagaagagcaacaucauccggggcuggaucuucggcaccacccuggacagcaagacccagagccugcugaucgugaauaacgccaccaacguggugaucaaggugugcgaguuccaguucugcaacgaccccuuccugggcguguacuaccacaagaacaacaagagcuggauggagagcgaguuccggguguacagcagcgccaacaacugcaccuucgaguacgugagccagcccuuccugauggaccuggagggcaagcagggcaacuucaagaaccugcgggaguucguguucaagaacaucgacggcuacuucaagaucuacagcaagcacaccccaaucaaccuggugcgggaucugccccagggcuucucagcccuggagccccugguggaccugcccaucggcaucaacaucacccgguuccagacccugcuggcccugcaccggagcuaccugaccccaggcgacagcagcagcggguggacagcaggcgcggcugcuuacuacgugggcuaccugcagccccggaccuuccugcugaaguacaacgagaacggcaccaucaccgacgccguggacugcgcccuggacccucugagcgagaccaagugcacccugaagagcuucaccguggagaagggcaucuaccagaccagcaacuuccgggugcagcccaccgagagcaucgugcgguuccccaacaucaccaaccugugccccuucggcgagguguucaacgccacccgguucgccagcguguacgccuggaaccggaagcggaucagcaacugcguggccgacuacagcgugcuguacaacagcgccagcuucagcaccuucaagugcuacggcgugagccccaccaagcugaacgaccugugcuucaccaacguguacgccgacagcuucgugauccguggcgacgaggugcggcagaucgcacccggccagacaggcaagaucgccgacuacaacuacaagcugcccgacgacuucaccggcugcgugaucgccuggaacagcaacaaccucgacagcaaggugggcggcaacuacaacuaccuguaccggcuguuccggaagagcaaccugaagcccuucgagcgggacaucagcaccgagaucuaccaagccggcuccaccccuugcaacggcgugaagggcuucaacugcuacuucccucugcagagcuacggcuuccagcccaccaacggcgugggcuaccagcccuaccgggugguggugcugagcuucgagcugcugcacgccccagccaccguguguggccccaagaagagcaccaaccuggugaagaacaagugcgugaacuucaacuucaacggccuuaccggcaccggcgugcugaccgagagcaacaagaaauuccugcccuuucagcaguucggccgggacaucgccgacaccaccgacgcugugcgggauccccagacccuggagauccuggacaucaccccuugcagcuucggcggcgugagcgugaucaccccaggcaccaacaccagcaaccagguggccgugcuguaccagggcgugaacugcaccgaggugcccguggccauccacgccgaccagcugacacccaccuggcgggucuacagcaccggcagcaacguguuccagacccgggccgguugccugaucggcgccgagcacgugaacaacagcuacgagugcgacauccccaucggcgccggcaucugugccagcuaccagacccagaccaauucaccccggagggcaaggagcguggccagccagagcaucaucgccuacaccaugagccugggcgccgagaacagcguggccuacagcaacaacagcaucgccauccccaccaacuucaccaucagcgugaccaccgagauucugcccgugagcaugaccaagaccagcguggacugcaccauguacaucugcggcgacagcaccgagugcagcaaccugcugcugcaguacggcagcuucugcacccagcugaaccgggcccugaccggcaucgccguggagcaggacaagaacacccaggagguguucgcccaggugaagcagaucuacaagaccccucccaucaaggacuucggcggcuucaacuucagccagauccugcccgaccccagcaagcccagcaagcggagcuucaucgaggaccugcuguucaacaaggugacccuagccgacgccggcuucaucaagcaguacggcgacugccucggcgacauagccgcccgggaccugaucugcgcccagaaguucaacggccugaccgugcugccuccccugcugaccgacgagaugaucgcccaguacaccagcgcccuguuagccggaaccaucaccagcggcuggacuuucggcgcuggagccgcucugcagauccccuucgccaugcagauggccuaccgguucaacggcaucggcgugacccagaacgugcuguacgagaaccagaagcugaucgccaaccaguucaacagcgccaucggcaagauccaggacagccugagcagcaccgcuagcgcccugggcaagcugcaggacguggugaaccagaacgcccaggcccugaacacccuggugaagcagcugagcagcaacuucggcgccaucagcagcgugcugaacgacauccugagccggcuggacccucccgaggccgaggugcagaucgaccggcugaucacuggccggcugcagagccugcagaccuacgugacccagcagcugauccgggccgccgagauucgggccagcgccaaccuggccgccaccaagaugagcgagugcgugcugggccagagcaagcggguggacuucugcggcaagggcuaccaccugaugagcuuuccccagagcgcaccccacggagugguguuccugcacgugaccuacgugcccgcccaggagaagaacuucaccaccgccccagccaucugccacgacggcaaggcccacuuuccccgggagggcguguucgugagcaacggcacccacugguucgugacccagcggaacuucuacgagccccagaucaucaccaccgacaacaccuucgugagcggcaacugcgacguggugaucggcaucgugaacaacaccguguacgauccccugcagcccgagcuggacagcuucaaggaggagcuggacaaguacuucaagaaucacaccagccccgacguggaccugggcgacaucagcggcaucaacgccagcguggugaacauccagaaggagaucgaucggcugaacgagguggccaagaaccugaacgagagccugaucgaccugcaggagcugggcaaguacgagcaguacaucaaguggcccugguacaucuggcugggcuucaucgccggccugaucgccaucgugauggugaccaucaugcugugcugcaugaccagcugcugcagcugccugaagggcuguugcagcugcggcagcugcugcaaguucgacgaggacgacagcgagcccgugcugaagggcgugaagcugcacuacaccugaggacuagucccuguucccagagcccacuuuuuuuucuuuuuuugaaauaaaauagccugucuuucagaucuaaaaaaaaaaaaaaaaaaaaaaaaaaaaaaaaaaaaaaaaaaaaaaaaaaaaaaaaaaaaaaaaaaaaaaaaaaaaaaaaaaaaaaaaaaaaaaaaaaaa

SEQ ID NO: 25109 - RNA, 4167 nt, Artificial Sequence
  SARS-CoV-2/Wuhan/WIV05/2019__EPI_ISL_402128 spike protein mRNA gc (1-1273)(K986P_V987P_K986P_V987P_L18F_T20N_P26S_D138Y_R190S_K417T _E484K_N501Y_D614G_H655Y_T1027I)
aggagagggcgcuuggcuugcaaggacccugagcugcggcauugaagcacacccaacccaacucgacugaagucagccucacugaaccggaucugagaaucuucucucucugggcuugccagggcucuccgaaccuagcuagcauccucuucaauuccaacuagaaagcuuaccauguucguguuccuggugcugcugccccuggugagcagccagugcgugaacuucaccaaccggacccagcugccaagcgccuacaccaacagcuucacccggggcgucuacuaccccgacaagguguuccggagcagcguccugcacagcacccaggaccuguuccugcccuucuucagcaacgugaccugguuccacgccauccacgugagcggcaccaacggcaccaagcgguucgacaaccccgugcugcccuucaacgacggcguguacuucgccagcaccgagaagagcaacaucauccggggcuggaucuucggcaccacccuggacagcaagacccagagccugcugaucgugaauaacgccaccaacguggugaucaaggugugcgaguuccaguucugcaacuaccccuuccugggcguguacuaccacaagaacaacaagagcuggauggagagcgaguuccggguguacagcagcgccaacaacugcaccuucgaguacgugagccagcccuuccugauggaccuggagggcaagcagggcaacuucaagaaccugagcgaguucguguucaagaacaucgacggcuacuucaagaucuacagcaagcacaccccaaucaaccuggugcgggaucugccccagggcuucucagcccuggagccccugguggaccugcccaucggcaucaacaucacccgguuccagacccugcuggcccugcaccggagcuaccugaccccaggcgacagcagcagcggguggacagcaggcgcggcugcuuacuacgugggcuaccugcagccccggaccuuccugcugaaguacaacgagaacggcaccaucaccgacgccguggacugcgcccuggacccucugagcgagaccaagugcacccugaagagcuucaccguggagaagggcaucuaccagaccagcaacuuccgggugcagcccaccgagagcaucgugcgguuccccaacaucaccaaccugugccccuucggcgagguguucaacgccacccgguucgccagcguguacgccuggaaccggaagcggaucagcaacugcguggccgacuacagcgugcuguacaacagcgccagcuucagcaccuucaagugcuacggcgugagccccaccaagcugaacgaccugugcuucaccaacguguacgccgacagcuucgugauccguggcgacgaggugcggcagaucgcacccggccagacaggcaccaucgccgacuacaacuacaagcugcccgacgacuucaccggcugcgugaucgccuggaacagcaacaaccucgacagcaaggugggcggcaacuacaacuaccuguaccggcuguuccggaagagcaaccugaagcccuucgagcgggacaucagcaccgagaucuaccaagccggcuccaccccuugcaacggcgugaagggcuucaacugcuacuucccucugcagagcuacggcuuccagcccaccuacggcgugggcuaccagcccuaccgggugguggugcugagcuucgagcugcugcacgccccagccaccguguguggccccaagaagagcaccaaccuggugaagaacaagugcgugaacuucaacuucaacggccuuaccggcaccggcgugcugaccgagagcaacaagaaauuccugcccuuucagcaguucggccgggacaucgccgacaccaccgacgcugugcgggauccccagacccuggagauccuggacaucaccccuugcagcuucggcggcgugagcgugaucaccccaggcaccaacaccagcaaccagguggccgugcuguaccagggcgugaacugcaccgaggugcccguggccauccacgccgaccagcugacacccaccuggcgggucuacagcaccggcagcaacguguuccagacccgggccgguugccugaucggcgccgaguacgugaacaacagcuacgagugcgacauccccaucggcgccggcaucugugccagcuaccagacccagaccaauucaccccggagggcaaggagcguggccagccagagcaucaucgccuacaccaugagccugggcgccgagaacagcguggccuacagcaacaacagcaucgccauccccaccaacuucaccaucagcgugaccaccgagauucugcccgugagcaugaccaagaccagcguggacugcaccauguacaucugcggcgacagcaccgagugcagcaaccugcugcugcaguacggcagcuucugcacccagcugaaccgggcccugaccggcaucgccguggagcaggacaagaacacccaggagguguucgcccaggugaagcagaucuacaagaccccucccaucaaggacuucggcggcuucaacuucagccagauccugcccgaccccagcaagcccagcaagcggagcuucaucgaggaccugcuguucaacaaggugacccuagccgacgccggcuucaucaagcaguacggcgacugccucggcgacauagccgcccgggaccugaucugcgcccagaaguucaacggccugaccgugcugccuccccugcugaccgacgagaugaucgcccaguacaccagcgcccuguuagccggaaccaucaccagcggcuggacuuucggcgcuggagccgcucugcagauccccuucgccaugcagauggccuaccgguucaacggcaucggcgugacccagaacgugcuguacgagaaccagaagcugaucgccaaccaguucaacagcgccaucggcaagauccaggacagccugagcagcaccgcuagcgcccugggcaagcugcaggacguggugaaccagaacgcccaggcccugaacacccuggugaagcagcugagcagcaacuucggcgccaucagcagcgugcugaacgacauccugagccggcuggacccucccgaggccgaggugcagaucgaccggcugaucacuggccggcugcagagccugcagaccuacgugacccagcagcugauccgggccgccgagauucgggccagcgccaaccuggccgccaucaagaugagcgagugcgugcugggccagagcaagcggguggacuucugcggcaagggcuaccaccugaugagcuuuccccagagcgcaccccacggagugguguuccugcacgugaccuacgugcccgcccaggagaagaacuucaccaccgccccagccaucugccacgacggcaaggcccacuuuccccgggagggcguguucgugagcaacggcacccacugguucgugacccagcggaacuucuacgagccccagaucaucaccaccgacaacaccuucgugagcggcaacugcgacguggugaucggcaucgugaacaacaccguguacgauccccugcagcccgagcuggacagcuucaaggaggagcuggacaaguacuucaagaaucacaccagccccgacguggaccugggcgacaucagcggcaucaacgccagcguggugaacauccagaaggagaucgaucggcugaacgagguggccaagaaccugaacgagagccugaucgaccugcaggagcugggcaaguacgagcaguacaucaaguggcccugguacaucuggcugggcuucaucgccggccugaucgccaucgugauggugaccaucaugcugugcugcaugaccagcugcugcagcugccugaagggcuguugcagcugcggcagcugcugcaaguucgacgaggacgacagcgagcccgugcugaagggcgugaagcugcacuacaccugaggacuagucccuguucccagagcccacuuuuuuuucuuuuuuugaaauaaaauagccugucuuucagaucuaaaaaaaaaaaaaaaaaaaaaaaaaaaaaaaaaaaaaaaaaaaaaaaaaaaaaaaaaaaaaaaaaaaaaaaaaaaaaaaaaaaaaaaaaaaaaaaaaaaa

SEQ ID NO: 25110 - RNA, 4167 nt, Artificial Sequence
  SARS-CoV-2/Wuhan/WIV05/2019__EPI_ISL_402128 spike protein mRNA gc (1-1273)(K986P_V987P_K986P_V987P_S13I_W152C_L452R_D614G)
aggagagggcgcuuggcuugcaaggacccugagcugcggcauugaagcacacccaacccaacucgacugaagucagccucacugaaccggaucugagaaucuucucucucugggcuugccagggcucuccgaaccuagcuagcauccucuucaauuccaacuagaaagcuuaccauguucguguuccuggugcugcugccccuggugagcauccagugcgugaaccugaccacccggacccagcugccaccagccuacaccaacagcuucacccggggcgucuacuaccccgacaagguguuccggagcagcguccugcacagcacccaggaccuguuccugcccuucuucagcaacgugaccugguuccacgccauccacgugagcggcaccaacggcaccaagcgguucgacaaccccgugcugcccuucaacgacggcguguacuucgccagcaccgagaagagcaacaucauccggggcuggaucuucggcaccacccuggacagcaagacccagagccugcugaucgugaauaacgccaccaacguggugaucaaggugugcgaguuccaguucugcaacgaccccuuccugggcguguacuaccacaagaacaacaagagcugcauggagagcgaguuccggguguacagcagcgccaacaacugcaccuucgaguacgugagccagcccuuccugauggaccuggagggcaagcagggcaacuucaagaaccugcgggaguucguguucaagaacaucgacggcuacuucaagaucuacagcaagcacaccccaaucaaccuggugcgggaucugccccagggcuucucagcccuggagccccugguggaccugcccaucggcaucaacaucacccgguuccagacccugcuggcccugcaccggagcuaccugaccccaggcgacagcagcagcggguggacagcaggcgcggcugcuuacuacgugggcuaccugcagccccggaccuuccugcugaaguacaacgagaacggcaccaucaccgacgccguggacugcgcccuggacccucugagcgagaccaagugcacccugaagagcuucaccguggagaagggcaucuaccagaccagcaacuuccgggugcagcccaccgagagcaucgugcgguuccccaacaucaccaaccugugccccuucggcgagguguucaacgccacccgguucgccagcguguacgccuggaaccggaagcggaucagcaacugcguggccgacuacagcgugcuguacaacagcgccagcuucagcaccuucaagugcuacggcgugagccccaccaagcugaacgaccugugcuucaccaacguguacgccgacagcuucgugauccguggcgacgaggugcggcagaucgcacccggccagacaggcaagaucgccgacuacaacuacaagcugcccgacgacuucaccggcugcgugaucgccuggaacagcaacaaccucgacagcaaggugggcggcaacuacaacuaccgcuaccggcuguuccggaagagcaaccugaagcccuucgagcgggacaucagcaccgagaucuaccaagccggcuccaccccuugcaacggcguggagggcuucaacugcuacuucccucugcagagcuacggcuuccagcccaccaacggcgugggcuaccagcccuaccgggugguggugcugagcuucgagcugcugcacgccccagccaccguguguggccccaagaagagcaccaaccuggugaagaacaagugcgugaacuucaacuucaacggccuuaccggcaccggcgugcugaccgagagcaacaagaaauuccugcccuuucagcaguucggccgggacaucgccgacaccaccgacgcugugcgggauccccagacccuggagauccuggacaucaccccuugcagcuucggcggcgugagcgugaucaccccaggcaccaacaccagcaaccagguggccgugcuguaccagggcgugaacugcaccgaggugcccguggccauccacgccgaccagcugacacccaccuggcgggucuacagcaccggcagcaacguguuccagacccgggccgguugccugaucggcgccgagcacgugaacaacagcuacgagugcgacauccccaucggcgccggcaucugugccagcuaccagacccagaccaauucaccccggagggcaaggagcguggccagccagagcaucaucgccuacaccaugagccugggcgccgagaacagcguggccuacagcaacaacagcaucgccauccccaccaacuucaccaucagcgugaccaccgagauucugcccgugagcaugaccaagaccagcguggacugcaccauguacaucugcggcgacagcaccgagugcagcaaccugcugcugcaguacggcagcuucugcacccagcugaaccgggcccugaccggcaucgccguggagcaggacaagaacacccaggagguguucgcccaggugaagcagaucuacaagaccccucccaucaaggacuucggcggcuucaacuucagccagauccugcccgaccccagcaagcccagcaagcggagcuucaucgaggaccugcuguucaacaaggugacccuagccgacgccggcuucaucaagcaguacggcgacugccucggcgacauagccgcccgggaccugaucugcgcccagaaguucaacggccugaccgugcugccuccccugcugaccgacgagaugaucgcccaguacaccagcgcccuguuagccggaaccaucaccagcggcuggacuuucggcgcuggagccgcucugcagauccccuucgccaugcagauggccuaccgguucaacggcaucggcgugacccagaacgugcuguacgagaaccagaagcugaucgccaaccaguucaacagcgccaucggcaagauccaggacagccugagcagcaccgcuagcgcccugggcaagcugcaggacguggugaaccagaacgcccaggcccugaacacccuggugaagcagcugagcagcaacuucggcgccaucagcagcgugcugaacgacauccugagccggcuggacccucccgaggccgaggugcagaucgaccggcugaucacuggccggcugcagagccugcagaccuacgugacccagcagcugauccgggccgccgagauucgggccagcgccaaccuggccgccaccaagaugagcgagugcgugcugggccagagcaagcggguggacuucugcggcaagggcuaccaccugaugagcuuuccccagagcgcaccccacggagugguguuccugcacgugaccuacgugcccgcccaggagaagaacuucaccaccgccccagccaucugccacgacggcaaggcccacuuuccccgggagggcguguucgugagcaacggcacccacugguucgugacccagcggaacuucuacgagccccagaucaucaccaccgacaacaccuucgugagcggcaacugcgacguggugaucggcaucgugaacaacaccguguacgauccccugcagcccgagcuggacagcuucaaggaggagcuggacaaguacuucaagaaucacaccagccccgacguggaccugggcgacaucagcggcaucaacgccagcguggugaacauccagaaggagaucgaucggcugaacgagguggccaagaaccugaacgagagccugaucgaccugcaggagcugggcaaguacgagcaguacaucaaguggcccugguacaucuggcugggcuucaucgccggccugaucgccaucgugauggugaccaucaugcugugcugcaugaccagcugcugcagcugccugaagggcuguugcagcugcggcagcugcugcaaguucgacgaggacgacagcgagcccgugcugaagggcgugaagcugcacuacaccugaggacuagucccuguucccagagcccacuuuuuuuucuuuuuuugaaauaaaauagccugucuuucagaucuaaaaaaaaaaaaaaaaaaaaaaaaaaaaaaaaaaaaaaaaaaaaaaaaaaaaaaaaaaaaaaaaaaaaaaaaaaaaaaaaaaaaaaaaaaaaaaaaaaaa

SEQ ID NO: 25111 - RNA, 4167 nt, Artificial Sequence
  SARS-CoV-2/Wuhan/WIV05/2019__EPI_ISL_402128 spike protein mRNA gc (1-1273)(K986P_V987P)
aggagagggcgcuuggcuugcaaggacccugagcugcggcauugaagcacacccaacccaacucgacugaagucagccucacugaaccggaucugagaaucuucucucucugggcuugccagggcucuccgaaccuagcuagcauccucuucaauuccaacuagaaagcuuaccauguucguguuccuggugcugcugccccuggugagcagccagugcgugaaccugaccacccggacccagcugcccccugccuacaccaacagcuucacccggggcguguacuaccccgacaagguguuccggagcagcgugcugcacagcacccaggaccuguuccugcccuucuucagcaacgugaccugguuccacgccauccacgugagcggcaccaacggcaccaagcgguucgacaacccagugcugcccuucaacgacggcguguacuucgccagcaccgagaagucaaacaucauccggggcuggaucuucggcaccacccuggacagcaagacacagagccugcugaucgugaacaacgccaccaacguggugaucaaggugugcgaguuucaguucugcaacgaccccuuccugggcguguacuaccacaagaacaacaagagcuggauggagagcgaguuccgggucuacagcagcgcuaacaauugcaccuucgaguacgugagccagcccuuccugauggaccucgagggcaagcagggcaacuucaagaaccugcgggaguucguguucaagaacaucgauggcuacuucaagaucuacagcaagcacacccccaucaaccuggugcgggaccugccccagggauucagcgcccuggagccucugguggaccugcccaucggcaucaacaucaccagguuccagacccugcuggcccugcaccggagcuaccugacccccggcgacagcagcagcggcuggaccgccggcgccgccgcauacuacgugggcuaccugcagccacggaccuuccugcugaaguacaacgagaacggcaccaucaccgacgccguggacugcgcccuggacccccugagcgagaccaagugcacccuaaagagcuucaccguggagaagggcaucuaccagaccagcaacuuccgggugcagcccacugagagcaucgugcgguuccccaacauuaccaaccugugucccuucggcgagguguucaacgccacccgguucgccagcguguacgccuggaaccggaagcggaucagcaacugcguggccgacuacagcgugcuguacaacagcgccagcuucagcaccuucaagugcuacggcgugagcccuaccaagcugaacgaccugugcuucaccaacguguacgcugacagcuucgugauccggggcgacgaggugcggcagaucgcccccggccagaccggcaagaucgccgacuacaacuacaagcugcccgacgacuucaccggcugcgugaucgccuggaacagcaacaaccuggacagcaaggugggcggcaacuacaacuaccuguaccggcuguuccguaagagcaaccugaagccauucgagcgggacaucagcaccgagaucuaccaggccggcagcacccccugcaacgguguggagggcuuuaacugcuacuucccccugcagagcuacggcuuccagcccaccaacggcgugggcuaccagcccuaccgggugguggugcugagcuucgagcugcugcacgcccccgccaccgugugcggcccuaaaaagagcaccaaccuggugaagaacaagugcgugaacuucaauuucaacggccugaccggcaccggcgugcugaccgagagcaacaagaaguuccugcccuuccagcaguucggccgggauaucgccgacaccaccgacgcagugcgggacccccagacccuggagauccuggacaucaccccaugcagcuucggcggcgugagcgucaucacccccggcacaaacaccagcaaccagguggccgugcuguaccaggacgugaacugcaccgaggugcccguggccauccacgccgaccagcugacccccaccuggcggguguacagcaccggaagcaacguguuccagacccgggccggcugccugaucggcgccgagcacgugaacaacuccuacgagugcgacauccccaucggcgcuggcaucugcgccagcuaccagacccagaccaacagcccccggcgggcccggagcguggccagccagagcaucaucgccuacaccaugagcuuaggcgccgagaacagcguggccuacagcaacaacagcaucgcgaucccuaccaacuucaccaucagcgugaccaccgagauacugcccgugagcaugaccaagaccagcguggacuguaccauguacaucugcggcgacagcaccgagugcagcaaccugcugcugcaguacggcagcuucugcacccagcugaaccgggcccugaccggcaucgccguggagcaggacaagaacacccaagagguguucgcccaggugaagcagaucuacaagacucccccaaucaaggacuucggcggcuucaacuucagccagauccugcccgaccccagcaagcccagcaagcggagcuucaucgaggaccugcuguucaacaaggugacccuggccgacgccggcuucaucaagcaguacggcgauugccugggcgacaucgccgcucgggaccugaucugcgcccagaaguucaacgggcugaccgugcugcccccucugcugaccgacgagaugaucgcccaguacaccagcgcccugcuugccggcaccaucaccagcggcuggaccuucggcgccggcgcagcccugcagauccccuucgccaugcagauggccuaccgguucaacggcaucggcgugacccagaacgugcuguacgagaaccagaagcugaucgccaaccaguucaacagcgccaucggcaagauccaggacagccugagcagcaccgccagcgcccugggcaagcugcaggacguggugaaccagaacgcucaggcccugaacacccuggugaagcagcugagcagcaacuucggcgccaucagcucagugcugaaugacauccugagcaggcuggaucccccagaggccgaggugcagaucgaccggcugaucaccggccggcugcagagccugcagaccuacgugacccagcagcugauccgggccgccgagauccgggccagcgccaaccuggcagccaccaagaugagcgagugcgugcugggccagagcaagcggguggacuuuugcggcaagggcuaccaccugaugagcuucccccagagcgcuccccacggcgugguguuccuccacgugacauacguccccgcccaggagaagaacuucaccaccgcccccgccauuugccacgacggcaaggcccacuucccccgggagggcguguucgugagcaacggaacccacugguucgugacccagcggaacuucuacgagccucagaucaucaccaccgacaacaccuucgugagcggcaacugcgacguggugaucggcaucgugaacaacaccguguacgacccccugcagcccgagcuggacagcuucaaggaggagcuggacaaguacuucaagaaccacaccagcccagacguggaccugggcgacaucagcggcaucaacgccagcguggugaacauccagaaggagaucgaccggcugaacgagguggccaagaaccugaacgagagccugaucgaccugcaggagcugggcaaguacgagcaguacaucaaguggcccugguacaucuggcugggcuucaucgccggccugaucgccaucgugauggugaccaucaugcugugcugcaugaccagcugcuguagcugccugaagggcugcugcagcugcggcagcugcugcaaguucgacgaggacgacagcgagcccgugcugaagggcgugaagcugcacuacaccugaggacuagucccuguucccagagcccacuuuuuuuucuuuuuuugaaauaaaauagccugucuuucagaucuaaaaaaaaaaaaaaaaaaaaaaaaaaaaaaaaaaaaaaaaaaaaaaaaaaaaaaaaaaaaaaaaaaaaaaaaaaaaaaaaaaaaaaaaaaaaaaaaaaaa

SEQ ID NO: 25112 - RNA, 4167 nt, Artificial Sequence
  SARS-CoV-2/Wuhan/WIV05/2019__EPI_ISL_402128 spike protein mRNA gc (1-1273)(K986P_V987P_ D614G)
aggagagggcgcuuggcuugcaaggacccugagcugcggcauugaagcacacccaacccaacucgacugaagucagccucacugaaccggaucugagaaucuucucucucugggcuugccagggcucuccgaaccuagcuagcauccucuucaauuccaacuagaaagcuuaccauguucguguuccuggugcugcugccccuggugagcagccagugcgugaaccugaccacccggacccagcugcccccugccuacaccaacagcuucacccggggcguguacuaccccgacaagguguuccggagcagcgugcugcacagcacccaggaccuguuccugcccuucuucagcaacgugaccugguuccacgccauccacgugagcggcaccaacggcaccaagcgguucgacaacccagugcugcccuucaacgacggcguguacuucgccagcaccgagaagucaaacaucauccggggcuggaucuucggcaccacccuggacagcaagacacagagccugcugaucgugaacaacgccaccaacguggugaucaaggugugcgaguuucaguucugcaacgaccccuuccugggcguguacuaccacaagaacaacaagagcuggauggagagcgaguuccgggucuacagcagcgcuaacaauugcaccuucgaguacgugagccagcccuuccugauggaccucgagggcaagcagggcaacuucaagaaccugcgggaguucguguucaagaacaucgauggcuacuucaagaucuacagcaagcacacccccaucaaccuggugcgggaccugccccagggauucagcgcccuggagccucugguggaccugcccaucggcaucaacaucaccagguuccagacccugcuggcccugcaccggagcuaccugacccccggcgacagcagcagcggcuggaccgccggcgccgccgcauacuacgugggcuaccugcagccacggaccuuccugcugaaguacaacgagaacggcaccaucaccgacgccguggacugcgcccuggacccccugagcgagaccaagugcacccuaaagagcuucaccguggagaagggcaucuaccagaccagcaacuuccgggugcagcccacugagagcaucgugcgguuccccaacauuaccaaccugugucccuucggcgagguguucaacgccacccgguucgccagcguguacgccuggaaccggaagcggaucagcaacugcguggccgacuacagcgugcuguacaacagcgccagcuucagcaccuucaagugcuacggcgugagcccuaccaagcugaacgaccugugcuucaccaacguguacgcugacagcuucgugauccggggcgacgaggugcggcagaucgcccccggccagaccggcaagaucgccgacuacaacuacaagcugcccgacgacuucaccggcugcgugaucgccuggaacagcaacaaccuggacagcaaggugggcggcaacuacaacuaccuguaccggcuguuccguaagagcaaccugaagccauucgagcgggacaucagcaccgagaucuaccaggccggcagcacccccugcaacgguguggagggcuuuaacugcuacuucccccugcagagcuacggcuuccagcccaccaacggcgugggcuaccagcccuaccgggugguggugcugagcuucgagcugcugcacgcccccgccaccgugugcggcccuaaaaagagcaccaaccuggugaagaacaagugcgugaacuucaauuucaacggccugaccggcaccggcgugcugaccgagagcaacaagaaguuccugcccuuccagcaguucggccgggauaucgccgacaccaccgacgcagugcgggacccccagacccuggagauccuggacaucaccccaugcagcuucggcggcgugagcgucaucacccccggcacaaacaccagcaaccagguggccgugcuguaccagggagugaacugcaccgaggugcccguggccauccacgccgaccagcugacccccaccuggcggguguacagcaccggcagcaacguguuccagacccgggccggcugccugaucggcgccgagcacgugaacaacuccuacgagugcgacauccccaucggcgcuggcaucugcgccagcuaccagacccagaccaacagcccccggcgggcccggagcguggccagccagagcaucaucgccuacaccaugagcuuaggcgccgagaacagcguggccuacagcaacaacagcaucgcgaucccuaccaacuucaccaucagcgugaccaccgagauacugcccgugagcaugaccaagaccagcguggacuguaccauguacaucugcggcgacagcaccgagugcagcaaccugcugcugcaguacggcagcuucugcacccagcugaaccgggcccugaccggcaucgccguggagcaggacaagaacacccaagagguguucgcccaggugaagcagaucuacaagacucccccaaucaaggacuucggcggcuucaacuucagccagauccugcccgaccccagcaagcccagcaagcggagcuucaucgaggaccugcuguucaacaaggugacccuggccgacgccggcuucaucaagcaguacggcgacugccugggggauaucgccgcucgggaccugaucugcgcccagaaguucaacggccugaccgugcugcccccucugcugaccgacgagaugaucgcccaguacaccagcgcccugcuugccggcaccaucaccagcggcuggaccuucggcgccggcgcagcccugcagauccccuucgccaugcagauggccuaccgguucaacggcaucggcgugacccagaacgugcuguacgagaaccagaagcugaucgccaaccaguucaacagcgccaucggcaagauccaggacagccugagcagcaccgccagcgcccugggcaagcugcaggacguggugaaccagaacgcucaggcccugaacacccuggugaagcagcugagcagcaacuucggcgccaucagcucagugcugaaugacauccugagcaggcuggaucccccagaggccgaggugcagaucgaccggcugaucaccggccggcugcagagccugcagaccuacgugacccagcagcugauccgggccgccgagauccgggccagcgccaaccuggcagccaccaagaugagcgagugcgugcugggccagagcaagcggguggacuuuugcggcaagggcuaccaccugaugagcuucccccagagcgcuccccacggcgugguguuccuccacgugacauacguccccgcccaggagaagaacuucaccaccgcccccgccauuugccacgacggcaaggcccacuucccccgggagggaguguucgugagcaacggcacccacugguucgugacccagcggaacuucuacgagccucagaucaucaccaccgacaacaccuucgugagcggcaacugcgacguggugaucggcaucgugaacaacaccguguacgacccccugcagcccgagcuggacagcuucaaggaggagcuggacaaguacuucaagaaccacaccagcccagacguggaccugggcgacaucagcggcaucaacgccagcguggugaacauccagaaggagaucgaccggcugaacgagguggccaagaaccugaacgagagccugaucgaccugcaggagcugggcaaguacgagcaguacaucaaguggcccugguacaucuggcugggcuucaucgccggccugaucgccaucgugauggugaccaucaugcugugcugcaugaccagcugcuguagcugccugaagggcugcugcagcugcggcagcugcugcaaguucgacgaggacgacagcgagcccgugcugaagggcgugaagcugcacuacaccugaggacuagucccuguucccagagcccacuuuuuuuucuuuuuuugaaauaaaauagccugucuuucagaucuaaaaaaaaaaaaaaaaaaaaaaaaaaaaaaaaaaaaaaaaaaaaaaaaaaaaaaaaaaaaaaaaaaaaaaaaaaaaaaaaaaaaaaaaaaaaaaaaaaaa

SEQ ID NO: 25113 - RNA, 4167 nt, Artificial Sequence
  SARS-CoV-2/Wuhan/WIV05/2019__EPI_ISL_402128 spike protein mRNA gc (1-1273)(K986P_V987P_A222V_D614G)
aggagagggcgcuuggcuugcaaggacccugagcugcggcauugaagcacacccaacccaacucgacugaagucagccucacugaaccggaucugagaaucuucucucucugggcuugccagggcucuccgaaccuagcuagcauccucuucaauuccaacuagaaagcuuaccauguucguguuccuggugcugcugccccuggugagcagccagugcgugaaccugaccacccggacccagcugcccccugccuacaccaacagcuucacccggggcguguacuaccccgacaagguguuccggagcagcgugcugcacagcacccaggaccuguuccugcccuucuucagcaacgugaccugguuccacgccauccacgugagcggcaccaacggcaccaagcgguucgacaacccagugcugcccuucaacgacggcguguacuucgccagcaccgagaagucaaacaucauccggggcuggaucuucggcaccacccuggacagcaagacacagagccugcugaucgugaacaacgccaccaacguggugaucaaggugugcgaguuucaguucugcaacgaccccuuccugggcguguacuaccacaagaacaacaagagcuggauggagagcgaguuccgggucuacagcagcgcuaacaauugcaccuucgaguacgugagccagcccuuccugauggaccucgagggcaagcagggcaacuucaagaaccugcgggaguucguguucaagaacaucgauggcuacuucaagaucuacagcaagcacacccccaucaaccuggugcgggaccugccccagggauucagcgugcuggagccucugguggaccugcccaucggcaucaacaucaccagguuccagacccugcuggcccugcaccggagcuaccugacccccggcgacagcagcagcggcuggaccgccggcgccgccgccuacuacgugggcuaccugcagccacggaccuuccugcugaaguacaacgagaacggcaccaucaccgacgcaguggacugcgcccuggacccccugagcgagaccaagugcacccuaaagagcuucaccguggagaagggcaucuaccagaccagcaacuuccgggugcagcccacugagagcaucgugcgguuccccaacauuaccaaccugugucccuucggcgagguguucaacgccacccgguucgccagcguguacgccuggaaccggaagcggaucagcaacugcguggccgacuacagcgugcuguacaacagcgccagcuucagcaccuucaagugcuacggcgugagcccuaccaagcugaacgaccugugcuucaccaacguguacgccgacagcuucgugauccggggcgacgaggugcggcagaucgcucccggccagaccggcaagaucgccgacuacaacuacaagcugcccgacgacuucaccggcugcgugaucgccuggaacagcaacaaccuggacagcaaggugggcggcaacuacaacuaccuguaccggcuguuccguaagagcaaccugaagccauucgagcgggacaucagcaccgagaucuaccaggccggcagcacccccugcaacgguguggagggcuuuaacugcuacuucccccugcagagcuacggcuuccagcccaccaacggcgugggcuaccagcccuaccgggugguggugcugagcuucgagcugcugcacgcccccgccaccgugugcggcccuaaaaagagcaccaaccuggugaagaacaagugcgugaacuucaauuucaacggccugaccggcaccggcgugcugaccgagagcaacaagaaguuccugcccuuccagcaguucggccgggauaucgccgacaccaccgacgccgugcgggacccccagacccuggagauccuggacaucaccccaugcagcuucggcggcgucagcgugaucacccccggcacaaacaccagcaaccagguggcagugcuguaccagggagugaacugcaccgaggugcccguggccauccacgccgaccagcugacccccaccuggcggguguacagcaccggcagcaacguguuccagacccgggccggcugccugaucggcgccgagcacgugaacaacuccuacgagugcgacauccccaucggcgccggcaucugcgcuagcuaccagacccagaccaacagcccccggcgggcccggagcguggccagccagagcaucaucgccuacaccaugagcuuaggcgccgagaacagcguggccuacagcaacaacagcaucgccaucccuaccaacuucaccaucagcgugaccaccgagauacugcccgugagcaugaccaagaccagcguggacuguaccauguacaucugcggcgacagcaccgagugcagcaaccugcugcugcaguacggcagcuucugcacccagcugaaccgggcgcugaccggcaucgccguggagcaggacaagaacacccaagagguguucgcccaggugaagcagaucuacaagacucccccaaucaaggacuucggcggcuucaacuucagccagauccugcccgaccccagcaagcccagcaagcggagcuucaucgaggaccugcuguucaacaaggugacccuggccgacgccggcuucaucaagcaguacggcgacugccugggggauaucgccgcccgggaccugaucugcgcucagaaguucaacggccugaccgugcugcccccucugcugaccgacgagaugaucgcccaguacaccagcgcccugcuugccggcaccaucaccagcggcuggaccuucggcgccggcgccgcacugcagauccccuucgccaugcagauggccuaccgguucaacggcaucggcgugacccagaacgugcuguacgagaaccagaagcugaucgccaaccaguucaacagcgccaucggcaagauccaggacagccugagcagcaccgccagcgcccugggcaagcugcaggacguggugaaccagaacgcccaggcucugaacacccuggugaagcagcugagcagcaacuucggcgccaucagcucagugcugaaugacauccugagcaggcuggaucccccagaggccgaggugcagaucgaccggcugaucaccggccggcugcagagccugcagaccuacgugacccagcagcugauccgggccgccgagauccgggccagcgccaaccuggccgcaaccaagaugagcgagugcgugcugggccagagcaagcggguggacuuuugcggcaagggcuaccaccugaugagcuucccccagagcgcuccccacggcgugguguuccuccacgucacauacgugcccgcccaggagaagaacuucaccaccgcccccgccauuugccacgacggcaaggcccacuucccccgggagggaguguucgugagcaacggcacccacugguucgugacccagcggaacuucuacgagccucagaucaucaccaccgacaacaccuucgugagcggcaacugcgacguggugaucggcaucgugaacaacaccguguacgacccccugcagcccgagcuggacagcuucaaggaggagcuggacaaguacuucaagaaccacaccagcccagacguggaccugggcgacaucagcggcaucaacgccagcguggugaacauccagaaggagaucgaccggcugaacgagguggccaagaaccugaacgagagccugaucgaccugcaggagcugggcaaguacgagcaguacaucaaguggcccugguacaucuggcugggcuucaucgccggccugaucgccaucgugauggugaccaucaugcugugcugcaugaccagcugcuguagcugccugaagggcugcugcagcugcggcagcugcugcaaguucgacgaggacgacagcgagcccgugcugaagggcgugaagcugcacuacaccugaggacuagucccuguucccagagcccacuuuuuuuucuuuuuuugaaauaaaauagccugucuuucagaucuaaaaaaaaaaaaaaaaaaaaaaaaaaaaaaaaaaaaaaaaaaaaaaaaaaaaaaaaaaaaaaaaaaaaaaaaaaaaaaaaaaaaaaaaaaaaaaaaaaaa

SEQ ID NO: 25114 - RNA, 4167 nt, Artificial Sequence
  SARS-CoV-2/Wuhan/WIV05/2019__EPI_ISL_402128 spike protein mRNA gc (1-1273)(K986P_V987P_N439K_D614G)
aggagagggcgcuuggcuugcaaggacccugagcugcggcauugaagcacacccaacccaacucgacugaagucagccucacugaaccggaucugagaaucuucucucucugggcuugccagggcucuccgaaccuagcuagcauccucuucaauuccaacuagaaagcuuaccauguucguguuccuggugcugcugccccuggugagcagccagugcgugaaccugaccacccggacccagcugcccccugccuacaccaacagcuucacccggggcguguacuaccccgacaagguguuccggagcagcgugcugcacagcacccaggaccuguuccugcccuucuucagcaacgugaccugguuccacgccauccacgugagcggcaccaacggcaccaagcgguucgacaacccagugcugcccuucaacgacggcguguacuucgccagcaccgagaagucaaacaucauccggggcuggaucuucggcaccacccuggacagcaagacacagagccugcugaucgugaacaacgccaccaacguggugaucaaggugugcgaguuucaguucugcaacgaccccuuccugggcguguacuaccacaagaacaacaagagcuggauggagagcgaguuccgggucuacagcagcgcuaacaauugcaccuucgaguacgugagccagcccuuccugauggaccucgagggcaagcagggcaacuucaagaaccugcgggaguucguguucaagaacaucgauggcuacuucaagaucuacagcaagcacacccccaucaaccuggugcgggaccugccccagggauucagcgcccuggagccucugguggaccugcccaucggcaucaacaucaccagguuccagacccugcuggcccugcaccggagcuaccugacccccggcgacagcagcagcggcuggaccgccggcgccgccgcauacuacgugggcuaccugcagccacggaccuuccugcugaaguacaacgagaacggcaccaucaccgacgccguggacugcgcccuggacccccugagcgagaccaagugcacccuaaagagcuucaccguggagaagggcaucuaccagaccagcaacuuccgggugcagcccacugagagcaucgugcgguuccccaacauuaccaaccugugucccuucggcgagguguucaacgccacccgguucgccagcguguacgccuggaaccggaagcggaucagcaacugcguggccgacuacagcgugcuguacaacagcgccagcuucagcaccuucaagugcuacggcgugagcccuaccaagcugaacgaccugugcuucaccaacguguacgcugacagcuucgugauccggggcgacgaggugcggcagaucgcccccggccagaccggcaagaucgccgacuacaacuacaagcugcccgacgacuucaccggcugcgugaucgccuggaacagcaagaaccuggacagcaaggugggcggcaacuacaacuaccuguaccggcuguuccguaagagcaaccugaagccauucgagcgggacaucagcaccgagaucuaccaggccggcagcacccccugcaacgguguggagggcuuuaacugcuacuucccccugcagagcuacggcuuccagcccaccaacggcgugggcuaccagcccuaccgggugguggugcugagcuucgagcugcugcacgcccccgccaccgugugcggcccuaaaaagagcaccaaccuggugaagaacaagugcgugaacuucaacuucaauggccugaccggcaccggcgugcugaccgagagcaacaagaaguuccugcccuuccagcaguucggccgggauaucgccgacaccaccgacgcagugcgggacccccagacccuggagauccuggacaucaccccaugcagcuucggcggcgugagcgucaucacccccggcacaaacaccagcaaccagguggccgugcuguaccagggagugaacugcaccgaggugcccguggccauccacgccgaccagcugacccccaccuggcggguguacagcaccggcagcaacguguuccagacccgggccggcugccugaucggcgccgagcacgugaacaacuccuacgagugcgacauccccaucggcgcuggcaucugcgccagcuaccagacccagaccaacagcccccggcgggcccggagcguggccagccagagcaucaucgccuacaccaugagcuuaggcgccgagaacagcguggccuacagcaacaacagcaucgcgaucccuaccaacuucaccaucagcgugaccaccgagauacugcccgugagcaugaccaagaccagcguggacuguaccauguacaucugcggcgacagcaccgagugcagcaaccugcugcugcaguacggcagcuucugcacccagcugaaccgggcccugaccggcaucgccguggagcaggacaagaacacccaagagguguucgcccaggugaagcagaucuacaagacucccccaaucaaggacuucggcggcuucaacuucagccagauccugcccgaccccagcaagcccagcaagcggagcuucaucgaggaccugcuguucaacaaggugacccuggccgacgccggcuucaucaagcaguacggcgacugccugggggauaucgccgcucgggaccugaucugcgcccagaaguucaacggccugaccgugcugcccccucugcugaccgacgagaugaucgcccaguacaccagcgcccugcuugccggcaccaucaccagcggcuggaccuucggcgccggcgcagcccugcagauccccuucgccaugcagauggccuaccgguucaacggcaucggcgugacccagaacgugcuguacgagaaccagaagcugaucgccaaccaguucaacagcgccaucggcaagauccaggacagccugagcagcaccgccagcgcccugggcaagcugcaggacguggugaaccagaacgcucaggcccugaacacccuggugaagcagcugagcagcaacuucggcgccaucagcucagugcugaacgacauccugagcaggcuggaucccccagaggccgaggugcagaucgaccggcugaucaccggccggcugcagagccugcagaccuacgugacccagcagcugauccgggccgccgagauccgggccagcgccaaucuggcagccaccaagaugagcgagugcgugcugggccagagcaagcggguggacuuuugcggcaagggcuaccaccugaugagcuucccccagagcgcuccccacggcgugguguuccuccacgugacauacguccccgcccaggagaagaacuucaccaccgcccccgccauuugccacgacggcaaggcccacuucccccgggagggaguguucgugagcaacggcacccacugguucgugacccagcggaacuucuacgagccucagaucaucaccaccgacaacaccuucgugagcggcaacugcgacguggugaucggcaucgugaacaacaccguguacgacccccugcagcccgagcuggacagcuucaaggaggagcuggacaaguacuucaagaaccacaccagcccagacguggaccugggcgacaucagcggcaucaacgccagcguggugaacauccagaaggagaucgaccggcugaacgagguggccaagaaccugaacgagagccugaucgaccugcaggagcugggcaaguacgagcaguacaucaaguggcccugguacaucuggcugggcuucaucgccggccugaucgccaucgugauggugaccaucaugcugugcugcaugaccagcugcuguagcugccugaagggcugcugcagcugcggcagcugcugcaaguucgacgaggacgacagcgagcccgugcugaagggcgugaagcugcacuacaccugaggacuagucccuguucccagagcccacuuuuuuuucuuuuuuugaaauaaaauagccugucuuucagaucuaaaaaaaaaaaaaaaaaaaaaaaaaaaaaaaaaaaaaaaaaaaaaaaaaaaaaaaaaaaaaaaaaaaaaaaaaaaaaaaaaaaaaaaaaaaaaaaaaaaa

SEQ ID NO: 25115 - RNA, 4167 nt, Artificial Sequence
  SARS-CoV-2/Wuhan/WIV05/2019__EPI_ISL_402128 spike protein mRNA gc (1-1273)(K986P_V987P_S477N_D614G)
aggagagggcgcuuggcuugcaaggacccugagcugcggcauugaagcacacccaacccaacucgacugaagucagccucacugaaccggaucugagaaucuucucucucugggcuugccagggcucuccgaaccuagcuagcauccucuucaauuccaacuagaaagcuuaccauguucguguuccuggugcugcugccccuggugagcagccagugcgugaaccugaccacccggacccagcugcccccugccuacaccaacagcuucacccggggcguguacuaccccgacaagguguuccggagcagcgugcugcacagcacccaggaccuguuccugcccuucuucagcaacgugaccugguuccacgccauccacgugagcggcaccaacggcaccaagcgguucgacaacccagugcugcccuucaacgacggcguguacuucgccagcaccgagaagucaaacaucauccggggcuggaucuucggcaccacccuggacagcaagacacagagccugcugaucgugaacaacgccaccaacguggugaucaaggugugcgaguuucaguucugcaacgaccccuuccugggcguguacuaccacaagaacaacaagagcuggauggagagcgaguuccgggucuacagcagcgcuaacaauugcaccuucgaguacgugagccagcccuuccugauggaccucgagggcaagcagggcaacuucaagaaccugcgggaguucguguucaagaacaucgauggcuacuucaagaucuacagcaagcacacccccaucaaccuggugcgggaccugccccagggauucagcgcccuggagccucugguggaccugcccaucggcaucaacaucaccagguuccagacccugcuggcccugcaccggagcuaccugacccccggcgacagcagcagcggcuggaccgccggcgccgccgcauacuacgugggcuaccugcagccacggaccuuccugcugaaguacaacgagaacggcaccaucaccgacgccguggacugcgcccuggacccccugagcgagaccaagugcacccuaaagagcuucaccguggagaagggcaucuaccagaccagcaacuuccgggugcagcccacugagagcaucgugcgguuccccaacauuaccaaccugugucccuucggcgagguguucaacgccacccgguucgccagcguguacgccuggaaccggaagcggaucagcaacugcguggccgacuacagcgugcuguacaacagcgccagcuucagcaccuucaagugcuacggcgugagcccuaccaagcugaacgaccugugcuucaccaacguguacgcugacagcuucgugauccggggcgacgaggugcggcagaucgcccccggccagaccggcaagaucgccgacuacaacuacaagcugcccgacgacuucaccggcugcgugaucgccuggaacagcaacaaccuggacagcaaggugggcggcaacuacaacuaccuguaccggcuguuccguaagagcaaccugaagccauucgagcgggacaucagcaccgagaucuaccaggccggcaacacccccugcaacgguguggagggcuuuaacugcuacuucccccugcagagcuacggcuuccagcccaccaacggcgugggcuaccagcccuaccgggugguggugcugagcuucgagcugcugcacgcccccgccaccgugugcggcccuaaaaagagcaccaaccuggugaagaacaagugcgugaauuucaacuucaacggccugaccggcaccggcgugcugaccgagagcaacaagaaguuccugcccuuccagcaguucggccgggauaucgccgacaccaccgacgcagugcgggacccccagacccuggagauccuggacaucaccccaugcagcuucggcggcgugagcgucaucacccccggcacaaacaccagcaaccagguggccgugcuguaccagggagugaacugcaccgaggugcccguggccauccacgccgaccagcugacccccaccuggcggguguacagcaccggcagcaacguguuccagacccgggccggcugccugaucggcgccgagcacgugaacaacagcuacgagugcgacauccccaucggcgcuggcaucugcgccuccuaccagacccagaccaacagcccccggcgggcccggagcguggccagccagagcaucaucgccuacaccaugagcuuaggcgccgagaacagcguggccuacagcaacaacagcaucgcgaucccuaccaacuucaccaucagcgugaccaccgagauacugcccgugagcaugaccaagaccagcguggacuguaccauguacaucugcggcgacagcaccgagugcagcaaccugcugcugcaguacggcagcuucugcacccagcugaaccgggcccugaccggcaucgccguggagcaggacaagaacacccaagagguguucgcccaggugaagcagaucuacaagacucccccaaucaaggacuucggcggcuucaacuucagccagauccugcccgaccccagcaagcccagcaagcggagcuucaucgaggaccugcuguucaacaaggugacccuggccgacgccggcuucaucaagcaguacggcgacugccugggggauaucgccgcucgggaccugaucugcgcccagaaguucaacggccugaccgugcugcccccucugcugaccgacgagaugaucgcccaguacaccagcgcccugcuugccggcaccaucaccagcggcuggaccuucggcgccggcgcagcccugcagauccccuucgccaugcagauggccuaccgguucaacggcaucggcgugacccagaacgugcuguacgagaaccagaagcugaucgccaaccaguucaacagcgccaucggcaagauccaggacagccugagcagcaccgccagcgcccugggcaagcugcaggacguggugaaccagaacgcucaggcccugaacacccuggugaagcagcugagcagcaauuucggcgccaucagcagcgugcugaacgacauccugucaaggcuggaucccccagaggccgaggugcagaucgaccggcugaucaccggccggcugcagagccugcagaccuacgugacccagcagcugauccgggccgccgagauccgggccagcgccaaccuggcagccaccaagaugagcgagugcgugcugggccagagcaagcggguggacuuuugcggcaagggcuaccaccugaugagcuucccccagagcgcuccccacggcgugguguuccuccacgugacauacguccccgcccaggagaagaacuucaccaccgcccccgccauuugccacgacggcaaggcccacuucccccgggagggaguguucgugagcaacggcacccacugguucgugacccagcggaacuucuacgagccucagaucaucaccaccgacaacaccuucgugagcggcaacugcgacguggugaucggcaucgugaacaacaccguguacgacccccugcagcccgagcuggacagcuucaaggaggagcuggacaaguacuucaagaaccacaccagcccagacguggaccugggcgacaucagcggcaucaacgccagcguggugaacauccagaaggagaucgaccggcugaacgagguggccaagaaccugaacgagagccugaucgaccugcaggagcugggcaaguacgagcaguacaucaaguggcccugguacaucuggcugggcuucaucgccggccugaucgccaucgugauggugaccaucaugcugugcugcaugaccagcugcuguagcugccugaagggcugcugcagcugcggcagcugcugcaaguucgacgaggacgacagcgagcccgugcugaagggcgugaagcugcacuacaccugaggacuagucccuguucccagagcccacuuuuuuuucuuuuuuugaaauaaaauagccugucuuucagaucuaaaaaaaaaaaaaaaaaaaaaaaaaaaaaaaaaaaaaaaaaaaaaaaaaaaaaaaaaaaaaaaaaaaaaaaaaaaaaaaaaaaaaaaaaaaaaaaaaaaa

SEQ ID NO: 25116 - RNA, 4167 nt, Artificial Sequence
  SARS-CoV-2/Wuhan/WIV05/2019__EPI_ISL_402128 spike protein mRNA gc (1-1273)(K986P_V987P_N501Y_D614G)
aggagagggcgcuuggcuugcaaggacccugagcugcggcauugaagcacacccaacccaacucgacugaagucagccucacugaaccggaucugagaaucuucucucucugggcuugccagggcucuccgaaccuagcuagcauccucuucaauuccaacuagaaagcuuaccauguucguguuccuggugcugcugccccuggugagcagccagugcgugaaccugaccacccggacccagcugcccccugccuacaccaacagcuucacccggggcguguacuaccccgacaagguguuccggagcagcgugcugcacagcacccaggaccuguuccugcccuucuucagcaacgugaccugguuccacgccauccacgugagcggcaccaacggcaccaagcgguucgacaacccagugcugcccuucaacgacggcguguacuucgccagcaccgagaagucaaacaucauccggggcuggaucuucggcaccacccuggacagcaagacacagagccugcugaucgugaacaacgccaccaacguggugaucaaggugugcgaguuucaguucugcaacgaccccuuccugggcguguacuaccacaagaacaacaagagcuggauggagagcgaguuccgggucuacagcagcgcuaacaauugcaccuucgaguacgugagccagcccuuccugauggaccucgagggcaagcagggcaacuucaagaaccugcgggaguucguguucaagaacaucgauggcuacuucaagaucuacagcaagcacacccccaucaaccuggugcgggaccugccccagggauucagcgcccuggagccucugguggaccugcccaucggcaucaacaucaccagguuccagacccugcuggcccugcaccggagcuaccugacccccggcgacagcagcagcggcuggaccgccggcgccgccgcauacuacgugggcuaccugcagccacggaccuuccugcugaaguacaacgagaacggcaccaucaccgacgccguggacugcgcccuggacccccugagcgagaccaagugcacccuaaagagcuucaccguggagaagggcaucuaccagaccagcaacuuccgggugcagcccacugagagcaucgugcgguuccccaacauuaccaaccugugucccuucggcgagguguucaacgccacccgguucgccagcguguacgccuggaaccggaagcggaucagcaacugcguggccgacuacagcgugcuguacaacagcgccagcuucagcaccuucaagugcuacggcgugagcccuaccaagcugaacgaccugugcuucaccaacguguacgcugacagcuucgugauccggggcgacgaggugcggcagaucgcccccggccagaccggcaagaucgccgacuacaacuacaagcugcccgacgacuucaccggcugcgugaucgccuggaacagcaacaaccuggacagcaaggugggcggcaacuacaacuaccuguaccggcuguuccguaagagcaaccugaagccauucgagcgggacaucagcaccgagaucuaccaggccggcagcacccccugcaacgguguggagggcuuuaacugcuacuucccccugcagagcuacggcuuccagcccaccuacggcgugggcuaccagcccuaccgggugguggugcugagcuucgagcugcugcacgcccccgccaccgugugcggcccuaaaaagagcaccaaccuggugaagaacaagugcgugaacuucaacuucaauggccugaccggcaccggcgugcugaccgagagcaacaagaaguuccugcccuuccagcaguucggccgggauaucgccgacaccaccgacgcagugcgggacccccagacccuggagauccuggacaucaccccaugcagcuucggcggcgugagcgucaucacccccggcacaaacaccagcaaccagguggccgugcuguaccagggagugaacugcaccgaggugcccguggccauccacgccgaccagcugacccccaccuggcggguguacagcaccggcagcaacguguuccagacccgggccggcugccugaucggcgccgagcacgugaacaacuccuacgagugcgacauccccaucggcgcuggcaucugcgccagcuaccagacccagaccaacagcccccggcgggcccggagcguggccagccagagcaucaucgccuacaccaugagcuuaggcgccgagaacagcguggccuacagcaacaacagcaucgcgaucccuaccaacuucaccaucagcgugaccaccgagauacugcccgugagcaugaccaagaccagcguggacuguaccauguacaucugcggcgacagcaccgagugcagcaaccugcugcugcaguacggcagcuucugcacccagcugaaccgggcccugaccggcaucgccguggagcaggacaagaacacccaagagguguucgcccaggugaagcagaucuacaagacucccccaaucaaggacuucggcggcuucaacuucagccagauccugcccgaccccagcaagcccagcaagcggagcuucaucgaggaccugcuguucaacaaggugacccuggccgacgccggcuucaucaagcaguacggcgacugccugggggauaucgccgcucgggaccugaucugcgcccagaaguucaacggccugaccgugcugcccccucugcugaccgacgagaugaucgcccaguacaccagcgcccugcuugccggcaccaucaccagcggcuggaccuucggcgccggcgcagcccugcagauccccuucgccaugcagauggccuaccgguucaacggcaucggcgugacccagaacgugcuguacgagaaccagaagcugaucgccaaccaguucaacagcgccaucggcaagauccaggacagccugagcagcaccgccagcgcccugggcaagcugcaggacguggugaaccagaacgcucaggcccugaacacccuggugaagcagcugagcagcaacuucggcgccaucagcucagugcugaacgacauccugagcaggcuggaucccccagaggccgaggugcagaucgaccggcugaucaccggccggcugcagagccugcagaccuacgugacccagcagcugauccgggccgccgagauccgggccagcgccaaucuggcagccaccaagaugagcgagugcgugcugggccagagcaagcggguggacuuuugcggcaagggcuaccaccugaugagcuucccccagagcgcuccccacggcgugguguuccuccacgugacauacguccccgcccaggagaagaacuucaccaccgcccccgccauuugccacgacggcaaggcccacuucccccgggagggaguguucgugagcaacggcacccacugguucgugacccagcggaacuucuacgagccucagaucaucaccaccgacaacaccuucgugagcggcaacugcgacguggugaucggcaucgugaacaacaccguguacgacccccugcagcccgagcuggacagcuucaaggaggagcuggacaaguacuucaagaaccacaccagcccagacguggaccugggcgacaucagcggcaucaacgccagcguggugaacauccagaaggagaucgaccggcugaacgagguggccaagaaccugaacgagagccugaucgaccugcaggagcugggcaaguacgagcaguacaucaaguggcccugguacaucuggcugggcuucaucgccggccugaucgccaucgugauggugaccaucaugcugugcugcaugaccagcugcuguagcugccugaagggcugcugcagcugcggcagcugcugcaaguucgacgaggacgacagcgagcccgugcugaagggcgugaagcugcacuacaccugaggacuagucccuguucccagagcccacuuuuuuuucuuuuuuugaaauaaaauagccugucuuucagaucuaaaaaaaaaaaaaaaaaaaaaaaaaaaaaaaaaaaaaaaaaaaaaaaaaaaaaaaaaaaaaaaaaaaaaaaaaaaaaaaaaaaaaaaaaaaaaaaaaaaa

SEQ ID NO: 25117 - RNA, 4161 nt, Artificial Sequence
  SARS-CoV-2/Wuhan/WIV05/2019__EPI_ISL_402128 spike protein mRNA gc (1-1273)(K986P_V987P_H69del_V70del_D614G)
aggagagggcgcuuggcuugcaaggacccugagcugcggcauugaagcacacccaacccaacucgacugaagucagccucacugaaccggaucugagaaucuucucucucugggcuugccagggcucuccgaaccuagcuagcauccucuucaauuccaacuagaaagcuuaccauguucguguuccuggugcugcugccccuggugagcagccagugcgugaaccugaccacccggacccagcugcccccugccuacaccaacagcuucacccggggcguguacuaccccgacaagguguuccggagcagcgugcugcacagcacccaggaccuguuccugcccuucuucagcaacgugaccugguuccacgccaucagcggcaccaacggcaccaagcgguucgacaacccagugcugcccuucaacgacggcguguacuucgccagcaccgagaagucaaacaucauccggggcuggaucuucggcaccacccuggacagcaagacacagagccugcugaucgugaacaacgccaccaacguggugaucaaggugugcgaguuucaguucugcaacgaccccuuccugggcguguacuaccacaagaacaacaagagcuggauggagagcgaguuccggguguacagcagcgcuaacaauugcaccuucgaguacgucagccagcccuuccugauggaccucgagggcaagcagggcaacuucaagaaccugcgggaguucguguucaagaacaucgauggcuacuucaagaucuacagcaagcacacccccaucaaccuggugcgggaccugccccagggauucagcgcccuggagccucugguggaccugcccaucggcaucaacaucaccagguuccagacccugcuggcccugcaccggagcuaccugacccccggcgacagcagcagcggcuggaccgccggcgccgccgcauacuacgugggcuaccugcagccacggaccuuccugcugaaguacaacgagaacggcaccaucaccgacgccguggacugcgcccuggacccccugagcgagaccaagugcacccuaaagagcuucaccguggagaagggcaucuaccagaccagcaacuuccgggugcagcccacugagagcaucgugcgguuccccaacauuaccaaccugugucccuucggcgagguguucaacgccacccgguucgccagcguguacgccuggaaccggaagcggaucagcaacugcguggccgacuacagcgugcuguacaacagcgccagcuucagcaccuucaagugcuacggcgugagcccuaccaagcugaacgaccugugcuucaccaacguguacgcugacagcuucgugauccggggcgacgaggugcggcagaucgcccccggccagaccggcaagaucgccgacuacaacuacaagcugcccgacgacuucaccggcugcgugaucgccuggaacagcaacaaccuggacagcaaggugggcggcaacuacaacuaccuguaccggcuguuccguaagagcaaccugaagccauucgagcgggacaucagcaccgagaucuaccaggccggcagcacccccugcaacgguguggagggcuuuaacugcuacuucccccugcagagcuacggcuuccagcccaccaacggcgugggcuaccagcccuaccgggugguggugcugagcuucgagcugcugcacgcccccgccaccgugugcggcccuaaaaagagcaccaaccuggugaagaacaagugcgugaacuucaauuucaacggccugaccggcaccggcgugcugaccgagagcaacaagaaguuccugcccuuccagcaguucggccgggauaucgccgacaccaccgacgcagugcgggacccccagacccuggagauccuggacaucaccccaugcagcuucggcggcgugagcgugaucacccccggcacaaacaccagcaaccaggucgccgugcuguaccagggagugaacugcaccgaggugcccguggccauccacgccgaccagcugacccccaccuggcggguguacagcaccggcagcaacguguuccagacccgggccggcugccugaucggcgccgagcacgugaacaacuccuacgagugcgacauccccaucggcgcuggcaucugcgccagcuaccagacccagaccaacagcccccggcgggcccggagcguggccagccagagcaucaucgccuacaccaugagcuuaggcgccgagaacagcguggccuacagcaacaacagcaucgcgaucccuaccaacuucaccaucagcgugaccaccgagauacugcccgugagcaugaccaagaccagcguggacuguaccauguacaucugcggcgacagcaccgagugcagcaaccugcugcugcaguacggcagcuucugcacccagcugaaccgggcccugaccggcaucgccguggagcaggacaagaacacccaagagguguucgcccaggugaagcagaucuacaagacucccccaaucaaggacuucggcggcuucaacuucagccagauccugcccgaccccagcaagcccagcaagcggagcuucaucgaggaccugcuguucaacaaggugacccuggccgacgccggcuucaucaagcaguacggcgacugccugggggauaucgccgcucgggaccugaucugcgcccagaaguucaacggccugaccgugcugcccccucugcugaccgacgagaugaucgcccaguacaccagcgcccugcuugccggcaccaucaccagcggcuggaccuucggcgccggcgcagcccugcagauccccuucgccaugcagauggccuaccgguucaacggcaucggcgugacccagaacgugcuguacgagaaccagaagcugaucgccaaccaguucaacagcgccaucggcaagauccaggacagccugagcagcaccgccagcgcccugggcaagcugcaggacguggugaaccagaacgcucaggcccugaacacccuggugaagcagcugagcagcaacuucggcgccaucagcucagugcugaaugacauccugagcaggcuggaucccccagaggccgaggugcagaucgaccggcugaucaccggccggcugcagagccugcagaccuacgugacccagcagcugauccgggccgccgagauccgggccagcgccaaccuggcagccaccaagaugagcgagugcgugcugggccagagcaagcggguggacuuuugcggcaagggcuaccaccugaugagcuucccccagagcgcuccccacggcgugguguuccuccacgugacauacgugcccgcccaggagaagaacuucaccaccgcccccgccauuugccacgacggcaaggcccacuucccccgggagggagucuucgugagcaacggcacccacugguucgugacccagcggaacuucuacgagccucagaucaucaccaccgacaacaccuucgugagcggcaacugcgacguggugaucggcaucgugaacaacaccguguacgacccccugcagcccgagcuggacagcuucaaggaggagcuggacaaguacuucaagaaccacaccagcccagacguggaccugggcgacaucagcggcaucaacgccagcguggugaacauccagaaggagaucgaccggcugaacgagguggccaagaaccugaacgagagccugaucgaccugcaggagcugggcaaguacgagcaguacaucaaguggcccugguacaucuggcugggcuucaucgccggccugaucgccaucgugauggugaccaucaugcugugcugcaugaccagcugcuguagcugccugaagggcugcugcagcugcggcagcugcugcaaguucgacgaggacgacagcgagcccgugcugaagggcgugaagcugcacuacaccugaggacuagucccuguucccagagcccacuuuuuuuucuuuuuuugaaauaaaauagccugucuuucagaucuaaaaaaaaaaaaaaaaaaaaaaaaaaaaaaaaaaaaaaaaaaaaaaaaaaaaaaaaaaaaaaaaaaaaaaaaaaaaaaaaaaaaaaaaaaaaaaaaaaaa

SEQ ID NO: 25118 - RNA, 4167 nt, Artificial Sequence
  SARS-CoV-2/Wuhan/WIV05/2019__EPI_ISL_402128 spike protein mRNA gc (1-1273)(K986P_V987P_Y453F_D614G)
aggagagggcgcuuggcuugcaaggacccugagcugcggcauugaagcacacccaacccaacucgacugaagucagccucacugaaccggaucugagaaucuucucucucugggcuugccagggcucuccgaaccuagcuagcauccucuucaauuccaacuagaaagcuuaccauguucguguuccuggugcugcugccccuggugagcagccagugcgugaaccugaccacccggacccagcugcccccugccuacaccaacagcuucacccggggcguguacuaccccgacaagguguuccggagcagcgugcugcacagcacccaggaccuguuccugcccuucuucagcaacgugaccugguuccacgccauccacgugagcggcaccaacggcaccaagcgguucgacaacccagugcugcccuucaacgacggcguguacuucgccagcaccgagaagucaaacaucauccggggcuggaucuucggcaccacccuggacagcaagacacagagccugcugaucgugaacaacgccaccaacguggugaucaaggugugcgaguuucaguucugcaacgaccccuuccugggcguguacuaccacaagaacaacaagagcuggauggagagcgaguuccgggucuacagcagcgcuaacaauugcaccuucgaguacgugagccagcccuuccugauggaccucgagggcaagcagggcaacuucaagaaccugcgggaguucguguucaagaacaucgauggcuacuucaagaucuacagcaagcacacccccaucaaccuggugcgggaccugccccagggauucagcgcccuggagccucugguggaccugcccaucggcaucaacaucaccagguuccagacccugcuggcccugcaccggagcuaccugacccccggcgacagcagcagcggcuggaccgccggcgccgccgcauacuacgugggcuaccugcagccacggaccuuccugcugaaguacaacgagaacggcaccaucaccgacgccguggacugcgcccuggacccccugagcgagaccaagugcacccuaaagagcuucaccguggagaagggcaucuaccagaccagcaacuuccgggugcagcccacugagagcaucgugcgguuccccaacauuaccaaccugugucccuucggcgagguguucaacgccacccgguucgccagcguguacgccuggaaccggaagcggaucagcaacugcguggccgacuacagcgugcuguacaacagcgccagcuucagcaccuucaagugcuacggcgugagcccuaccaagcugaacgaccugugcuucaccaacguguacgcugacagcuucgugauccggggcgacgaggugcggcagaucgcccccggccagaccggcaagaucgccgacuacaacuacaagcugcccgacgacuucaccggcugcgugaucgccuggaacagcaacaaccuggacagcaaggugggcggcaacuacaacuaccuguuccggcuguuccguaagagcaaccugaagccauuugagcgggacaucagcaccgagaucuaccaggccggcagcacccccugcaacgguguggagggcuucaacugcuacuucccccugcagagcuacggcuuccagcccaccaacggcgugggcuaccagcccuaccgggugguggugcugagcuucgagcugcugcacgcccccgccaccgugugcggcccuaaaaagagcaccaaccuggugaagaacaagugcgugaacuucaauuucaacggccugaccggcaccggcgugcugaccgagagcaacaagaaguuccugcccuuccagcaguucggccgggauaucgccgacaccaccgacgcagugcgggacccccagacccuggagauccuggacaucaccccaugcagcuucggcggcgugagcgucaucacccccggcacaaacaccagcaaccagguggccgugcuguaccagggagugaacugcaccgaggugcccguggccauccacgccgaccagcugacccccaccuggcggguguacagcaccggcagcaacguguuccagacccgggccggcugccugaucggcgccgagcacgugaacaacuccuacgagugcgacauccccaucggcgcuggcaucugcgccagcuaccagacccagaccaacagcccccggcgggcccggagcguggccagccagagcaucaucgccuacaccaugagcuuaggcgccgagaacagcguggccuacagcaacaacagcaucgcgaucccuaccaacuucaccaucagcgugaccaccgagauacugcccgugagcaugaccaagaccagcguggacuguaccauguacaucugcggcgacagcaccgagugcagcaaccugcugcugcaguacggcagcuucugcacccagcugaaccgggcccugaccggcaucgccguggagcaggacaagaacacccaagagguguucgcccaggugaagcagaucuacaagacucccccaaucaaggacuucggcggcuucaacuucagccagauccugcccgaccccagcaagcccagcaagcggagcuucaucgaggaccugcuguucaacaaggugacccuggccgacgccggcuucaucaagcaguacggcgacugccugggggauaucgccgcucgggaccugaucugcgcccagaaguucaacggccugaccgugcugcccccucugcugaccgacgagaugaucgcccaguacaccagcgcccugcuugccggcaccaucaccagcggcuggaccuucggcgccggcgcagcccugcagauccccuucgccaugcagauggccuaccgguucaacggcaucggcgugacccagaacgugcuguacgagaaccagaagcugaucgccaaccaguucaacagcgccaucggcaagauccaggacagccugagcagcaccgccagcgcccugggcaagcugcaggacguggugaaccagaacgcucaggcccugaacacccuggugaagcagcugagcagcaacuuuggcgccaucagcucagugcugaaugacauccugagcaggcuggaucccccagaggccgaggugcagaucgaccggcugaucaccggccggcugcagagccugcagaccuacgugacccagcagcugauccgggccgccgagauccgggccagcgccaaccuggcagccaccaagaugagcgagugcgugcugggccagagcaagcggguggacuucugcggcaagggcuaccaccugaugagcuucccccagagcgcuccccacggcgugguguuccuccacgugacauacguccccgcccaggagaagaacuucaccaccgcccccgccauuugccacgacggcaaggcccacuucccccgggagggaguguucgugagcaacggcacccacugguucgugacccagcggaacuucuacgagccucagaucaucaccaccgacaacaccuucgugagcggcaacugcgacguggugaucggcaucgugaacaacaccguguacgacccccugcagcccgagcuggacagcuucaaggaggagcuggacaaguacuucaagaaccacaccagcccagacguggaccugggcgacaucagcggcaucaacgccagcguggugaacauccagaaggagaucgaccggcugaacgagguggccaagaaccugaacgagagccugaucgaccugcaggagcugggcaaguacgagcaguacaucaaguggcccugguacaucuggcugggcuucaucgccggccugaucgccaucgugauggugaccaucaugcugugcugcaugaccagcugcuguagcugccugaagggcugcugcagcugcggcagcugcugcaaguucgacgaggacgacagcgagcccgugcugaagggcgugaagcugcacuacaccugaggacuagucccuguucccagagcccacuuuuuuuucuuuuuuugaaauaaaauagccugucuuucagaucuaaaaaaaaaaaaaaaaaaaaaaaaaaaaaaaaaaaaaaaaaaaaaaaaaaaaaaaaaaaaaaaaaaaaaaaaaaaaaaaaaaaaaaaaaaaaaaaaaaaa

SEQ ID NO: 25119 - RNA, 4167 nt, Artificial Sequence
  SARS-CoV-2/Wuhan/WIV05/2019__EPI_ISL_402128 spike protein mRNA gc (1-1273)(K986P_V987P_D614G_I692V)
aggagagggcgcuuggcuugcaaggacccugagcugcggcauugaagcacacccaacccaacucgacugaagucagccucacugaaccggaucugagaaucuucucucucugggcuugccagggcucuccgaaccuagcuagcauccucuucaauuccaacuagaaagcuuaccauguucguguuccuggugcugcugccccuggugagcagccagugcgugaaccugaccacccggacccagcugcccccugccuacaccaacagcuucacccggggcguguacuaccccgacaagguguuccggagcagcgugcugcacagcacccaggaccuguuccugcccuucuucagcaacgugaccugguuccacgccauccacgugagcggcaccaacggcaccaagcgguucgacaacccagugcugcccuucaacgacggcguguacuucgccagcaccgagaagucaaacaucauccggggcuggaucuucggcaccacccuggacagcaagacacagagccugcugaucgugaacaacgccaccaacguggugaucaaggugugcgaguuucaguucugcaacgaccccuuccugggcguguacuaccacaagaacaacaagagcuggauggagagcgaguuccgggucuacagcagcgcuaacaauugcaccuucgaguacgugagccagcccuuccugauggaccucgagggcaagcagggcaacuucaagaaccugcgggaguucguguucaagaacaucgauggcuacuucaagaucuacagcaagcacacccccaucaaccuggugcgggaccugccccagggauucagcgcccuggagccucugguggaccugcccaucggcaucaacaucaccagguuccagacccugcuggcccugcaccggagcuaccugacccccggcgacagcagcagcggcuggaccgccggcgccgccgcauacuacgugggcuaccugcagccacggaccuuccugcugaaguacaacgagaacggcaccaucaccgacgccguggacugcgcccuggacccccugagcgagaccaagugcacccuaaagagcuucaccguggagaagggcaucuaccagaccagcaacuuccgggugcagcccacugagagcaucgugcgguuccccaacauuaccaaccugugucccuucggcgagguguucaacgccacccgguucgccagcguguacgccuggaaccggaagcggaucagcaacugcguggccgacuacagcgugcuguacaacagcgccagcuucagcaccuucaagugcuacggcgugagcccuaccaagcugaacgaccugugcuucaccaacguguacgcugacagcuucgugauccggggcgacgaggugcggcagaucgcccccggccagaccggcaagaucgccgacuacaacuacaagcugcccgacgacuucaccggcugcgugaucgccuggaacagcaacaaccuggacagcaaggugggcggcaacuacaacuaccuguaccggcuguuccguaagagcaaccugaagccauucgagcgggacaucagcaccgagaucuaccaggccggcagcacccccugcaacgguguggagggcuuuaacugcuacuucccccugcagagcuacggcuuccagcccaccaacggcgugggcuaccagcccuaccgggugguggugcugagcuucgagcugcugcacgcccccgccaccgugugcggcccuaaaaagagcaccaaccuggugaagaacaagugcgugaacuucaauuucaacggccugaccggcaccggcgugcugaccgagagcaacaagaaguuccugcccuuccagcaguucggccgggauaucgccgacaccaccgacgcagugcgggacccccagacccuggagauccuggacaucaccccaugcagcuucggcggcgugagcgucaucacccccggcacaaacaccagcaaccagguggccgugcuguaccagggagugaacugcaccgaggugcccguggccauccacgccgaccagcugacccccaccuggcggguguacagcaccggcagcaacguguuccagacccgggccggcugccugaucggcgccgagcacgugaacaacuccuacgagugcgacauccccaucggcgcuggcaucugcgccagcuaccagacccagaccaacagcccccggcgggcccggagcguggccagccagagcgugaucgccuacaccaugagcuuaggcgccgagaacagcguggccuacagcaacaacagcaucgcgaucccuaccaacuucaccaucagcgugaccaccgagauccugcccgugagcaugaccaagaccagcguggacuguaccauguacauaugcggcgacagcaccgagugcagcaaccugcugcugcaguacggcagcuucugcacccagcugaaccgggcccugaccggcaucgccguggagcaggacaagaacacccaagagguguucgcccaggugaagcagaucuacaagacucccccaaucaaggacuucggcggcuucaacuucagccagauccugcccgaccccagcaagcccagcaagcggagcuucaucgaggaccugcuguucaacaaggugacccuggccgacgccggcuucaucaagcaguacggcgacugccugggggauaucgccgcucgggaccugaucugcgcccagaaguucaacggccugaccgugcugcccccucugcugaccgacgagaugaucgcccaguacaccagcgcccugcuugccggcaccaucaccagcggcuggaccuucggcgccggcgcagcccugcagauccccuucgccaugcagauggccuaccgguucaacggcaucggcgugacccagaacgugcuguacgagaaccagaagcugaucgccaaccaguucaacagcgccaucggcaagauccaggacagccugagcagcaccgccagcgcccugggcaagcugcaggacguggugaaccagaacgcucaggcccugaacacccuggugaagcagcugagcagcaacuucggcgccaucagcucagugcugaaugacauccugagcaggcuggaucccccagaggccgaggugcagaucgaccggcugaucaccggccggcugcagagccugcagaccuacgugacccagcagcugauccgggccgccgagauccgggccagcgccaaccuggcagccaccaagaugagcgagugcgugcugggccagagcaagcggguggacuuuugcggcaagggcuaccaccugaugagcuucccccagagcgcuccccacggcgugguguuccuccacgucacauacgugcccgcccaggagaagaacuucaccaccgcccccgccaucugccacgacggcaaggcccacuucccccgggagggaguguucgugagcaacggcacccacugguucgugacccagcggaacuucuacgagccucagauuaucaccaccgacaacaccuucgugagcggcaacugcgacguggugaucggcaucgugaacaacaccguguacgacccccugcagcccgagcuggacagcuucaaggaggagcuggacaaguacuucaagaaccacaccagcccagacguggaccugggcgacaucagcggcaucaacgccagcguggugaacauccagaaggagaucgaccggcugaacgagguggccaagaaccugaacgagagccugaucgaccugcaggagcugggcaaguacgagcaguacaucaaguggcccugguacaucuggcugggcuucaucgccggccugaucgccaucgugauggugaccaucaugcugugcugcaugaccagcugcuguagcugccugaagggcugcugcagcugcggcagcugcugcaaguucgacgaggacgacagcgagcccgugcugaagggcgugaagcugcacuacaccugaggacuagucccuguucccagagcccacuuuuuuuucuuuuuuugaaauaaaauagccugucuuucagaucuaaaaaaaaaaaaaaaaaaaaaaaaaaaaaaaaaaaaaaaaaaaaaaaaaaaaaaaaaaaaaaaaaaaaaaaaaaaaaaaaaaaaaaaaaaaaaaaaaaaa

SEQ ID NO: 25120 - RNA, 4167 nt, Artificial Sequence
  SARS-CoV-2/Wuhan/WIV05/2019__EPI_ISL_402128 spike protein mRNA gc (1-1273)(K986P_V987P_D614G_M1229I)
aggagagggcgcuuggcuugcaaggacccugagcugcggcauugaagcacacccaacccaacucgacugaagucagccucacugaaccggaucugagaaucuucucucucugggcuugccagggcucuccgaaccuagcuagcauccucuucaauuccaacuagaaagcuuaccauguucguguuccuggugcugcugccccuggugagcagccagugcgugaaccugaccacccggacccagcugcccccugccuacaccaacagcuucacccggggcguguacuaccccgacaagguguuccggagcagcgugcugcacagcacccaggaccuguuccugcccuucuucagcaacgugaccugguuccacgccauccacgugagcggcaccaacggcaccaagcgguucgacaacccagugcugcccuucaacgacggcguguacuucgccagcaccgagaagucaaacaucauccggggcuggaucuucggcaccacccuggacagcaagacacagagccugcugaucgugaacaacgccaccaacguggugaucaaggugugcgaguuucaguucugcaacgaccccuuccugggcguguacuaccacaagaacaacaagagcuggauggagagcgaguuccgggucuacagcagcgcuaacaauugcaccuucgaguacgugagccagcccuuccugauggaccucgagggcaagcagggcaacuucaagaaccugcgggaguucguguucaagaacaucgauggcuacuucaagaucuacagcaagcacacccccaucaaccuggugcgggaccugccccagggauucagcgcccuggagccucugguggaccugcccaucggcaucaacaucaccagguuccagacccugcuggcccugcaccggagcuaccugacccccggcgacagcagcagcggcuggaccgccggcgccgccgcauacuacgugggcuaccugcagccacggaccuuccugcugaaguacaacgagaacggcaccaucaccgacgccguggacugcgcccuggacccccugagcgagaccaagugcacccuaaagagcuucaccguggagaagggcaucuaccagaccagcaacuuccgggugcagcccacugagagcaucgugcgguuccccaacauuaccaaccugugucccuucggcgagguguucaacgccacccgguucgccagcguguacgccuggaaccggaagcggaucagcaacugcguggccgacuacagcgugcuguacaacagcgccagcuucagcaccuucaagugcuacggcgugagcccuaccaagcugaacgaccugugcuucaccaacguguacgcugacagcuucgugauccggggcgacgaggugcggcagaucgcccccggccagaccggcaagaucgccgacuacaacuacaagcugcccgacgacuucaccggcugcgugaucgccuggaacagcaacaaccuggacagcaaggugggcggcaacuacaacuaccuguaccggcuguuccguaagagcaaccugaagccauucgagcgggacaucagcaccgagaucuaccaggccggcagcacccccugcaacgguguggagggcuuuaacugcuacuucccccugcagagcuacggcuuccagcccaccaacggcgugggcuaccagcccuaccgggugguggugcugagcuucgagcugcugcacgcccccgccaccgugugcggcccuaaaaagagcaccaaccuggugaagaacaagugcgugaacuucaauuucaacggccugaccggcaccggcgugcugaccgagagcaacaagaaguuccugcccuuccagcaguucggccgggauaucgccgacaccaccgacgcagugcgggacccccagacccuggagauccuggacaucaccccaugcagcuucggcggcgugagcgucaucacccccggcacaaacaccagcaaccagguggccgugcuguaccagggagugaacugcaccgaggugcccguggccauccacgccgaccagcugacccccaccuggcggguguacagcaccggcagcaacguguuccagacccgggccggcugccugaucggcgccgagcacgugaacaacuccuacgagugcgacauccccaucggcgcuggcaucugcgccagcuaccagacccagaccaacagcccccggcgggcccggagcguggccagccagagcaucaucgccuacaccaugagcuuaggcgccgagaacagcguggccuacagcaacaacagcaucgcgaucccuaccaacuucaccaucagcgugaccaccgagauacugcccgugagcaugaccaagaccagcguggacuguaccauguacaucugcggcgacagcaccgagugcagcaaccugcugcugcaguacggcagcuucugcacccagcugaaccgggcccugaccggcaucgccguggagcaggacaagaacacccaagagguguucgcccaggugaagcagaucuacaagacucccccaaucaaggacuucggcggcuucaacuucagccagauccugcccgaccccagcaagcccagcaagcggagcuucaucgaggaccugcuguucaacaaggugacccuggccgacgccggcuucaucaagcaguacggcgacugccugggggauaucgccgcucgggaccugaucugcgcccagaaguucaacggccugaccgugcugcccccucugcugaccgacgagaugaucgcccaguacaccagcgcccugcuugccggcaccaucaccagcggcuggaccuucggcgccggcgcagcccugcagauccccuucgccaugcagauggccuaccgguucaacggcaucggcgugacccagaacgugcuguacgagaaccagaagcugaucgccaaccaguucaacagcgccaucggcaagauccaggacagccugagcagcaccgccagcgcccugggcaagcugcaggacguggugaaccagaacgcucaggcccugaacacccuggugaagcagcugagcagcaacuucggcgccaucagcucagugcugaaugacauccugagcaggcuggaucccccagaggccgaggugcagaucgaccggcugaucaccggccggcugcagagccugcagaccuacgugacccagcagcugauccgggccgccgagauccgggccagcgccaaccuggcagccaccaagaugagcgagugcgugcugggccagagcaagcggguggacuuuugcggcaagggcuaccaccugaugagcuucccccagagcgcuccccacggcgugguguuccuccacgugacauacguccccgcccaggagaagaacuucaccaccgcccccgccauuugccacgacggcaaggcccacuucccccgggagggaguguucgugagcaacggcacccacugguucgugacccagcggaacuucuacgagccucagaucaucaccaccgacaacaccuucgugagcggcaacugcgacguggugaucggcaucgugaacaacaccguguacgacccccugcagcccgagcuggacagcuucaaggaggagcuggacaaguacuucaagaaccacaccagcccagacguggaccugggcgacaucagcggcaucaacgccagcguggugaacauccagaaggagaucgaccggcugaacgagguggccaagaaccugaacgagagccugaucgaccugcaggagcugggcaaguacgagcaguacaucaaguggcccugguacaucuggcugggcuucaucgccggccugaucgccaucgugaucgugaccaucaugcugugcugcaugaccagcugcuguagcugccugaagggcugcugcagcugcggcagcugcugcaaguucgacgaggacgacagcgagcccgugcugaagggcgugaagcugcacuacaccugaggacuagucccuguucccagagcccacuuuuuuuucuuuuuuugaaauaaaauagccugucuuucagaucuaaaaaaaaaaaaaaaaaaaaaaaaaaaaaaaaaaaaaaaaaaaaaaaaaaaaaaaaaaaaaaaaaaaaaaaaaaaaaaaaaaaaaaaaaaaaaaaaaaaa

SEQ ID NO: 25121 - RNA, 4161 nt, Artificial Sequence
  SARS-CoV-2/Wuhan/WIV05/2019__EPI_ISL_402128 spike protein mRNA gc (1-1273)(K986P_V987P_H69del_V70del_A222V_Y453F_S477N_D614G_I692V)
aggagagggcgcuuggcuugcaaggacccugagcugcggcauugaagcacacccaacccaacucgacugaagucagccucacugaaccggaucugagaaucuucucucucugggcuugccagggcucuccgaaccuagcuagcauccucuucaauuccaacuagaaagcuuaccauguucguguuccuggugcugcugccccuggugagcagccagugcgugaaccugaccacccggacccagcugcccccugccuacaccaacagcuucacccggggcguguacuaccccgacaagguguuccggagcagcgugcugcacagcacccaggaccuguuccugcccuucuucagcaacgugaccugguuccacgccaucagcggcaccaacggcaccaagcgguucgacaacccagugcugcccuucaacgacggcguguacuucgccagcaccgagaagucaaacaucauccggggcuggaucuucggcaccacccuggacagcaagacacagagccugcugaucgugaacaacgccaccaacguggugaucaaggugugcgaguuucaguucugcaacgaccccuuccugggcguguacuaccacaagaacaacaagagcuggauggagagcgaguuccggguguacagcagcgcuaacaauugcaccuucgaguacgucagccagcccuuccugauggaccucgagggcaagcagggcaacuucaagaaccugcgggaguucguguucaagaacaucgauggcuacuucaagaucuacagcaagcacacccccaucaaccuggugcgggaccugccccagggauucagcgugcuggagccucugguggaccugcccaucggcaucaacaucaccagguuccagacccugcuggcccugcaccggagcuaccugacccccggcgacagcagcagcggcuggaccgccggcgccgccgccuacuacgugggcuaccugcagccacggaccuuccugcugaaguacaacgagaacggcaccaucaccgacgcaguggacugcgcccuggacccccugagcgagaccaagugcacccuaaagagcuucaccguggagaagggcaucuaccagaccagcaacuuccgggugcagcccacugagagcaucgugcgguuccccaacauuaccaaccugugucccuucggcgagguguucaacgccacccgguucgccagcguguacgccuggaaccggaagcggaucagcaacugcguggccgacuacagcgugcuguacaacagcgccagcuucagcaccuucaagugcuacggcgugagcccuaccaagcugaacgaccugugcuucaccaacguguacgccgacagcuucgugauccggggcgacgaggugcggcagaucgcucccggccagaccggcaagaucgccgacuacaacuacaagcugcccgacgacuucaccggcugcgugaucgccuggaacagcaacaaccuggacagcaaggugggcggcaacuacaacuaccuguuccggcuguuccguaagagcaaccugaagccauuugagcgggacaucagcaccgagaucuaccaggccggcaacacccccugcaacgguguggagggcuucaacugcuacuucccccugcagagcuacggcuuccagcccaccaacggcgugggcuaccagcccuaccgggugguggugcugagcuucgagcugcugcacgcccccgccaccgugugcggcccuaaaaagagcaccaaccuggugaagaacaagugcgugaauuucaacuucaacggccugaccggcaccggcgugcugaccgagagcaacaagaaguuccugcccuuccagcaguucggccgggauaucgccgacaccaccgacgccgugcgggacccccagacccuggagauccuggacaucaccccaugcagcuucggcggcgugagcgucaucacccccggcacaaacaccagcaaccagguggcagugcuguaccagggagugaacugcaccgaggugcccguggccauccacgccgaccagcugacccccaccuggcggguguacagcaccggcagcaacguguuccagacccgggccggcugccugaucggcgccgagcacgugaacaacagcuacgagugcgacauccccaucggcgccggcaucugcgcuuccuaccagacccagaccaacagcccccggcgggcccggagcguggccagccagagcgugaucgccuacaccaugagcuuaggcgccgagaacagcguggccuacagcaacaacagcaucgccaucccuaccaacuucaccaucagcgugaccaccgagauccugcccgugagcaugaccaagaccagcguggacuguaccauguacauaugcggcgacagcaccgagugcagcaaccugcugcugcaguacggcagcuucugcacccagcugaaccgggcgcugaccggcaucgccguggagcaggacaagaacacccaagagguguucgcccaggugaagcagaucuacaagacucccccaaucaaggacuucggcggcuucaacuucagccagauccugcccgaccccagcaagcccagcaagcggagcuucaucgaggaccugcuguucaacaaggugacccuggccgacgccggcuucaucaagcaguacggcgacugccugggggauaucgccgcccgggaccugaucugcgcucagaaguucaacggccugaccgugcugcccccucugcugaccgacgagaugaucgcccaguacaccagcgcccugcuugccggcaccaucaccagcggcuggaccuucggcgccggcgccgcacugcagauccccuucgccaugcagauggccuaccgguucaacggcaucggcgugacccagaacgugcuguacgagaaccagaagcugaucgccaaccaguucaacagcgccaucggcaagauccaggacagccugagcagcaccgccagcgcccugggcaagcugcaggacguggugaaccagaacgcccaggcucugaacacccuggugaagcagcugagcagcaauuuuggcgccaucagcagcgugcugaacgacauccugucaaggcuggaucccccagaggccgaggugcagaucgaccggcugaucaccggccggcugcagagccugcagaccuacgugacccagcagcugauccgggccgccgagauccgggccagcgccaaccuggccgcaaccaagaugagcgagugcgugcugggccagagcaagcggguggacuucugcggcaagggcuaccaccugaugagcuucccccagagcgcuccccacggcgugguguuccuccacgucacauacgugcccgcccaggagaagaacuucaccaccgcccccgccaucugccacgacggcaaggcccacuucccccgggagggaguguucgugagcaacggcacccacugguucgugacccagcggaacuucuacgagccucagauuaucaccaccgacaacaccuucgugagcggcaacugcgacguggugaucggcaucgugaacaacaccguguacgacccccugcagcccgagcuggacagcuucaaggaggagcuggacaaguacuucaagaaccacaccagcccagacguggaccugggcgacaucagcggcaucaacgccagcguggugaacauccagaaggagaucgaccggcugaacgagguggccaagaaccugaacgagagccugaucgaccugcaggagcugggcaaguacgagcaguacaucaaguggcccugguacaucuggcugggcuucaucgccggccugaucgccaucgugauggugaccaucaugcugugcugcaugaccagcugcuguagcugccugaagggcugcugcagcugcggcagcugcugcaaguucgacgaggacgacagcgagcccgugcugaagggcgugaagcugcacuacaccugaggacuagucccuguucccagagcccacuuuuuuuucuuuuuuugaaauaaaauagccugucuuucagaucuaaaaaaaaaaaaaaaaaaaaaaaaaaaaaaaaaaaaaaaaaaaaaaaaaaaaaaaaaaaaaaaaaaaaaaaaaaaaaaaaaaaaaaaaaaaaaaaaaaaa

SEQ ID NO: 25122 - RNA, 4161 nt, Artificial Sequence
  SARS-CoV-2/Wuhan/WIV05/2019__EPI_ISL_402128 spike protein mRNA gc (1-1273)(K986P_V987P_H69del_V70del_Y453F_D614G_I692V_M1229I)
aggagagggcgcuuggcuugcaaggacccugagcugcggcauugaagcacacccaacccaacucgacugaagucagccucacugaaccggaucugagaaucuucucucucugggcuugccagggcucuccgaaccuagcuagcauccucuucaauuccaacuagaaagcuuaccauguucguguuccuggugcugcugccccuggugagcagccagugcgugaaccugaccacccggacccagcugcccccugccuacaccaacagcuucacccggggcguguacuaccccgacaagguguuccggagcagcgugcugcacagcacccaggaccuguuccugcccuucuucagcaacgugaccugguuccacgccaucagcggcaccaacggcaccaagcgguucgacaacccagugcugcccuucaacgacggcguguacuucgccagcaccgagaagucaaacaucauccggggcuggaucuucggcaccacccuggacagcaagacacagagccugcugaucgugaacaacgccaccaacguggugaucaaggugugcgaguuucaguucugcaacgaccccuuccugggcguguacuaccacaagaacaacaagagcuggauggagagcgaguuccggguguacagcagcgcuaacaauugcaccuucgaguacgucagccagcccuuccugauggaccucgagggcaagcagggcaacuucaagaaccugcgggaguucguguucaagaacaucgauggcuacuucaagaucuacagcaagcacacccccaucaaccuggugcgggaccugccccagggauucagcgcccuggagccucugguggaccugcccaucggcaucaacaucaccagguuccagacccugcuggcccugcaccggagcuaccugacccccggcgacagcagcagcggcuggaccgccggcgccgccgcauacuacgugggcuaccugcagccacggaccuuccugcugaaguacaacgagaacggcaccaucaccgacgccguggacugcgcccuggacccccugagcgagaccaagugcacccuaaagagcuucaccguggagaagggcaucuaccagaccagcaacuuccgggugcagcccacugagagcaucgugcgguuccccaacauuaccaaccugugucccuucggcgagguguucaacgccacccgguucgccagcguguacgccuggaaccggaagcggaucagcaacugcguggccgacuacagcgugcuguacaacagcgccagcuucagcaccuucaagugcuacggcgugagcccuaccaagcugaacgaccugugcuucaccaacguguacgcugacagcuucgugauccggggcgacgaggugcggcagaucgcccccggccagaccggcaagaucgccgacuacaacuacaagcugcccgacgacuucaccggcugcgugaucgccuggaacagcaacaaccuggacagcaaggugggcggcaacuacaacuaccuguuccggcuguuccguaagagcaaccugaagccauuugagcgggacaucagcaccgagaucuaccaggccggcagcacccccugcaacgguguggagggcuucaacugcuacuucccccugcagagcuacggcuuccagcccaccaacggcgugggcuaccagcccuaccgggugguggugcugagcuucgagcugcugcacgcccccgccaccgugugcggcccuaaaaagagcaccaaccuggugaagaacaagugcgugaacuucaauuucaacggccugaccggcaccggcgugcugaccgagagcaacaagaaguuccugcccuuccagcaguucggccgggauaucgccgacaccaccgacgcagugcgggacccccagacccuggagauccuggacaucaccccaugcagcuucggcggcgugagcgugaucacccccggcacaaacaccagcaaccaggucgccgugcuguaccagggagugaacugcaccgaggugcccguggccauccacgccgaccagcugacccccaccuggcggguguacagcaccggcagcaacguguuccagacccgggccggcugccugaucggcgccgagcacgugaacaacuccuacgagugcgacauccccaucggcgcuggcaucugcgccagcuaccagacccagaccaacagcccccggcgggcccggagcguggccagccagagcgugaucgccuacaccaugagcuuaggcgccgagaacagcguggccuacagcaacaacagcaucgcgaucccuaccaacuucaccaucagcgugaccaccgagauccugcccgugagcaugaccaagaccagcguggacuguaccauguacauaugcggcgacagcaccgagugcagcaaccugcugcugcaguacggcagcuucugcacccagcugaaccgggcccugaccggcaucgccguggagcaggacaagaacacccaagagguguucgcccaggugaagcagaucuacaagacucccccaaucaaggacuucggcggcuucaacuucagccagauccugcccgaccccagcaagcccagcaagcggagcuucaucgaggaccugcuguucaacaaggugacccuggccgacgccggcuucaucaagcaguacggcgacugccugggggauaucgccgcucgggaccugaucugcgcccagaaguucaacggccugaccgugcugcccccucugcugaccgacgagaugaucgcccaguacaccagcgcccugcuugccggcaccaucaccagcggcuggaccuucggcgccggcgcagcccugcagauccccuucgccaugcagauggccuaccgguucaacggcaucggcgugacccagaacgugcuguacgagaaccagaagcugaucgccaaccaguucaacagcgccaucggcaagauccaggacagccugagcagcaccgccagcgcccugggcaagcugcaggacguggugaaccagaacgcucaggcccugaacacccuggugaagcagcugagcagcaacuuuggcgccaucagcucagugcugaaugacauccugagcaggcuggaucccccagaggccgaggugcagaucgaccggcugaucaccggccggcugcagagccugcagaccuacgugacccagcagcugauccgggccgccgagauccgggccagcgccaaccuggcagccaccaagaugagcgagugcgugcugggccagagcaagcggguggacuucugcggcaagggcuaccaccugaugagcuucccccagagcgcuccccacggcgugguguuccuccacgugacauacguccccgcccaggagaagaacuucaccaccgcccccgccaucugccacgacggcaaggcccacuucccccgggagggaguguucgugagcaacggcacccacugguucgugacccagcggaacuucuacgagccucagauuaucaccaccgacaacaccuucgugagcggcaacugcgacguggugaucggcaucgugaacaacaccguguacgacccccugcagcccgagcuggacagcuucaaggaggagcuggacaaguacuucaagaaccacaccagcccagacguggaccugggcgacaucagcggcaucaacgccagcguggugaacauccagaaggagaucgaccggcugaacgagguggccaagaaccugaacgagagccugaucgaccugcaggagcugggcaaguacgagcaguacaucaaguggcccugguacaucuggcugggcuucaucgccggccugaucgccaucgugaucgugaccaucaugcugugcugcaugaccagcugcuguagcugccugaagggcugcugcagcugcggcagcugcugcaaguucgacgaggacgacagcgagcccgugcugaagggcgugaagcugcacuacaccugaggacuagucccuguucccagagcccacuuuuuuuucuuuuuuugaaauaaaauagccugucuuucagaucuaaaaaaaaaaaaaaaaaaaaaaaaaaaaaaaaaaaaaaaaaaaaaaaaaaaaaaaaaaaaaaaaaaaaaaaaaaaaaaaaaaaaaaaaaaaaaaaaaaaa

SEQ ID NO: 25123 - RNA, 4158 nt, Artificial Sequence
  SARS-CoV-2/Wuhan/WIV05/2019__EPI_ISL_402128 spike protein mRNA gc (1-1273)(K986P_V987P_K986P_V987P_H69del_V70del_Y144del_N501Y_A570 D_D614G_P681H_T716I_S982A_D1118H)
aggagagggcgcuuggcuugcaaggacccugagcugcggcauugaagcacacccaacccaacucgacugaagucagccucacugaaccggaucugagaaucuucucucucugggcuugccagggcucuccgaaccuagcuagcauccucuucaauuccaacuagaaagcuuaccauguucguguuccuggugcugcugccccuggugagcagccagugcgugaaccugaccacccggacccagcugcccccugccuacaccaacagcuucacccggggcguguacuaccccgacaagguguuccggagcagcgugcugcacagcacccaggaccuguuccugcccuucuucagcaacgugaccugguuccacgccaucagcggcaccaacggcaccaagcgguucgacaacccagugcugcccuucaacgacggcguguacuucgccagcaccgagaagucaaacaucauccggggcuggaucuucggcaccacccuggacagcaagacacagagccugcugaucgugaacaacgccaccaacguggugaucaaggugugcgaguuucaguucugcaacgaccccuuccugggcguguaccacaagaacaacaagagcuggauggagagcgaguuccggguguacagcagcgcuaacaauugcaccuucgaguacgucagccagcccuuccugauggaccucgagggcaagcagggcaacuucaagaaccugcgggaguucguguucaagaacaucgauggcuacuucaagaucuacagcaagcacacccccaucaaccuggugcgggaccugccccagggauucagcgcccuggagccucugguggaccugcccaucggcaucaacaucaccagguuccagacccugcuggcccugcaccggagcuaccugacccccggcgacagcagcagcggcuggaccgccggcgccgccgcauacuacgugggcuaccugcagccacggaccuuccugcugaaguacaacgagaacggcaccaucaccgacgccguggacugcgcccuggacccccugagcgagaccaagugcacccuaaagagcuucaccguggagaagggcaucuaccagaccagcaacuuccgggugcagcccacugagagcaucgugcgguuccccaacauuaccaaccugugucccuucggcgagguguucaacgccacccgguucgccagcguguacgccuggaaccggaagcggaucagcaacugcguggccgacuacagcgugcuguacaacagcgccagcuucagcaccuucaagugcuacggcgugagcccuaccaagcugaacgaccugugcuucaccaacguguacgcugacagcuucgugauccggggcgacgaggugcggcagaucgcccccggccagaccggcaagaucgccgacuacaacuacaagcugcccgacgacuucaccggcugcgugaucgccuggaacagcaacaaccuggacagcaaggugggcggcaacuacaacuaccuguaccggcuguuccguaagagcaaccugaagccauucgagcgggacaucagcaccgagaucuaccaggccggcagcacccccugcaacgguguggagggcuuuaacugcuacuucccccugcagagcuacggcuuccagcccaccuacggcgugggcuaccagcccuaccgggugguggugcugagcuucgagcugcugcacgcccccgccaccgugugcggcccuaaaaagagcaccaaccuggugaagaacaagugcgugaacuucaacuucaauggccugaccggcaccggcgugcugaccgagagcaacaagaaguuccugcccuuccagcaguucggccgggauaucgacgacaccaccgacgccgugcgggacccccagacccuggagauccuggacaucaccccaugcagcuucggcggcgugagcgugaucacccccggcacaaacaccagcaaccaggucgcagugcuguaccagggagugaacugcaccgaggugcccguggccauccacgccgaccagcugacccccaccuggcggguguacagcaccggcagcaacguguuccagacccgggccggcugccugaucggcgccgagcacgugaacaacuccuacgagugcgacauccccaucggcgccggcaucugcgcuagcuaccagacccagaccaacagccaccggcgggcccggagcguggccagccagagcaucaucgccuacaccaugagcuuaggcgccgagaacagcguggccuacagcaacaacagcaucgccauccccaucaacuucaccauaagcgugaccaccgagauccugccugugagcaugaccaagaccagcguggacuguaccauguacaucugcggcgacagcaccgagugcagcaaccugcugcugcaguacggcagcuucugcacccagcugaaccgggcgcugaccggcaucgccguggagcaggacaagaacacccaagagguguucgcccaggugaagcagaucuacaagaccccacccaucaaggacuucggcggcuucaacuucagccagauccugcccgaccccagcaagcccagcaagcggagcuucaucgaggaccugcuguucaacaaggugacucuggccgacgccggcuucaucaagcaguacggcgauugccugggggacaucgccgcccgggaccugaucugcgcucagaaguucaacggccugaccgugcugccuccccugcugaccgacgagaugaucgcccaguacaccagcgcccugcuugccggcaccaucaccagcggcuggaccuucggcgccggcgccgcacugcagauccccuucgccaugcagauggccuaccgguucaacggcaucggcgugacccagaacgugcuguacgagaaccagaagcugaucgccaaccaguucaacagcgccaucggcaagauccaggacagccugagcagcaccgccagcgcccugggcaagcugcaggacguggugaaccagaacgcccaggcucugaacacccuggugaagcagcugagcagcaacuucggcgccaucagcucagugcugaacgacauccuggccaggcuggacccacccgaggccgaggugcagaucgaccggcugaucaccggccggcugcagagccugcagaccuacgugacccagcagcugauccgggccgccgagauucgggccagcgccaaucuggcagccaccaagaugagcgagugcgugcugggccagagcaagcggguggacuuuugcggcaagggcuaccaccugaugagcuucccccagagcgcuccccacggcgugguguuccuccacgugaccuacgugcccgcccaggagaagaacuucacaaccgcccccgccaucugccacgacggcaaggcccacuucccccgggagggagucuucgugagcaacggcacccacugguucgugacccagcggaacuucuacgagccccagaucaucaccacccacaacaccuucgugagcggcaacugcgacguggugaucggcaucgugaacaacaccguguacgacccucugcagcccgagcuggacagcuucaaggaggagcuggacaaguacuucaagaaccacaccagccccgacguggaucugggcgacaucagcggcaucaacgccagcguggugaacauccagaaggagaucgaccggcugaacgagguggccaagaaccugaacgagagccugaucgaccugcaggagcugggcaaguacgagcaguacaucaaguggccaugguacaucuggcugggcuucaucgccggccugaucgccaucgugauggugaccaucaugcugugcugcaugaccagcugcuguagcugccugaagggcugcugcagcugcggcagcugcugcaaguucgacgaggacgacagcgagcccgugcugaagggcgugaagcugcacuacaccugaggacuagucccuguucccagagcccacuuuuuuuucuuuuuuugaaauaaaauagccugucuuucagaucuaaaaaaaaaaaaaaaaaaaaaaaaaaaaaaaaaaaaaaaaaaaaaaaaaaaaaaaaaaaaaaaaaaaaaaaaaaaaaaaaaaaaaaaaaaaaaaaaaaaa

SEQ ID NO: 25124 - RNA, 4167 nt, Artificial Sequence
  SARS-CoV-2/Wuhan/WIV05/2019__EPI_ISL_402128 spike protein mRNA gc (1-1273)(K986P_V987P_K986P_V987P_K417N_E484K_N501Y_D614G)
aggagagggcgcuuggcuugcaaggacccugagcugcggcauugaagcacacccaacccaacucgacugaagucagccucacugaaccggaucugagaaucuucucucucugggcuugccagggcucuccgaaccuagcuagcauccucuucaauuccaacuagaaagcuuaccauguucguguuccuggugcugcugccccuggugagcagccagugcgugaaccugaccacccggacccagcugcccccugccuacaccaacagcuucacccggggcguguacuaccccgacaagguguuccggagcagcgugcugcacagcacccaggaccuguuccugcccuucuucagcaacgugaccugguuccacgccauccacgugagcggcaccaacggcaccaagcgguucgacaacccagugcugcccuucaacgacggcguguacuucgccagcaccgagaagucaaacaucauccggggcuggaucuucggcaccacccuggacagcaagacacagagccugcugaucgugaacaacgccaccaacguggugaucaaggugugcgaguuucaguucugcaacgaccccuuccugggcguguacuaccacaagaacaacaagagcuggauggagagcgaguuccgggucuacagcagcgcuaacaauugcaccuucgaguacgugagccagcccuuccugauggaccucgagggcaagcagggcaacuucaagaaccugcgggaguucguguucaagaacaucgauggcuacuucaagaucuacagcaagcacacccccaucaaccuggugcgggaccugccccagggauucagcgcccuggagccucugguggaccugcccaucggcaucaacaucaccagguuccagacccugcuggcccugcaccggagcuaccugacccccggcgacagcagcagcggcuggaccgccggcgccgccgcauacuacgugggcuaccugcagccacggaccuuccugcugaaguacaacgagaacggcaccaucaccgacgccguggacugcgcccuggacccccugagcgagaccaagugcacccuaaagagcuucaccguggagaagggcaucuaccagaccagcaacuuccgggugcagcccacugagagcaucgugcgguuccccaacauuaccaaccugugucccuucggcgagguguucaacgccacccgguucgccagcguguacgccuggaaccggaagcggaucagcaacugcguggccgacuacagcgugcuguacaacagcgccagcuucagcaccuucaagugcuacggcgugagcccuaccaagcugaacgaccugugcuucaccaacguguacgcugacagcuucgugauccggggcgacgaggugcggcagaucgcccccggccagaccggcaacaucgccgacuacaacuacaagcugcccgacgacuucaccggcugcgugaucgccuggaacagcaacaaccuggacagcaaggugggcggcaacuacaacuaccuguaccggcuguuccguaagagcaaccugaagccauucgagcgggacaucagcaccgagaucuaccaggccggcagcacccccugcaacggugugaagggcuuuaacugcuacuucccccugcagagcuacggcuuccagcccaccuacggcgugggcuaccagcccuaccgggugguggugcugagcuucgagcugcugcacgcccccgccaccgugugcggcccuaaaaagagcaccaaccuggugaagaacaagugcgugaacuucaauuucaacggccugaccggcaccggcgugcugaccgagagcaacaagaaguuccugcccuuccagcaguucggccgggauaucgccgacaccaccgacgcagugcgggacccccagacccuggagauccuggacaucaccccaugcagcuucggcggcgugagcgucaucacccccggcacaaacaccagcaaccagguggccgugcuguaccagggagugaacugcaccgaggugcccguggccauccacgccgaccagcugacccccaccuggcggguguacagcaccggcagcaacguguuccagacccgggccggcugccugaucggcgccgagcacgugaacaacuccuacgagugcgacauccccaucggcgcuggcaucugcgccagcuaccagacccagaccaacagcccccggcgggcccggagcguggccagccagagcaucaucgccuacaccaugagcuuaggcgccgagaacagcguggccuacagcaacaacagcaucgcgaucccuaccaacuucaccaucagcgugaccaccgagauacugcccgugagcaugaccaagaccagcguggacuguaccauguacaucugcggcgacagcaccgagugcagcaaccugcugcugcaguacggcagcuucugcacccagcugaaccgggcccugaccggcaucgccguggagcaggacaagaacacccaagagguguucgcccaggugaagcagaucuacaagacucccccaaucaaggacuucggcggcuucaacuucagccagauccugcccgaccccagcaagcccagcaagcggagcuucaucgaggaccugcuguucaacaaggugacccuggccgacgccggcuucaucaagcaguacggcgacugccugggggauaucgccgcucgggaccugaucugcgcccagaaguucaacggccugaccgugcugcccccucugcugaccgacgagaugaucgcccaguacaccagcgcccugcuugccggcaccaucaccagcggcuggaccuucggcgccggcgcagcccugcagauccccuucgccaugcagauggccuaccgguucaacggcaucggcgugacccagaacgugcuguacgagaaccagaagcugaucgccaaccaguucaacagcgccaucggcaagauccaggacagccugagcagcaccgccagcgcccugggcaagcugcaggacguggugaaccagaacgcucaggcccugaacacccuggugaagcagcugagcagcaacuucggcgccaucagcucagugcugaaugacauccugagcaggcuggaucccccagaggccgaggugcagaucgaccggcugaucaccggccggcugcagagccugcagaccuacgugacccagcagcugauccgggccgccgagauccgggccagcgccaaccuggcagccaccaagaugagcgagugcgugcugggccagagcaagcggguggacuuuugcggcaagggcuaccaccugaugagcuucccccagagcgcuccccacggcgugguguuccuccacgugacauacguccccgcccaggagaagaacuucaccaccgcccccgccauuugccacgacggcaaggcccacuucccccgggagggaguguucgugagcaacggcacccacugguucgugacccagcggaacuucuacgagccucagaucaucaccaccgacaacaccuucgugagcggcaacugcgacguggugaucggcaucgugaacaacaccguguacgacccccugcagcccgagcuggacagcuucaaggaggagcuggacaaguacuucaagaaccacaccagcccagacguggaccugggcgacaucagcggcaucaacgccagcguggugaacauccagaaggagaucgaccggcugaacgagguggccaagaaccugaacgagagccugaucgaccugcaggagcugggcaaguacgagcaguacaucaaguggcccugguacaucuggcugggcuucaucgccggccugaucgccaucgugauggugaccaucaugcugugcugcaugaccagcugcuguagcugccugaagggcugcugcagcugcggcagcugcugcaaguucgacgaggacgacagcgagcccgugcugaagggcgugaagcugcacuacaccugaggacuagucccuguucccagagcccacuuuuuuuucuuuuuuugaaauaaaauagccugucuuucagaucuaaaaaaaaaaaaaaaaaaaaaaaaaaaaaaaaaaaaaaaaaaaaaaaaaaaaaaaaaaaaaaaaaaaaaaaaaaaaaaaaaaaaaaaaaaaaaaaaaaaa

SEQ ID NO: 25125 - RNA, 4158 nt, Artificial Sequence
  SARS-CoV-2/Wuhan/WIV05/2019__EPI_ISL_402128 spike protein mRNA gc (1-1273)(K986P_V987P_K986P_V987P_L18F_D80A_D215G_L242del_A243del_ L244del_R246I_K417N_E484K_N501Y_D614G_A701V)
aggagagggcgcuuggcuugcaaggacccugagcugcggcauugaagcacacccaacccaacucgacugaagucagccucacugaaccggaucugagaaucuucucucucugggcuugccagggcucuccgaaccuagcuagcauccucuucaauuccaacuagaaagcuuaccauguucguguuccuggugcugcugccccuggugagcagccagugcgugaacuucaccacccggacccagcugcccccugccuacaccaacagcuucacccggggcguguacuaccccgacaagguguuccggagcagcgugcugcacagcacccaggaccuguuccugcccuucuucagcaacgugaccugguuccacgccauccacgugagcggcaccaacggcaccaagcgguucgccaacccagugcugcccuucaacgacggcguguacuucgccagcaccgagaagucaaacaucauccggggcuggaucuuuggcaccacccuggacagcaagacacagagccugcugaucgugaacaacgcuaccaacguggugaucaaggugugcgaguuccaguucugcaacgaccccuuccugggcguguacuaccacaagaacaacaagagcuggauggagagcgaguuccgggucuacagcagcgccaacaauugcaccuucgaguacgugagccagcccuuccugauggaccuggagggcaagcagggcaacuucaagaaccuccgggaguucguguucaagaacaucgacggcuacuucaagaucuacagcaagcacacccccaucaaccuggugcggggacugccccagggcuucagcgcccuggagccucugguggaucugcccaucggcaucaacaucaccagguuccagacccugcacaucagcuaccugacccccggcgacagcagcagcggcuggaccgccggcgccgccgcauacuacgugggcuaccugcagccacggaccuuccugcugaaguacaacgagaacggcaccaucaccgacgccguggacugcgcccuggacccccugagcgagaccaagugcacccuuaagagcuucaccguggagaagggcaucuaccagaccagcaacuuccgggugcagcccacugagagcauugugcgguuccccaacaucaccaaccugugucccuucggcgagguguucaacgccacccgguucgccagcguguacgccuggaaccggaagcggaucagcaacugcguggccgacuacagcgugcuguacaacagcgccagcuucagcaccuucaagugcuacggcgugagcccuaccaagcugaacgaccugugcuucaccaacguguacgcugacagcuucgugauccggggcgacgaggugcggcagaucgcccccggccagaccggcaacaucgccgacuacaacuacaagcugcccgacgacuucaccggcugcgugaucgccuggaacagcaacaaccuggacagcaaggugggcggcaacuacaacuaccuguaccggcuauuccguaagagcaaccugaagccauuugagcgggacaucagcaccgagaucuaccaggccgguagcacccccugcaacggcgugaagggcuucaacugcuacuucccccugcagagcuacggcuuccagcccaccuacggcgugggcuaccagcccuaccgggugguggugcugagcuucgagcugcugcacgcccccgccaccgugugcggcccuaaaaagagcaccaaccuggugaagaacaagugcgugaacuucaauuucaacggccugaccggcaccggcgugcugaccgagagcaacaagaaguuccugcccuuccagcaguucggccgggacaucgccgacaccaccgaugcagugcgggacccccagacccuggagauccuggacaucaccccaugcagcuucggcggcgugagcgucaucacccccggaacaaacaccagcaaccagguggccgugcuguaccagggcgugaacugcaccgaggugcccguggccauccacgccgaccagcugacccccaccuggcggguguacagcaccggcagcaacguguuccagacccgggccggcugccugaucggcgccgagcacgugaacaacuccuacgagugcgacauccccaucggcgcuggcaucugcgccagcuaccagacccagaccaacagcccccggcgggcccggagcguggccagccagagcaucaucgccuacaccaugagccugggcguggagaacagcguggccuacagcaacaacagcaucgccaucccuaccaacuucaccauaagcgugaccaccgagauccugcccgugagcaugaccaagaccagcguggacuguaccauguacaucugcggcgacagcaccgagugcagcaaccuguuacugcaguacggcagcuucugcacccagcugaaccgggcgcugaccggcaucgccguggagcaggacaagaacacccaagagguguucgcccaggugaagcagaucuacaagacucccccaaucaaggacuucggcggcuucaacuucagccagauccugcccgaccccagcaagcccagcaagcggagcuucaucgaggaccugcuguucaacaaggugacccuggccgacgccggcuucaucaagcaguacggggacugccugggcgacaucgccgcccgggaccugaucugcgcucagaaguucaacggccugaccgugcugcccccucugcugaccgaugagaugaucgcccaguacaccagcgcccugcuggccggcaccaucaccagcggcuggaccuucggcgccggcgccgcacugcagauccccuucgccaugcagauggccuaccgguucaacggcaucggcgugacccagaacgugcuguacgagaaccagaagcugaucgccaaccaguucaacagcgccaucggcaagauccaggacagccugagcagcaccgccagcgcccugggcaagcugcaggacguggugaaccagaacgcccaggcucugaacacccuggugaagcagcugagcagcaacuuuggcgccaucagcucagugcugaaugacauccugagccggcuggaucccccagaggccgaggugcagaucgacaggcugaucaccggccggcugcagagccugcagaccuacgugacccagcagcugauccgggccgccgagauucgggccagcgccaaccuggccgcaaccaagaugagcgagugcgugcugggccagagcaagcggguggacuucugcggcaagggcuaccaccugaugagcuucccccagagcgcuccccacggcgugguguuccugcacgucacauacgugcccgcccaggagaagaacuucaccaccgcccccgccaucugccacgacggaaaggcccacuucccccgggagggcguguucgugagcaacggcacccacugguucgugacccagcggaacuucuacgagccucagaucaucaccaccgacaacaccuucgugagcggcaacugcgacguggugaucggcaucgugaacaacaccguguacgacccccugcagcccgagcuggacagcuucaaggaggagcucgacaaguacuucaagaaccacaccagcccagacguggaccugggcgacaucagcggcaucaacgccagcguggugaacauccagaaggagaucgaccggcugaacgagguggccaagaaccugaacgagagccugaucgaccugcaggagcugggcaaguacgagcaguacaucaaguggcccugguacaucuggcugggcuucaucgccggccugaucgccaucgugauggugaccaucaugcugugcugcaugaccagcugcuguagcugccugaagggcugcugcagcugcggcagcugcugcaaguucgacgaggacgacagcgagcccgugcugaagggcgugaagcugcacuacaccugaggacuagucccuguucccagagcccacuuuuuuuucuuuuuuugaaauaaaauagccugucuuucagaucuaaaaaaaaaaaaaaaaaaaaaaaaaaaaaaaaaaaaaaaaaaaaaaaaaaaaaaaaaaaaaaaaaaaaaaaaaaaaaaaaaaaaaaaaaaaaaaaaaaaa

SEQ ID NO: 25126 - RNA, 4167 nt, Artificial Sequence
  SARS-CoV-2/Wuhan/WIV05/2019__EPI_ISL_402128 spike protein mRNA gc (1-1273)(K986P_V987P_K986P_V987P_E484K_D614G)
aggagagggcgcuuggcuugcaaggacccugagcugcggcauugaagcacacccaacccaacucgacugaagucagccucacugaaccggaucugagaaucuucucucucugggcuugccagggcucuccgaaccuagcuagcauccucuucaauuccaacuagaaagcuuaccauguucguguuccuggugcugcugccccuggugagcagccagugcgugaaccugaccacccggacccagcugcccccugccuacaccaacagcuucacccggggcguguacuaccccgacaagguguuccggagcagcgugcugcacagcacccaggaccuguuccugcccuucuucagcaacgugaccugguuccacgccauccacgugagcggcaccaacggcaccaagcgguucgacaacccagugcugcccuucaacgacggcguguacuucgccagcaccgagaagucaaacaucauccggggcuggaucuucggcaccacccuggacagcaagacacagagccugcugaucgugaacaacgccaccaacguggugaucaaggugugcgaguuucaguucugcaacgaccccuuccugggcguguacuaccacaagaacaacaagagcuggauggagagcgaguuccgggucuacagcagcgcuaacaauugcaccuucgaguacgugagccagcccuuccugauggaccucgagggcaagcagggcaacuucaagaaccugcgggaguucguguucaagaacaucgauggcuacuucaagaucuacagcaagcacacccccaucaaccuggugcgggaccugccccagggauucagcgcccuggagccucugguggaccugcccaucggcaucaacaucaccagguuccagacccugcuggcccugcaccggagcuaccugacccccggcgacagcagcagcggcuggaccgccggcgccgccgcauacuacgugggcuaccugcagccacggaccuuccugcugaaguacaacgagaacggcaccaucaccgacgccguggacugcgcccuggacccccugagcgagaccaagugcacccuaaagagcuucaccguggagaagggcaucuaccagaccagcaacuuccgggugcagcccacugagagcaucgugcgguuccccaacauuaccaaccugugucccuucggcgagguguucaacgccacccgguucgccagcguguacgccuggaaccggaagcggaucagcaacugcguggccgacuacagcgugcuguacaacagcgccagcuucagcaccuucaagugcuacggcgugagcccuaccaagcugaacgaccugugcuucaccaacguguacgcugacagcuucgugauccggggcgacgaggugcggcagaucgcccccggccagaccggcaagaucgccgacuacaacuacaagcugcccgacgacuucaccggcugcgugaucgccuggaacagcaacaaccuggacagcaaggugggcggcaacuacaacuaccuguaccggcuguuccguaagagcaaccugaagccauucgagcgggacaucagcaccgagaucuaccaggccggcagcacccccugcaacggugugaagggcuuuaacugcuacuucccccugcagagcuacggcuuccagcccaccaacggcgugggcuaccagcccuaccgggugguggugcugagcuucgagcugcugcacgcccccgccaccgugugcggcccuaaaaagagcaccaaccuggugaagaacaagugcgugaacuucaauuucaacggccugaccggcaccggcgugcugaccgagagcaacaagaaguuccugcccuuccagcaguucggccgggauaucgccgacaccaccgacgcagugcgggacccccagacccuggagauccuggacaucaccccaugcagcuucggcggcgugagcgucaucacccccggcacaaacaccagcaaccagguggccgugcuguaccagggagugaacugcaccgaggugcccguggccauccacgccgaccagcugacccccaccuggcggguguacagcaccggcagcaacguguuccagacccgggccggcugccugaucggcgccgagcacgugaacaacuccuacgagugcgacauccccaucggcgcuggcaucugcgccagcuaccagacccagaccaacagcccccggcgggcccggagcguggccagccagagcaucaucgccuacaccaugagcuuaggcgccgagaacagcguggccuacagcaacaacagcaucgcgaucccuaccaacuucaccaucagcgugaccaccgagauacugcccgugagcaugaccaagaccagcguggacuguaccauguacaucugcggcgacagcaccgagugcagcaaccugcugcugcaguacggcagcuucugcacccagcugaaccgggcccugaccggcaucgccguggagcaggacaagaacacccaagagguguucgcccaggugaagcagaucuacaagacucccccaaucaaggacuucggcggcuucaacuucagccagauccugcccgaccccagcaagcccagcaagcggagcuucaucgaggaccugcuguucaacaaggugacccuggccgacgccggcuucaucaagcaguacggcgacugccugggggauaucgccgcucgggaccugaucugcgcccagaaguucaacggccugaccgugcugcccccucugcugaccgacgagaugaucgcccaguacaccagcgcccugcuugccggcaccaucaccagcggcuggaccuucggcgccggcgcagcccugcagauccccuucgccaugcagauggccuaccgguucaacggcaucggcgugacccagaacgugcuguacgagaaccagaagcugaucgccaaccaguucaacagcgccaucggcaagauccaggacagccugagcagcaccgccagcgcccugggcaagcugcaggacguggugaaccagaacgcucaggcccugaacacccuggugaagcagcugagcagcaacuucggcgccaucagcucagugcugaaugacauccugagcaggcuggaucccccagaggccgaggugcagaucgaccggcugaucaccggccggcugcagagccugcagaccuacgugacccagcagcugauccgggccgccgagauccgggccagcgccaaccuggcagccaccaagaugagcgagugcgugcugggccagagcaagcggguggacuuuugcggcaagggcuaccaccugaugagcuucccccagagcgcuccccacggcgugguguuccuccacgugacauacguccccgcccaggagaagaacuucaccaccgcccccgccauuugccacgacggcaaggcccacuucccccgggagggaguguucgugagcaacggcacccacugguucgugacccagcggaacuucuacgagccucagaucaucaccaccgacaacaccuucgugagcggcaacugcgacguggugaucggcaucgugaacaacaccguguacgacccccugcagcccgagcuggacagcuucaaggaggagcuggacaaguacuucaagaaccacaccagcccagacguggaccugggcgacaucagcggcaucaacgccagcguggugaacauccagaaggagaucgaccggcugaacgagguggccaagaaccugaacgagagccugaucgaccugcaggagcugggcaaguacgagcaguacaucaaguggcccugguacaucuggcugggcuucaucgccggccugaucgccaucgugauggugaccaucaugcugugcugcaugaccagcugcuguagcugccugaagggcugcugcagcugcggcagcugcugcaaguucgacgaggacgacagcgagcccgugcugaagggcgugaagcugcacuacaccugaggacuagucccuguucccagagcccacuuuuuuuucuuuuuuugaaauaaaauagccugucuuucagaucuaaaaaaaaaaaaaaaaaaaaaaaaaaaaaaaaaaaaaaaaaaaaaaaaaaaaaaaaaaaaaaaaaaaaaaaaaaaaaaaaaaaaaaaaaaaaaaaaaaaa

SEQ ID NO: 25127 - RNA, 4167 nt, Artificial Sequence
  SARS-CoV-2/Wuhan/WIV05/2019__EPI_ISL_402128 spike protein mRNA gc (1-1273)(K986P_V987P_K986P_V987P_L18F_T20N_P26S_D138Y_R190S_K417T _E484K_N501Y_D614G_H655Y_T1027I)
aggagagggcgcuuggcuugcaaggacccugagcugcggcauugaagcacacccaacccaacucgacugaagucagccucacugaaccggaucugagaaucuucucucucugggcuugccagggcucuccgaaccuagcuagcauccucuucaauuccaacuagaaagcuuaccauguucguguuccuggugcugcugccccuggugagcagccagugcgugaacuucaccaaccggacccagcugcccagcgccuacaccaacagcuucacccggggcguguacuacccugacaagguguuccggagcagcgugcugcacagcacccaggaccuguuccugcccuucuucagcaacgugaccugguuccacgccauccacgugagcggcaccaacggcaccaagcgguucgacaaccccgugcugccauucaacgacggcguguacuucgccagcaccgagaagucaaacaucauccggggcuggaucuuuggcaccacccuggacagcaagacccagagccugcugaucgugaacaacgccacaaacguggugaucaaggugugcgaguuccaguucugcaacuaccccuuccugggcguguacuaccacaagaacaacaagagcuggauggagagcgaguuccgggucuacagcagcgcuaauaacugcaccuucgaguacgugagccagcccuuccugauggaccuggagggcaagcagggcaacuucaagaaccucagcgaguucguguucaagaacaucgacggcuacuucaagaucuacagcaagcacacccccaucaaccuggugcgggaucugccccagggauucagcgcccuggagccccugguggaccugccuaucggcaucaacaucacccgguuccagacccugcuggcccugcacaggagcuaccugacccccggcgacagcagcagcggcuggaccgccggcgccgccgcauacuacgugggcuaccugcagccccggaccuuccugcugaaguacaacgagaacggcaccaucaccgacgccguggacugcgcccuggacccacugagcgagaccaagugcacccuaaagagcuucaccguggagaagggcaucuaccagaccagcaacuuccgggugcagcccaccgagagcaucgugcgguuccccaacauuacuaaccugugucccuucggcgagguguucaacgccacccgguucgccagcguguacgccuggaaccggaagcggaucagcaacugcguggccgacuacagcgugcuguacaacagcgccagcuucagcaccuucaagugcuacggcgugagccccaccaagcugaacgaccugugcuucaccaacguguacgcugacagcuucgugauccggggcgacgaggugcggcagaucgccccuggccagaccggcaccaucgccgacuacaacuacaagcugcccgacgacuucaccggcugcgugaucgccuggaacagcaacaaccuggacagcaaggugggcggcaacuacaacuaccuguaccggcuguuccguaagagcaaccugaagcccuuugagcgggacaucagcaccgagaucuaccaggccggcagcaccccaugcaacggugugaagggcuucaacugcuacuucccccugcagagcuacggcuuccagcccaccuacggcgugggcuaccagcccuaccgggugguggugcugagcuucgagcugcugcacgcccccgccaccgugugcggccccaaaaagagcaccaaccuggugaagaacaagugcgugaacuucaauuucaacggccugaccggcaccggcgugcugaccgagagcaacaagaaguuccugccuuuccagcaguucggccgggacaucgccgauaccaccgacgcagugcgggacccccagacccuggagauccuggacaucacccccugcagcuucggcggcgugagcgucaucaccccaggcacaaacaccagcaaccagguggccgugcuguaccagggagugaacugcaccgaggugcccguggccauccacgccgaccagcugacccccaccuggcggguguacuccaccggcagcaacguguuccagacccgggccggcugccugaucggcgccgaguacgugaacaacagcuacgagugcgacauccccaucggcgcuggcaucugcgccagcuaccagacccagaccaacagcccccggcgggcccggagcguggccagccagagcaucaucgccuacaccaugagccugggcgccgagaacagcguggccuacagcaacaacagcaucgcgauccccaccaacuucaccaucagcgugaccaccgagauauuaccugugagcaugaccaagaccagcguggacuguaccauguacaucugcggcgacagcaccgagugcagcaaccugcugcugcaguacggcagcuucugcacccagcugaaccgggcccugaccggcaucgccguggagcaggacaagaacacccaagagguguucgcccaggugaagcagaucuacaagacuccacccaucaaggacuucggcggcuucaacuucagccagauccugcccgaccccagcaagcccagcaagcggagcuucaucgaggaccugcuguucaacaaggugacccuggccgacgccggcuucaucaagcaguacggcgacugccugggggacaucgccgcucgggaucugaucugcgcccagaaguucaacggccugaccgugcugccuccccugcugaccgacgagaugaucgcccaguacaccagcgcccugcuggccggcaccaucaccagcggcuggaccuucggcgccggcgcagcccuucagauccccuucgccaugcagauggccuaccgguucaacggcaucggcgugacccagaacgugcuguacgagaaccagaagcugaucgccaaccaguucaacagcgccaucggcaagauccaggacagccugagcagcaccgccagcgcccugggcaagcugcaggacguggugaaccagaacgcucaggcccugaacacccuggugaagcagcugagcucaaacuuuggcgccaucagcagcgugcugaaugacauccugagccggcuggacccacccgaggccgaggugcagaucgacaggcugaucaccggccggcugcagagccugcagaccuacgugacccagcagcugauccgggccgccgagauccgggccagcgccaaccuggcagccauuaagaugagcgagugcgugcugggccagagcaagcggguggacuucugcggcaagggcuaccaccugaugagcuucccccagagcgcuccccacggcgugguguuccugcacgugaccuacguccccgcccaggagaagaacuucacaaccgcccccgccaucugccacgacggcaaggcccacuucccccgggagggaguguucgugagcaacggcacccacugguucgugacccagcggaacuucuacgagccccagaucaucaccaccgacaacaccuucgugagcggcaacugcgacguggugaucggcaucgugaacaacaccguguacgacccucuccagcccgagcuggacagcuucaaggaggagcuggacaaguacuucaagaaccacaccagccccgacguggaccugggcgauaucagcggcaucaacgccagcguggugaacauccagaaggagaucgaccggcugaacgagguggccaagaaccugaacgagagccugaucgaccugcaggagcugggcaaguacgagcaguacaucaaguggccaugguacaucuggcugggcuucaucgccggccugaucgccaucgugauggugaccaucaugcugugcugcaugaccagcugcuguagcugccugaagggcugcugcagcugcggcagcugcugcaaguucgacgaggacgacagcgagcccgugcugaagggcgugaagcugcacuacaccugaggacuagucccuguucccagagcccacuuuuuuuucuuuuuuugaaauaaaauagccugucuuucagaucuaaaaaaaaaaaaaaaaaaaaaaaaaaaaaaaaaaaaaaaaaaaaaaaaaaaaaaaaaaaaaaaaaaaaaaaaaaaaaaaaaaaaaaaaaaaaaaaaaaaa

SEQ ID NO: 25128 - RNA, 4167 nt, Artificial Sequence
  SARS-CoV-2/Wuhan/WIV05/2019__EPI_ISL_402128 spike protein mRNA gc (1-1273)(K986P_V987P_K986P_V987P_S13I_W152C_L452R_D614G)
aggagagggcgcuuggcuugcaaggacccugagcugcggcauugaagcacacccaacccaacucgacugaagucagccucacugaaccggaucugagaaucuucucucucugggcuugccagggcucuccgaaccuagcuagcauccucuucaauuccaacuagaaagcuuaccauguucguguuccuggugcugcugccccuggugagcauccagugcgugaaccugaccacccggacccagcugcccccugccuacaccaacagcuucacccggggcguguacuaccccgacaagguguuccggagcagcgugcugcacagcacccaggaccuguuccugcccuucuucagcaacgugaccugguuccacgccauccacgugagcggcaccaacggcaccaagcgguucgacaacccagugcugcccuucaacgacggcguguacuucgccagcaccgagaagucaaacaucauccggggcuggaucuucggcaccacccuggacagcaagacacagagccugcugaucgugaacaacgccaccaacguggugaucaaggugugcgaguuucaguucugcaacgaccccuuccugggcguguacuaccacaagaacaacaagagcugcauggagagcgaguuccgggucuacagcagcgcuaacaauugcaccuucgaguacgugagccagcccuuccugauggaccucgagggcaagcagggcaacuucaagaaccugcgggaguucguguucaagaacaucgauggcuacuucaagaucuacagcaagcacacccccaucaaccuggugcgggaccugccccagggauucagcgcccuggagccucugguggaccugcccaucggcaucaacaucaccagguuccagacccugcuggcccugcaccggagcuaccugacccccggcgacagcagcagcggcuggaccgccggcgccgccgcauacuacgugggcuaccugcagccacggaccuuccugcugaaguacaacgagaacggcaccaucaccgacgccguggacugcgcccuggacccccugagcgagaccaaguguacccuaaagagcuucaccguggagaagggcaucuaccagaccagcaacuuccgggugcagcccacugagagcauugugcgguuccccaacaucaccaaccugugccccuucggcgagguguucaacgccacccgguucgccagcguguacgccuggaaccggaagcggaucagcaacugcguggccgacuacagcgugcuguacaacagcgccagcuucagcaccuucaagugcuacggcgugagcccuaccaagcugaacgaccugugcuucaccaacguguacgcugacagcuucgugauccggggcgacgaggugcggcagaucgcccccggccagaccggcaagaucgccgacuacaacuacaagcugcccgacgacuucaccggcugcgugaucgccuggaacagcaacaaccuggacagcaaggugggcggcaacuacaacuaccgguaccggcuguuccguaagagcaaccugaagccauucgagcgggacaucagcaccgagaucuaccaggccggcagcacccccugcaacgguguggagggcuuuaacugcuacuucccccugcagagcuacggcuuccagcccaccaacggcgugggcuaccagcccuaccgggugguggugcugagcuucgagcugcugcacgcccccgccaccgugugcggcccuaaaaagagcaccaaccuggugaagaacaagugcgugaacuucaauuucaacggccugaccggcaccggcgugcugaccgagagcaacaagaaguuccugcccuuccagcaguucggccgggauaucgccgacaccaccgacgcagugcgggacccccagacccuggagauccuggacaucaccccaugcagcuucggcggcgugagcgucaucacccccggcacaaacaccagcaaccagguggccgugcuguaccagggagugaacugcaccgaggugcccguggccauccacgccgaccagcugacccccaccuggcggguguacagcaccggcagcaacguguuccagacccgggccggcugccugaucggcgccgagcacgugaacaacagcuacgagugcgacauccccaucggcgcuggcaucugugccuccuaccagacccagaccaacagcccccggcgggcccggagcguggccagccagagcaucaucgccuacaccaugagccugggcgccgagaacagcguggccuacagcaacaacagcaucgcgaucccuaccaacuucaccauaagcgugaccaccgagaucuuacccgugagcaugaccaagaccagcguggacugcaccauguacaucugcggcgacagcaccgagugcagcaaccugcugcugcaguacggcagcuucugcacccagcugaaccgggcccugaccggcaucgccguggagcaggacaagaacacccaagagguguucgcccaggugaagcagaucuacaagacucccccaaucaaggacuucggcggcuucaacuucagccagauccugcccgaccccagcaagcccagcaagcggagcuucaucgaggaccugcuguucaacaaggugacccuggccgacgccggcuucaucaagcaguacggcgacugccugggggauaucgccgcucgggaccugaucugcgcccagaaguucaacggccugaccgugcugcccccucugcugaccgacgagaugaucgcccaguacaccagcgcccugcuggccggcaccaucaccagcggcuggaccuucggcgccggcgcagcccuucagauccccuucgccaugcagauggccuacagguucaacggcaucggcgugacccagaacgugcuguacgagaaccagaagcugaucgccaaccaguucaacagcgccaucggcaagauccaggacagccugagcagcaccgccagcgcccugggcaagcugcaggacguggugaaccagaacgcucaggcccugaacacccuggugaagcagcugagcagcaacuucggcgccaucagcagcgugcugaaugacauccugucacggcuggaucccccagaggccgaggugcagaucgaccggcugaucaccggccggcugcagagccugcagaccuacgugacccagcagcugauccgggccgccgagauucgggccagcgccaaccuggcagccaccaagaugagcgagugcgugcugggccagagcaagcggguggacuuuugcggcaagggcuaccaccugaugagcuucccccagagcgcuccccacggcgugguguuccugcacgugacauacguccccgcccaggagaagaacuucaccaccgcccccgccaucugccacgacggcaaggcccacuucccccgggagggaguguucgugagcaacggcacccacugguucgugacccagcggaacuucuacgagccucagaucaucaccaccgacaacaccuucgugagcggcaacugcgacguggugaucggcaucgugaacaacaccguguacgacccccuccagcccgagcuggacagcuucaaggaggagcuggacaaguacuucaagaaccacaccagcccagacguggaccugggcgacaucagcggcaucaacgccagcguggugaacauccagaaggagaucgaccggcugaacgagguggccaagaaccugaacgagagccugaucgaccugcaggagcugggcaaguacgagcaguacaucaaguggcccugguacaucuggcugggcuucaucgccggccugaucgccaucgugauggugaccaucaugcugugcugcaugaccagcuguugcagcugccugaagggcugcugcagcugcggcagcugcugcaaguucgacgaggacgacagcgagcccgugcugaagggcgugaagcugcacuacaccugaggacuagucccuguucccagagcccacuuuuuuuucuuuuuuugaaauaaaauagccugucuuucagaucuaaaaaaaaaaaaaaaaaaaaaaaaaaaaaaaaaaaaaaaaaaaaaaaaaaaaaaaaaaaaaaaaaaaaaaaaaaaaaaaaaaaaaaaaaaaaaaaaaaaa

SEQ ID NO: 25129 - RNA, 4167 nt, Artificial Sequence
  SARS-CoV-2/Wuhan/WIV05/2019__EPI_ISL_402128 spike protein mRNA gc mod (1-1273)(K986P_V987P)
aggagagggcgcuuggcuugcaaggacccugagcugcggcauugaagcacacccaacccaacucgacugaagucagccucacugaaccggaucugagaaucuucucucucugggcuugccagggcucuccgaaccuagcuagcauccucuucaauuccaacuagaaagcuuaccauguucguguuucuggugcugcugccccugguguccagccagugugugaaccugaccaccagaacacagcugccuccagccuacaccaacagcuucaccagaggcguguacuaccccgacaagguguucagauccagcgugcugcacucuacccaggaccuguuccugccuuucuucagcaacgugaccugguuccacgccauccacguguccggcaccaauggcaccaagagauucgacaaccccgugcugcccuucaacgacgggguguacuuugccagcaccgagaaguccaacaucaucagaggcuggaucuucggcaccacacuggacagcaagacccagagccugcugaucgugaacaacgccaccaacguggucaucaaagugugcgaguuccaguucugcaacgaccccuuccugggcgucuacuaccacaagaacaacaagagcuggauggaaagcgaguuccggguguacagcagcgccaacaacugcaccuucgaguacgugucccagccuuuccugauggaccuggaaggcaagcagggcaacuucaagaaccugcgcgaguucguguucaagaacaucgacggcuacuucaaaaucuacagcaagcacaccccuaucaaccucgugcgggaucugccucagggcuucucugcucuggaaccccugguggaucugcccaucggcaucaacaucacccgguuucagacacugcuggcccugcacagaagcuaccugacaccuggcgauagcagcagcggauggacagcuggugccgccgcuuacuaugugggcuaccugcagccuagaaccuuccugcugaaguacaacgagaacggcaccaucaccgacgccguggauugugcucuggauccucugagcgagacaaagugcacccugaaguccuucaccguggaaaagggcaucuaccagaccagcaacuuccgggugcagcccaccgaauccaucgugcgguuccccaauaucaccaaucugugccccuucggcgagguguucaaugccaccagauucgccucuguguacgccuggaaccggaagcggaucagcaauugcguggccgacuacuccgugcuguacaacuccgccagcuucagcaccuucaagugcuacggcguguccccuaccaagcugaacgaccugugcuucacaaacguguacgccgacagcuucgugauccggggagaugaagugcggcagauugccccuggacagacaggcaagaucgccgacuacaacuacaagcugcccgacgacuucaccggcugugugauugccuggaacagcaacaaccuggacuccaaagucggcggcaacuacaauuaccuguaccggcuguuccggaaguccaaucugaagcccuucgagcgggacaucagcaccgaaaucuaucaggccggcagcaccccuugcaacggcguggaaggcuucaacugcuacuucccacugcaguccuacggcuuucagcccacaaauggcgugggcuaucagcccuacagagugguggugcugagcuucgaacugcugcaugcuccugccacagugugcggcccuaagaaaagcaccaaucucgugaagaacaaaugcgugaacuucaacuucaacggccugaccggcaccggcgugcugacagagagcaacaagaaguuccugccauuccagcaguuuggccgggauaucgccgauaccacagacgccguuagagauccccagacacuggaaauccuggacaucaccccaugcagcuucggcggagugucugugaucaccccuggcaccaacaccagcaaucagguggcagugcuguaccaggacgugaacuguaccgaagugcccguggccauucacgccgaucagcugacaccuacauggcggguguacuccaccggcagcaauguguuucagaccagagccggcugucugaucggagccgagcacgugaacaauagcuacgagugcgacauccccaucggcgcuggcaucugugccagcuaccagacacagacaaacagccccagacgggcuagaagcguggccagccagagcaucauugccuacacaaugucucugggcgccgagaacagcguggccuacuccaacaacucuaucgcuauccccaccaacuucaccaucagcgugaccaccgagauccugccuguguccaugaccaagaccagcguggacugcaccauguacaucugcggcgauuccaccgagugcuccaaccugcugcugcaguacggcagcuucugcacccagcugaauagagcccugacagggaucgccguggaacaggacaagaacacccaagagguguucgcccaagugaagcaaaucuacaagaccccuccuaucaaggacuucggcggcuucaauuucagccagauucugcccgauccuagcaagcccagcaagcggagcuucaucgaggaccugcuguucaacaaagugacacuggccgacgccggcuucaucaagcaguauggcgauugucugggcgacauugccgccagggaucugauuugcgcccagaaguuuaacggacugacagugcugccuccucugcugaccgaugagaugaucgcccaguacacaucugcccugcuggccggcacaaucacaagcggcuggacauuuggagcuggcgccgcucugcagauccccuuugcuaugcagauggccuaccgguucaacggcaucggagugacccagaaugugcuguacgagaaccagaagcugaucgccaaccaguucaacagcgccaucggcaagauccaggacagccugagcagcacagcaagcgcccugggaaagcugcaggacguggucaaccagaaugcccaggcacugaacacccuggucaagcagcuguccuccaacuucggcgccaucagcucugugcugaacgauauccugagcagacuggacccuccugaggccgaggugcagaucgacagacugaucacaggcagacugcagagccuccagacauacgugacccagcagcugaucagagccgccgagauuagagccucugccaaucuggccgccaccaagaugucugagugugugcugggccagagcaagagaguggacuuuugcggcaagggcuaccaccugaugagcuucccucagucugccccucacggcgugguguuucugcacgugacauaugugcccgcucaagagaagaauuucaccaccgcuccagccaucugccacgacggcaaagcccacuuuccuagagaaggcguguucguguccaacggcacccauugguucgugacacagcggaacuucuacgagccccagaucaucaccaccgacaacaccuucgugucuggcaacugcgacguugugaucggcauugugaacaauaccguguacgacccucugcagcccgagcuggacagcuucaaagaggaacuggacaaguacuuuaagaaccacacaagccccgacguggaccugggcgauaucagcggaaucaaugccagcgucgugaacauccagaaagagaucgaccggcugaacgagguggccaagaaucugaacgagagccugaucgaccugcaagaacuggggaaguacgagcaguacaucaaguggcccugguacaucuggcugggcuuuaucgccggacugauugccaucgugauggucacaaucaugcuguguugcaugaccagcugcuguagcugccugaagggcuguuguagcuguggcagcugcugcaaguucgacgaggacgauucugagcccgugcugaagggcgugaaacugcacuacaccugaggacuagucccuguucccagagcccacuuuuuuuucuuuuuuugaaauaaaauagccugucuuucagaucuaaaaaaaaaaaaaaaaaaaaaaaaaaaaaaaaaaaaaaaaaaaaaaaaaaaaaaaaaaaaaaaaaaaaaaaaaaaaaaaaaaaaaaaaaaaaaaaaaaaa

SEQ ID NO: 25130 - RNA, 4167 nt, Artificial Sequence
  SARS-CoV-2/Wuhan/WIV05/2019__EPI_ISL_402128 spike protein mRNA gc mod (1-1273)(K986P_V987P_ D614G)
aggagagggcgcuuggcuugcaaggacccugagcugcggcauugaagcacacccaacccaacucgacugaagucagccucacugaaccggaucugagaaucuucucucucugggcuugccagggcucuccgaaccuagcuagcauccucuucaauuccaacuagaaagcuuaccauguucguguuucuggugcugcugccccugguguccagccagugugugaaccugaccaccagaacacagcugccuccagccuacaccaacagcuucaccagaggcguguacuaccccgacaagguguucagauccagcgugcugcacucuacccaggaccuguuccugccuuucuucagcaacgugaccugguuccacgccauccacguguccggcaccaauggcaccaagagauucgacaaccccgugcugcccuucaacgacgggguguacuuugccagcaccgagaaguccaacaucaucagaggcuggaucuucggcaccacacuggacagcaagacccagagccugcugaucgugaacaacgccaccaacguggucaucaaagugugcgaguuccaguucugcaacgaccccuuccugggcgucuacuaccacaagaacaacaagagcuggauggaaagcgaguuccggguguacagcagcgccaacaacugcaccuucgaguacgugucccagccuuuccugauggaccuggaaggcaagcagggcaacuucaagaaccugcgcgaguucguguucaagaacaucgacggcuacuucaaaaucuacagcaagcacaccccuaucaaccucgugcgggaucugccucagggcuucucugcucuggaaccccugguggaucugcccaucggcaucaacaucacccgguuucagacacugcuggcccugcacagaagcuaccugacaccuggcgauagcagcagcggauggacagcuggugccgccgcuuacuaugugggcuaccugcagccuagaaccuuccugcugaaguacaacgagaacggcaccaucaccgacgccguggauugugcucuggauccucugagcgagacaaagugcacccugaaguccuucaccguggaaaagggcaucuaccagaccagcaacuuccgggugcagcccaccgaauccaucgugcgguuccccaauaucaccaaucugugccccuucggcgagguguucaaugccaccagauucgccucuguguacgccuggaaccggaagcggaucagcaauugcguggccgacuacuccgugcuguacaacuccgccagcuucagcaccuucaagugcuacggcguguccccuaccaagcugaacgaccugugcuucacaaacguguacgccgacagcuucgugauccggggagaugaagugcggcagauugccccuggacagacaggcaagaucgccgacuacaacuacaagcugcccgacgacuucaccggcugugugauugccuggaacagcaacaaccuggacuccaaagucggcggcaacuacaauuaccuguaccggcuguuccggaaguccaaucugaagcccuucgagcgggacaucagcaccgaaaucuaucaggccggcagcaccccuugcaacggcguggaaggcuucaacugcuacuucccacugcaguccuacggcuuucagcccacaaauggcgugggcuaucagcccuacagagugguggugcugagcuucgaacugcugcaugcuccugccacagugugcggcccuaagaaaagcaccaaucucgugaagaacaaaugcgugaacuucaacuucaacggccugaccggcaccggcgugcugacagagagcaacaagaaguuccugccauuccagcaguuuggccgggauaucgccgauaccacagacgccguuagagauccccagacacuggaaauccuggacaucaccccaugcagcuucggcggagugucugugaucaccccuggcaccaacaccagcaaucagguggcagugcuguaccagggcgugaacuguaccgaagugcccguggccauucacgccgaucagcugacaccuacauggcggguguacuccaccggcagcaauguguuucagaccagagccggcugucugaucggagccgagcacgugaacaauagcuacgagugcgacauccccaucggcgcuggcaucugugccagcuaccagacacagacaaacagccccagacgggcuagaagcguggccagccagagcaucauugccuacacaaugucucugggcgccgagaacagcguggccuacuccaacaacucuaucgcuauccccaccaacuucaccaucagcgugaccaccgagauccugccuguguccaugaccaagaccagcguggacugcaccauguacaucugcggcgauuccaccgagugcuccaaccugcugcugcaguacggcagcuucugcacccagcugaauagagcccugacagggaucgccguggaacaggacaagaacacccaagagguguucgcccaagugaagcaaaucuacaagaccccuccuaucaaggacuucggcggcuucaauuucagccagauucugcccgauccuagcaagcccagcaagcggagcuucaucgaggaccugcuguucaacaaagugacacuggccgacgccggcuucaucaagcaguauggcgauugucugggcgacauugccgccagggaucugauuugcgcccagaaguuuaacggacugacagugcugccuccucugcugaccgaugagaugaucgcccaguacacaucugcccugcuggccggcacaaucacaagcggcuggacauuuggagcuggcgccgcucugcagauccccuuugcuaugcagauggccuaccgguucaacggcaucggagugacccagaaugugcuguacgagaaccagaagcugaucgccaaccaguucaacagcgccaucggcaagauccaggacagccugagcagcacagcaagcgcccugggaaagcugcaggacguggucaaccagaaugcccaggcacugaacacccuggucaagcagcuguccuccaacuucggcgccaucagcucugugcugaacgauauccugagcagacuggacccuccugaggccgaggugcagaucgacagacugaucacaggcagacugcagagccuccagacauacgugacccagcagcugaucagagccgccgagauuagagccucugccaaucuggccgccaccaagaugucugagugugugcugggccagagcaagagaguggacuuuugcggcaagggcuaccaccugaugagcuucccucagucugccccucacggcgugguguuucugcacgugacauaugugcccgcucaagagaagaauuucaccaccgcuccagccaucugccacgacggcaaagcccacuuuccuagagaaggcguguucguguccaacggcacccauugguucgugacacagcggaacuucuacgagccccagaucaucaccaccgacaacaccuucgugucuggcaacugcgacguugugaucggcauugugaacaauaccguguacgacccucugcagcccgagcuggacagcuucaaagaggaacuggacaaguacuuuaagaaccacacaagccccgacguggaccugggcgauaucagcggaaucaaugccagcgucgugaacauccagaaagagaucgaccggcugaacgagguggccaagaaucugaacgagagccugaucgaccugcaagaacuggggaaguacgagcaguacaucaaguggcccugguacaucuggcugggcuuuaucgccggacugauugccaucgugauggucacaaucaugcuguguugcaugaccagcugcuguagcugccugaagggcuguuguagcuguggcagcugcugcaaguucgacgaggacgauucugagcccgugcugaagggcgugaaacugcacuacaccugaggacuagucccuguucccagagcccacuuuuuuuucuuuuuuugaaauaaaauagccugucuuucagaucuaaaaaaaaaaaaaaaaaaaaaaaaaaaaaaaaaaaaaaaaaaaaaaaaaaaaaaaaaaaaaaaaaaaaaaaaaaaaaaaaaaaaaaaaaaaaaaaaaaaa

SEQ ID NO: 25131 - RNA, 4167 nt, Artificial Sequence
  SARS-CoV-2/Wuhan/WIV05/2019__EPI_ISL_402128 spike protein mRNA gc mod (1-1273)(K986P_V987P_A222V_D614G)
aggagagggcgcuuggcuugcaaggacccugagcugcggcauugaagcacacccaacccaacucgacugaagucagccucacugaaccggaucugagaaucuucucucucugggcuugccagggcucuccgaaccuagcuagcauccucuucaauuccaacuagaaagcuuaccauguucguguuucuggugcugcugccccugguguccagccagugugugaaccugaccaccagaacacagcugccuccagccuacaccaacagcuucaccagaggcguguacuaccccgacaagguguucagauccagcgugcugcacucuacccaggaccuguuccugccuuucuucagcaacgugaccugguuccacgccauccacguguccggcaccaauggcaccaagagauucgacaaccccgugcugcccuucaacgacgggguguacuuugccagcaccgagaaguccaacaucaucagaggcuggaucuucggcaccacacuggacagcaagacccagagccugcugaucgugaacaacgccaccaacguggucaucaaagugugcgaguuccaguucugcaacgaccccuuccugggcgucuacuaccacaagaacaacaagagcuggauggaaagcgaguuccggguguacagcagcgccaacaacugcaccuucgaguacgugucccagccuuuccugauggaccuggaaggcaagcagggcaacuucaagaaccugcgcgaguucguguucaagaacaucgacggcuacuucaaaaucuacagcaagcacaccccuaucaaccucgugcgggaucugccucagggcuucucugugcuggaaccccugguggaucugcccaucggcaucaacaucacccgguuucagacacugcuggcccugcacagaagcuaccugacaccuggcgauagcagcagcggauggacagcuggugccgccgcuuacuaugugggcuaccugcagccuagaaccuuccugcugaaguacaacgagaacggcaccaucaccgacgccguggauugugcucuggauccucugagcgagacaaagugcacccugaaguccuucaccguggaaaagggcaucuaccagaccagcaacuuccgggugcagcccaccgaauccaucgugcgguuccccaauaucaccaaucugugccccuucggcgagguguucaaugccaccagauucgccucuguguacgccuggaaccggaagcggaucagcaauugcguggccgacuacuccgugcuguacaacuccgccagcuucagcaccuucaagugcuacggcguguccccuaccaagcugaacgaccugugcuucacaaacguguacgccgacagcuucgugauccggggagaugaagugcggcagauugccccuggacagacaggcaagaucgccgacuacaacuacaagcugcccgacgacuucaccggcugugugauugccuggaacagcaacaaccuggacuccaaagucggcggcaacuacaauuaccuguaccggcuguuccggaaguccaaucugaagcccuucgagcgggacaucagcaccgaaaucuaucaggccggcagcaccccuugcaacggcguggaaggcuucaacugcuacuucccacugcaguccuacggcuuucagcccacaaauggcgugggcuaucagcccuacagagugguggugcugagcuucgaacugcugcaugcuccugccacagugugcggcccuaagaaaagcaccaaucucgugaagaacaaaugcgugaacuucaacuucaacggccugaccggcaccggcgugcugacagagagcaacaagaaguuccugccauuccagcaguuuggccgggauaucgccgauaccacagacgccguuagagauccccagacacuggaaauccuggacaucaccccaugcagcuucggcggagugucugugaucaccccuggcaccaacaccagcaaucagguggcagugcuguaccagggcgugaacuguaccgaagugcccguggccauucacgccgaucagcugacaccuacauggcggguguacuccaccggcagcaauguguuucagaccagagccggcugucugaucggagccgagcacgugaacaauagcuacgagugcgacauccccaucggcgcuggcaucugugccagcuaccagacacagacaaacagccccagacgggcuagaagcguggccagccagagcaucauugccuacacaaugucucugggcgccgagaacagcguggccuacuccaacaacucuaucgcuauccccaccaacuucaccaucagcgugaccaccgagauccugccuguguccaugaccaagaccagcguggacugcaccauguacaucugcggcgauuccaccgagugcuccaaccugcugcugcaguacggcagcuucugcacccagcugaauagagcccugacagggaucgccguggaacaggacaagaacacccaagagguguucgcccaagugaagcaaaucuacaagaccccuccuaucaaggacuucggcggcuucaauuucagccagauucugcccgauccuagcaagcccagcaagcggagcuucaucgaggaccugcuguucaacaaagugacacuggccgacgccggcuucaucaagcaguauggcgauugucugggcgacauugccgccagggaucugauuugcgcccagaaguuuaacggacugacagugcugccuccucugcugaccgaugagaugaucgcccaguacacaucugcccugcuggccggcacaaucacaagcggcuggacauuuggagcuggcgccgcucugcagauccccuuugcuaugcagauggccuaccgguucaacggcaucggagugacccagaaugugcuguacgagaaccagaagcugaucgccaaccaguucaacagcgccaucggcaagauccaggacagccugagcagcacagcaagcgcccugggaaagcugcaggacguggucaaccagaaugcccaggcacugaacacccuggucaagcagcuguccuccaacuucggcgccaucagcucugugcugaacgauauccugagcagacuggacccuccugaggccgaggugcagaucgacagacugaucacaggcagacugcagagccuccagacauacgugacccagcagcugaucagagccgccgagauuagagccucugccaaucuggccgccaccaagaugucugagugugugcugggccagagcaagagaguggacuuuugcggcaagggcuaccaccugaugagcuucccucagucugccccucacggcgugguguuucugcacgugacauaugugcccgcucaagagaagaauuucaccaccgcuccagccaucugccacgacggcaaagcccacuuuccuagagaaggcguguucguguccaacggcacccauugguucgugacacagcggaacuucuacgagccccagaucaucaccaccgacaacaccuucgugucuggcaacugcgacguugugaucggcauugugaacaauaccguguacgacccucugcagcccgagcuggacagcuucaaagaggaacuggacaaguacuuuaagaaccacacaagccccgacguggaccugggcgauaucagcggaaucaaugccagcgucgugaacauccagaaagagaucgaccggcugaacgagguggccaagaaucugaacgagagccugaucgaccugcaagaacuggggaaguacgagcaguacaucaaguggcccugguacaucuggcugggcuuuaucgccggacugauugccaucgugauggucacaaucaugcuguguugcaugaccagcugcuguagcugccugaagggcuguuguagcuguggcagcugcugcaaguucgacgaggacgauucugagcccgugcugaagggcgugaaacugcacuacaccugaggacuagucccuguucccagagcccacuuuuuuuucuuuuuuugaaauaaaauagccugucuuucagaucuaaaaaaaaaaaaaaaaaaaaaaaaaaaaaaaaaaaaaaaaaaaaaaaaaaaaaaaaaaaaaaaaaaaaaaaaaaaaaaaaaaaaaaaaaaaaaaaaaaaa

SEQ ID NO: 25132 - RNA, 4167 nt, Artificial Sequence
  SARS-CoV-2/Wuhan/WIV05/2019__EPI_ISL_402128 spike protein mRNA gc mod (1-1273)(K986P_V987P_N439K_D614G)
aggagagggcgcuuggcuugcaaggacccugagcugcggcauugaagcacacccaacccaacucgacugaagucagccucacugaaccggaucugagaaucuucucucucugggcuugccagggcucuccgaaccuagcuagcauccucuucaauuccaacuagaaagcuuaccauguucguguuucuggugcugcugccccugguguccagccagugugugaaccugaccaccagaacacagcugccuccagccuacaccaacagcuucaccagaggcguguacuaccccgacaagguguucagauccagcgugcugcacucuacccaggaccuguuccugccuuucuucagcaacgugaccugguuccacgccauccacguguccggcaccaauggcaccaagagauucgacaaccccgugcugcccuucaacgacgggguguacuuugccagcaccgagaaguccaacaucaucagaggcuggaucuucggcaccacacuggacagcaagacccagagccugcugaucgugaacaacgccaccaacguggucaucaaagugugcgaguuccaguucugcaacgaccccuuccugggcgucuacuaccacaagaacaacaagagcuggauggaaagcgaguuccggguguacagcagcgccaacaacugcaccuucgaguacgugucccagccuuuccugauggaccuggaaggcaagcagggcaacuucaagaaccugcgcgaguucguguucaagaacaucgacggcuacuucaaaaucuacagcaagcacaccccuaucaaccucgugcgggaucugccucagggcuucucugcucuggaaccccugguggaucugcccaucggcaucaacaucacccgguuucagacacugcuggcccugcacagaagcuaccugacaccuggcgauagcagcagcggauggacagcuggugccgccgcuuacuaugugggcuaccugcagccuagaaccuuccugcugaaguacaacgagaacggcaccaucaccgacgccguggauugugcucuggauccucugagcgagacaaagugcacccugaaguccuucaccguggaaaagggcaucuaccagaccagcaacuuccgggugcagcccaccgaauccaucgugcgguuccccaauaucaccaaucugugccccuucggcgagguguucaaugccaccagauucgccucuguguacgccuggaaccggaagcggaucagcaauugcguggccgacuacuccgugcuguacaacuccgccagcuucagcaccuucaagugcuacggcguguccccuaccaagcugaacgaccugugcuucacaaacguguacgccgacagcuucgugauccggggagaugaagugcggcagauugccccuggacagacaggcaagaucgccgacuacaacuacaagcugcccgacgacuucaccggcugugugauugccuggaacagcaagaaccuggacuccaaagucggcggcaacuacaauuaccuguaccggcuguuccggaaguccaaucugaagcccuucgagcgggacaucagcaccgaaaucuaucaggccggcagcaccccuugcaacggcguggaaggcuucaacugcuacuucccacugcaguccuacggcuuucagcccacaaauggcgugggcuaucagcccuacagagugguggugcugagcuucgaacugcugcaugcuccugccacagugugcggcccuaagaaaagcaccaaucucgugaagaacaaaugcgugaacuucaacuucaacggccugaccggcaccggcgugcugacagagagcaacaagaaguuccugccauuccagcaguuuggccgggauaucgccgauaccacagacgccguuagagauccccagacacuggaaauccuggacaucaccccaugcagcuucggcggagugucugugaucaccccuggcaccaacaccagcaaucagguggcagugcuguaccagggcgugaacuguaccgaagugcccguggccauucacgccgaucagcugacaccuacauggcggguguacuccaccggcagcaauguguuucagaccagagccggcugucugaucggagccgagcacgugaacaauagcuacgagugcgacauccccaucggcgcuggcaucugugccagcuaccagacacagacaaacagccccagacgggcuagaagcguggccagccagagcaucauugccuacacaaugucucugggcgccgagaacagcguggccuacuccaacaacucuaucgcuauccccaccaacuucaccaucagcgugaccaccgagauccugccuguguccaugaccaagaccagcguggacugcaccauguacaucugcggcgauuccaccgagugcuccaaccugcugcugcaguacggcagcuucugcacccagcugaauagagcccugacagggaucgccguggaacaggacaagaacacccaagagguguucgcccaagugaagcaaaucuacaagaccccuccuaucaaggacuucggcggcuucaauuucagccagauucugcccgauccuagcaagcccagcaagcggagcuucaucgaggaccugcuguucaacaaagugacacuggccgacgccggcuucaucaagcaguauggcgauugucugggcgacauugccgccagggaucugauuugcgcccagaaguuuaacggacugacagugcugccuccucugcugaccgaugagaugaucgcccaguacacaucugcccugcuggccggcacaaucacaagcggcuggacauuuggagcuggcgccgcucugcagauccccuuugcuaugcagauggccuaccgguucaacggcaucggagugacccagaaugugcuguacgagaaccagaagcugaucgccaaccaguucaacagcgccaucggcaagauccaggacagccugagcagcacagcaagcgcccugggaaagcugcaggacguggucaaccagaaugcccaggcacugaacacccuggucaagcagcuguccuccaacuucggcgccaucagcucugugcugaacgauauccugagcagacuggacccuccugaggccgaggugcagaucgacagacugaucacaggcagacugcagagccuccagacauacgugacccagcagcugaucagagccgccgagauuagagccucugccaaucuggccgccaccaagaugucugagugugugcugggccagagcaagagaguggacuuuugcggcaagggcuaccaccugaugagcuucccucagucugccccucacggcgugguguuucugcacgugacauaugugcccgcucaagagaagaauuucaccaccgcuccagccaucugccacgacggcaaagcccacuuuccuagagaaggcguguucguguccaacggcacccauugguucgugacacagcggaacuucuacgagccccagaucaucaccaccgacaacaccuucgugucuggcaacugcgacguugugaucggcauugugaacaauaccguguacgacccucugcagcccgagcuggacagcuucaaagaggaacuggacaaguacuuuaagaaccacacaagccccgacguggaccugggcgauaucagcggaaucaaugccagcgucgugaacauccagaaagagaucgaccggcugaacgagguggccaagaaucugaacgagagccugaucgaccugcaagaacuggggaaguacgagcaguacaucaaguggcccugguacaucuggcugggcuuuaucgccggacugauugccaucgugauggucacaaucaugcuguguugcaugaccagcugcuguagcugccugaagggcuguuguagcuguggcagcugcugcaaguucgacgaggacgauucugagcccgugcugaagggcgugaaacugcacuacaccugaggacuagucccuguucccagagcccacuuuuuuuucuuuuuuugaaauaaaauagccugucuuucagaucuaaaaaaaaaaaaaaaaaaaaaaaaaaaaaaaaaaaaaaaaaaaaaaaaaaaaaaaaaaaaaaaaaaaaaaaaaaaaaaaaaaaaaaaaaaaaaaaaaaaa

SEQ ID NO: 25133 - RNA, 4167 nt, Artificial Sequence
  SARS-CoV-2/Wuhan/WIV05/2019__EPI_ISL_402128 spike protein mRNA gc mod (1-1273)(K986P_V987P_S477N_D614G)
aggagagggcgcuuggcuugcaaggacccugagcugcggcauugaagcacacccaacccaacucgacugaagucagccucacugaaccggaucugagaaucuucucucucugggcuugccagggcucuccgaaccuagcuagcauccucuucaauuccaacuagaaagcuuaccauguucguguuucuggugcugcugccccugguguccagccagugugugaaccugaccaccagaacacagcugccuccagccuacaccaacagcuucaccagaggcguguacuaccccgacaagguguucagauccagcgugcugcacucuacccaggaccuguuccugccuuucuucagcaacgugaccugguuccacgccauccacguguccggcaccaauggcaccaagagauucgacaaccccgugcugcccuucaacgacgggguguacuuugccagcaccgagaaguccaacaucaucagaggcuggaucuucggcaccacacuggacagcaagacccagagccugcugaucgugaacaacgccaccaacguggucaucaaagugugcgaguuccaguucugcaacgaccccuuccugggcgucuacuaccacaagaacaacaagagcuggauggaaagcgaguuccggguguacagcagcgccaacaacugcaccuucgaguacgugucccagccuuuccugauggaccuggaaggcaagcagggcaacuucaagaaccugcgcgaguucguguucaagaacaucgacggcuacuucaaaaucuacagcaagcacaccccuaucaaccucgugcgggaucugccucagggcuucucugcucuggaaccccugguggaucugcccaucggcaucaacaucacccgguuucagacacugcuggcccugcacagaagcuaccugacaccuggcgauagcagcagcggauggacagcuggugccgccgcuuacuaugugggcuaccugcagccuagaaccuuccugcugaaguacaacgagaacggcaccaucaccgacgccguggauugugcucuggauccucugagcgagacaaagugcacccugaaguccuucaccguggaaaagggcaucuaccagaccagcaacuuccgggugcagcccaccgaauccaucgugcgguuccccaauaucaccaaucugugccccuucggcgagguguucaaugccaccagauucgccucuguguacgccuggaaccggaagcggaucagcaauugcguggccgacuacuccgugcuguacaacuccgccagcuucagcaccuucaagugcuacggcguguccccuaccaagcugaacgaccugugcuucacaaacguguacgccgacagcuucgugauccggggagaugaagugcggcagauugccccuggacagacaggcaagaucgccgacuacaacuacaagcugcccgacgacuucaccggcugugugauugccuggaacagcaacaaccuggacuccaaagucggcggcaacuacaauuaccuguaccggcuguuccggaaguccaaucugaagcccuucgagcgggacaucagcaccgaaaucuaucaggccggcaacaccccuugcaacggcguggaaggcuucaacugcuacuucccacugcaguccuacggcuuucagcccacaaauggcgugggcuaucagcccuacagagugguggugcugagcuucgaacugcugcaugcuccugccacagugugcggcccuaagaaaagcaccaaucucgugaagaacaaaugcgugaacuucaacuucaacggccugaccggcaccggcgugcugacagagagcaacaagaaguuccugccauuccagcaguuuggccgggauaucgccgauaccacagacgccguuagagauccccagacacuggaaauccuggacaucaccccaugcagcuucggcggagugucugugaucaccccuggcaccaacaccagcaaucagguggcagugcuguaccagggcgugaacuguaccgaagugcccguggccauucacgccgaucagcugacaccuacauggcggguguacuccaccggcagcaauguguuucagaccagagccggcugucugaucggagccgagcacgugaacaauagcuacgagugcgacauccccaucggcgcuggcaucugugccagcuaccagacacagacaaacagccccagacgggcuagaagcguggccagccagagcaucauugccuacacaaugucucugggcgccgagaacagcguggccuacuccaacaacucuaucgcuauccccaccaacuucaccaucagcgugaccaccgagauccugccuguguccaugaccaagaccagcguggacugcaccauguacaucugcggcgauuccaccgagugcuccaaccugcugcugcaguacggcagcuucugcacccagcugaauagagcccugacagggaucgccguggaacaggacaagaacacccaagagguguucgcccaagugaagcaaaucuacaagaccccuccuaucaaggacuucggcggcuucaauuucagccagauucugcccgauccuagcaagcccagcaagcggagcuucaucgaggaccugcuguucaacaaagugacacuggccgacgccggcuucaucaagcaguauggcgauugucugggcgacauugccgccagggaucugauuugcgcccagaaguuuaacggacugacagugcugccuccucugcugaccgaugagaugaucgcccaguacacaucugcccugcuggccggcacaaucacaagcggcuggacauuuggagcuggcgccgcucugcagauccccuuugcuaugcagauggccuaccgguucaacggcaucggagugacccagaaugugcuguacgagaaccagaagcugaucgccaaccaguucaacagcgccaucggcaagauccaggacagccugagcagcacagcaagcgcccugggaaagcugcaggacguggucaaccagaaugcccaggcacugaacacccuggucaagcagcuguccuccaacuucggcgccaucagcucugugcugaacgauauccugagcagacuggacccuccugaggccgaggugcagaucgacagacugaucacaggcagacugcagagccuccagacauacgugacccagcagcugaucagagccgccgagauuagagccucugccaaucuggccgccaccaagaugucugagugugugcugggccagagcaagagaguggacuuuugcggcaagggcuaccaccugaugagcuucccucagucugccccucacggcgugguguuucugcacgugacauaugugcccgcucaagagaagaauuucaccaccgcuccagccaucugccacgacggcaaagcccacuuuccuagagaaggcguguucguguccaacggcacccauugguucgugacacagcggaacuucuacgagccccagaucaucaccaccgacaacaccuucgugucuggcaacugcgacguugugaucggcauugugaacaauaccguguacgacccucugcagcccgagcuggacagcuucaaagaggaacuggacaaguacuuuaagaaccacacaagccccgacguggaccugggcgauaucagcggaaucaaugccagcgucgugaacauccagaaagagaucgaccggcugaacgagguggccaagaaucugaacgagagccugaucgaccugcaagaacuggggaaguacgagcaguacaucaaguggcccugguacaucuggcugggcuuuaucgccggacugauugccaucgugauggucacaaucaugcuguguugcaugaccagcugcuguagcugccugaagggcuguuguagcuguggcagcugcugcaaguucgacgaggacgauucugagcccgugcugaagggcgugaaacugcacuacaccugaggacuagucccuguucccagagcccacuuuuuuuucuuuuuuugaaauaaaauagccugucuuucagaucuaaaaaaaaaaaaaaaaaaaaaaaaaaaaaaaaaaaaaaaaaaaaaaaaaaaaaaaaaaaaaaaaaaaaaaaaaaaaaaaaaaaaaaaaaaaaaaaaaaaa

SEQ ID NO: 25134 - RNA, 4167 nt, Artificial Sequence
  SARS-CoV-2/Wuhan/WIV05/2019__EPI_ISL_402128 spike protein mRNA gc mod (1-1273)(K986P_V987P_N501Y_D614G)
aggagagggcgcuuggcuugcaaggacccugagcugcggcauugaagcacacccaacccaacucgacugaagucagccucacugaaccggaucugagaaucuucucucucugggcuugccagggcucuccgaaccuagcuagcauccucuucaauuccaacuagaaagcuuaccauguucguguuucuggugcugcugccccugguguccagccagugugugaaccugaccaccagaacacagcugccuccagccuacaccaacagcuucaccagaggcguguacuaccccgacaagguguucagauccagcgugcugcacucuacccaggaccuguuccugccuuucuucagcaacgugaccugguuccacgccauccacguguccggcaccaauggcaccaagagauucgacaaccccgugcugcccuucaacgacgggguguacuuugccagcaccgagaaguccaacaucaucagaggcuggaucuucggcaccacacuggacagcaagacccagagccugcugaucgugaacaacgccaccaacguggucaucaaagugugcgaguuccaguucugcaacgaccccuuccugggcgucuacuaccacaagaacaacaagagcuggauggaaagcgaguuccggguguacagcagcgccaacaacugcaccuucgaguacgugucccagccuuuccugauggaccuggaaggcaagcagggcaacuucaagaaccugcgcgaguucguguucaagaacaucgacggcuacuucaaaaucuacagcaagcacaccccuaucaaccucgugcgggaucugccucagggcuucucugcucuggaaccccugguggaucugcccaucggcaucaacaucacccgguuucagacacugcuggcccugcacagaagcuaccugacaccuggcgauagcagcagcggauggacagcuggugccgccgcuuacuaugugggcuaccugcagccuagaaccuuccugcugaaguacaacgagaacggcaccaucaccgacgccguggauugugcucuggauccucugagcgagacaaagugcacccugaaguccuucaccguggaaaagggcaucuaccagaccagcaacuuccgggugcagcccaccgaauccaucgugcgguuccccaauaucaccaaucugugccccuucggcgagguguucaaugccaccagauucgccucuguguacgccuggaaccggaagcggaucagcaauugcguggccgacuacuccgugcuguacaacuccgccagcuucagcaccuucaagugcuacggcguguccccuaccaagcugaacgaccugugcuucacaaacguguacgccgacagcuucgugauccggggagaugaagugcggcagauugccccuggacagacaggcaagaucgccgacuacaacuacaagcugcccgacgacuucaccggcugugugauugccuggaacagcaacaaccuggacuccaaagucggcggcaacuacaauuaccuguaccggcuguuccggaaguccaaucugaagcccuucgagcgggacaucagcaccgaaaucuaucaggccggcagcaccccuugcaacggcguggaaggcuucaacugcuacuucccacugcaguccuacggcuuucagcccacauacggcgugggcuaucagcccuacagagugguggugcugagcuucgaacugcugcaugcuccugccacagugugcggcccuaagaaaagcaccaaucucgugaagaacaaaugcgugaacuucaacuucaacggccugaccggcaccggcgugcugacagagagcaacaagaaguuccugccauuccagcaguuuggccgggauaucgccgauaccacagacgccguuagagauccccagacacuggaaauccuggacaucaccccaugcagcuucggcggagugucugugaucaccccuggcaccaacaccagcaaucagguggcagugcuguaccagggcgugaacuguaccgaagugcccguggccauucacgccgaucagcugacaccuacauggcggguguacuccaccggcagcaauguguuucagaccagagccggcugucugaucggagccgagcacgugaacaauagcuacgagugcgacauccccaucggcgcuggcaucugugccagcuaccagacacagacaaacagccccagacgggcuagaagcguggccagccagagcaucauugccuacacaaugucucugggcgccgagaacagcguggccuacuccaacaacucuaucgcuauccccaccaacuucaccaucagcgugaccaccgagauccugccuguguccaugaccaagaccagcguggacugcaccauguacaucugcggcgauuccaccgagugcuccaaccugcugcugcaguacggcagcuucugcacccagcugaauagagcccugacagggaucgccguggaacaggacaagaacacccaagagguguucgcccaagugaagcaaaucuacaagaccccuccuaucaaggacuucggcggcuucaauuucagccagauucugcccgauccuagcaagcccagcaagcggagcuucaucgaggaccugcuguucaacaaagugacacuggccgacgccggcuucaucaagcaguauggcgauugucugggcgacauugccgccagggaucugauuugcgcccagaaguuuaacggacugacagugcugccuccucugcugaccgaugagaugaucgcccaguacacaucugcccugcuggccggcacaaucacaagcggcuggacauuuggagcuggcgccgcucugcagauccccuuugcuaugcagauggccuaccgguucaacggcaucggagugacccagaaugugcuguacgagaaccagaagcugaucgccaaccaguucaacagcgccaucggcaagauccaggacagccugagcagcacagcaagcgcccugggaaagcugcaggacguggucaaccagaaugcccaggcacugaacacccuggucaagcagcuguccuccaacuucggcgccaucagcucugugcugaacgauauccugagcagacuggacccuccugaggccgaggugcagaucgacagacugaucacaggcagacugcagagccuccagacauacgugacccagcagcugaucagagccgccgagauuagagccucugccaaucuggccgccaccaagaugucugagugugugcugggccagagcaagagaguggacuuuugcggcaagggcuaccaccugaugagcuucccucagucugccccucacggcgugguguuucugcacgugacauaugugcccgcucaagagaagaauuucaccaccgcuccagccaucugccacgacggcaaagcccacuuuccuagagaaggcguguucguguccaacggcacccauugguucgugacacagcggaacuucuacgagccccagaucaucaccaccgacaacaccuucgugucuggcaacugcgacguugugaucggcauugugaacaauaccguguacgacccucugcagcccgagcuggacagcuucaaagaggaacuggacaaguacuuuaagaaccacacaagccccgacguggaccugggcgauaucagcggaaucaaugccagcgucgugaacauccagaaagagaucgaccggcugaacgagguggccaagaaucugaacgagagccugaucgaccugcaagaacuggggaaguacgagcaguacaucaaguggcccugguacaucuggcugggcuuuaucgccggacugauugccaucgugauggucacaaucaugcuguguugcaugaccagcugcuguagcugccugaagggcuguuguagcuguggcagcugcugcaaguucgacgaggacgauucugagcccgugcugaagggcgugaaacugcacuacaccugaggacuagucccuguucccagagcccacuuuuuuuucuuuuuuugaaauaaaauagccugucuuucagaucuaaaaaaaaaaaaaaaaaaaaaaaaaaaaaaaaaaaaaaaaaaaaaaaaaaaaaaaaaaaaaaaaaaaaaaaaaaaaaaaaaaaaaaaaaaaaaaaaaaaa

SEQ ID NO: 25135 - RNA, 4161 nt, Artificial Sequence
  SARS-CoV-2/Wuhan/WIV05/2019__EPI_ISL_402128 spike protein mRNA gc mod (1-1273)(K986P_V987P_H69del_V70del_D614G)
aggagagggcgcuuggcuugcaaggacccugagcugcggcauugaagcacacccaacccaacucgacugaagucagccucacugaaccggaucugagaaucuucucucucugggcuugccagggcucuccgaaccuagcuagcauccucuucaauuccaacuagaaagcuuaccauguucguguuucuggugcugcugccccugguguccagccagugugugaaccugaccaccagaacacagcugccuccagccuacaccaacagcuucaccagaggcguguacuaccccgacaagguguucagauccagcgugcugcacucuacccaggaccuguuccugccuuucuucagcaacgugaccugguuccacgccaucuccggcaccaauggcaccaagagauucgacaaccccgugcugcccuucaacgacgggguguacuuugccagcaccgagaaguccaacaucaucagaggcuggaucuucggcaccacacuggacagcaagacccagagccugcugaucgugaacaacgccaccaacguggucaucaaagugugcgaguuccaguucugcaacgaccccuuccugggcgucuacuaccacaagaacaacaagagcuggauggaaagcgaguuccggguguacagcagcgccaacaacugcaccuucgaguacgugucccagccuuuccugauggaccuggaaggcaagcagggcaacuucaagaaccugcgcgaguucguguucaagaacaucgacggcuacuucaaaaucuacagcaagcacaccccuaucaaccucgugcgggaucugccucagggcuucucugcucuggaaccccugguggaucugcccaucggcaucaacaucacccgguuucagacacugcuggcccugcacagaagcuaccugacaccuggcgauagcagcagcggauggacagcuggugccgccgcuuacuaugugggcuaccugcagccuagaaccuuccugcugaaguacaacgagaacggcaccaucaccgacgccguggauugugcucuggauccucugagcgagacaaagugcacccugaaguccuucaccguggaaaagggcaucuaccagaccagcaacuuccgggugcagcccaccgaauccaucgugcgguuccccaauaucaccaaucugugccccuucggcgagguguucaaugccaccagauucgccucuguguacgccuggaaccggaagcggaucagcaauugcguggccgacuacuccgugcuguacaacuccgccagcuucagcaccuucaagugcuacggcguguccccuaccaagcugaacgaccugugcuucacaaacguguacgccgacagcuucgugauccggggagaugaagugcggcagauugccccuggacagacaggcaagaucgccgacuacaacuacaagcugcccgacgacuucaccggcugugugauugccuggaacagcaacaaccuggacuccaaagucggcggcaacuacaauuaccuguaccggcuguuccggaaguccaaucugaagcccuucgagcgggacaucagcaccgaaaucuaucaggccggcagcaccccuugcaacggcguggaaggcuucaacugcuacuucccacugcaguccuacggcuuucagcccacaaauggcgugggcuaucagcccuacagagugguggugcugagcuucgaacugcugcaugcuccugccacagugugcggcccuaagaaaagcaccaaucucgugaagaacaaaugcgugaacuucaacuucaacggccugaccggcaccggcgugcugacagagagcaacaagaaguuccugccauuccagcaguuuggccgggauaucgccgauaccacagacgccguuagagauccccagacacuggaaauccuggacaucaccccaugcagcuucggcggagugucugugaucaccccuggcaccaacaccagcaaucagguggcagugcuguaccagggcgugaacuguaccgaagugcccguggccauucacgccgaucagcugacaccuacauggcggguguacuccaccggcagcaauguguuucagaccagagccggcugucugaucggagccgagcacgugaacaauagcuacgagugcgacauccccaucggcgcuggcaucugugccagcuaccagacacagacaaacagccccagacgggcuagaagcguggccagccagagcaucauugccuacacaaugucucugggcgccgagaacagcguggccuacuccaacaacucuaucgcuauccccaccaacuucaccaucagcgugaccaccgagauccugccuguguccaugaccaagaccagcguggacugcaccauguacaucugcggcgauuccaccgagugcuccaaccugcugcugcaguacggcagcuucugcacccagcugaauagagcccugacagggaucgccguggaacaggacaagaacacccaagagguguucgcccaagugaagcaaaucuacaagaccccuccuaucaaggacuucggcggcuucaauuucagccagauucugcccgauccuagcaagcccagcaagcggagcuucaucgaggaccugcuguucaacaaagugacacuggccgacgccggcuucaucaagcaguauggcgauugucugggcgacauugccgccagggaucugauuugcgcccagaaguuuaacggacugacagugcugccuccucugcugaccgaugagaugaucgcccaguacacaucugcccugcuggccggcacaaucacaagcggcuggacauuuggagcuggcgccgcucugcagauccccuuugcuaugcagauggccuaccgguucaacggcaucggagugacccagaaugugcuguacgagaaccagaagcugaucgccaaccaguucaacagcgccaucggcaagauccaggacagccugagcagcacagcaagcgcccugggaaagcugcaggacguggucaaccagaaugcccaggcacugaacacccuggucaagcagcuguccuccaacuucggcgccaucagcucugugcugaacgauauccugagcagacuggacccuccugaggccgaggugcagaucgacagacugaucacaggcagacugcagagccuccagacauacgugacccagcagcugaucagagccgccgagauuagagccucugccaaucuggccgccaccaagaugucugagugugugcugggccagagcaagagaguggacuuuugcggcaagggcuaccaccugaugagcuucccucagucugccccucacggcgugguguuucugcacgugacauaugugcccgcucaagagaagaauuucaccaccgcuccagccaucugccacgacggcaaagcccacuuuccuagagaaggcguguucguguccaacggcacccauugguucgugacacagcggaacuucuacgagccccagaucaucaccaccgacaacaccuucgugucuggcaacugcgacguugugaucggcauugugaacaauaccguguacgacccucugcagcccgagcuggacagcuucaaagaggaacuggacaaguacuuuaagaaccacacaagccccgacguggaccugggcgauaucagcggaaucaaugccagcgucgugaacauccagaaagagaucgaccggcugaacgagguggccaagaaucugaacgagagccugaucgaccugcaagaacuggggaaguacgagcaguacaucaaguggcccugguacaucuggcugggcuuuaucgccggacugauugccaucgugauggucacaaucaugcuguguugcaugaccagcugcuguagcugccugaagggcuguuguagcuguggcagcugcugcaaguucgacgaggacgauucugagcccgugcugaagggcgugaaacugcacuacaccugaggacuagucccuguucccagagcccacuuuuuuuucuuuuuuugaaauaaaauagccugucuuucagaucuaaaaaaaaaaaaaaaaaaaaaaaaaaaaaaaaaaaaaaaaaaaaaaaaaaaaaaaaaaaaaaaaaaaaaaaaaaaaaaaaaaaaaaaaaaaaaaaaaaaa

SEQ ID NO: 25136 - RNA, 4167 nt, Artificial Sequence
  SARS-CoV-2/Wuhan/WIV05/2019__EPI_ISL_402128 spike protein mRNA gc mod (1-1273)(K986P_V987P_Y453F_D614G)
aggagagggcgcuuggcuugcaaggacccugagcugcggcauugaagcacacccaacccaacucgacugaagucagccucacugaaccggaucugagaaucuucucucucugggcuugccagggcucuccgaaccuagcuagcauccucuucaauuccaacuagaaagcuuaccauguucguguuucuggugcugcugccccugguguccagccagugugugaaccugaccaccagaacacagcugccuccagccuacaccaacagcuucaccagaggcguguacuaccccgacaagguguucagauccagcgugcugcacucuacccaggaccuguuccugccuuucuucagcaacgugaccugguuccacgccauccacguguccggcaccaauggcaccaagagauucgacaaccccgugcugcccuucaacgacgggguguacuuugccagcaccgagaaguccaacaucaucagaggcuggaucuucggcaccacacuggacagcaagacccagagccugcugaucgugaacaacgccaccaacguggucaucaaagugugcgaguuccaguucugcaacgaccccuuccugggcgucuacuaccacaagaacaacaagagcuggauggaaagcgaguuccggguguacagcagcgccaacaacugcaccuucgaguacgugucccagccuuuccugauggaccuggaaggcaagcagggcaacuucaagaaccugcgcgaguucguguucaagaacaucgacggcuacuucaaaaucuacagcaagcacaccccuaucaaccucgugcgggaucugccucagggcuucucugcucuggaaccccugguggaucugcccaucggcaucaacaucacccgguuucagacacugcuggcccugcacagaagcuaccugacaccuggcgauagcagcagcggauggacagcuggugccgccgcuuacuaugugggcuaccugcagccuagaaccuuccugcugaaguacaacgagaacggcaccaucaccgacgccguggauugugcucuggauccucugagcgagacaaagugcacccugaaguccuucaccguggaaaagggcaucuaccagaccagcaacuuccgggugcagcccaccgaauccaucgugcgguuccccaauaucaccaaucugugccccuucggcgagguguucaaugccaccagauucgccucuguguacgccuggaaccggaagcggaucagcaauugcguggccgacuacuccgugcuguacaacuccgccagcuucagcaccuucaagugcuacggcguguccccuaccaagcugaacgaccugugcuucacaaacguguacgccgacagcuucgugauccggggagaugaagugcggcagauugccccuggacagacaggcaagaucgccgacuacaacuacaagcugcccgacgacuucaccggcugugugauugccuggaacagcaacaaccuggacuccaaagucggcggcaacuacaauuaccuguuccggcuguuccggaaguccaaucugaagcccuucgagcgggacaucagcaccgaaaucuaucaggccggcagcaccccuugcaacggcguggaaggcuucaacugcuacuucccacugcaguccuacggcuuucagcccacaaauggcgugggcuaucagcccuacagagugguggugcugagcuucgaacugcugcaugcuccugccacagugugcggcccuaagaaaagcaccaaucucgugaagaacaaaugcgugaacuucaacuucaacggccugaccggcaccggcgugcugacagagagcaacaagaaguuccugccauuccagcaguuuggccgggauaucgccgauaccacagacgccguuagagauccccagacacuggaaauccuggacaucaccccaugcagcuucggcggagugucugugaucaccccuggcaccaacaccagcaaucagguggcagugcuguaccagggcgugaacuguaccgaagugcccguggccauucacgccgaucagcugacaccuacauggcggguguacuccaccggcagcaauguguuucagaccagagccggcugucugaucggagccgagcacgugaacaauagcuacgagugcgacauccccaucggcgcuggcaucugugccagcuaccagacacagacaaacagccccagacgggcuagaagcguggccagccagagcaucauugccuacacaaugucucugggcgccgagaacagcguggccuacuccaacaacucuaucgcuauccccaccaacuucaccaucagcgugaccaccgagauccugccuguguccaugaccaagaccagcguggacugcaccauguacaucugcggcgauuccaccgagugcuccaaccugcugcugcaguacggcagcuucugcacccagcugaauagagcccugacagggaucgccguggaacaggacaagaacacccaagagguguucgcccaagugaagcaaaucuacaagaccccuccuaucaaggacuucggcggcuucaauuucagccagauucugcccgauccuagcaagcccagcaagcggagcuucaucgaggaccugcuguucaacaaagugacacuggccgacgccggcuucaucaagcaguauggcgauugucugggcgacauugccgccagggaucugauuugcgcccagaaguuuaacggacugacagugcugccuccucugcugaccgaugagaugaucgcccaguacacaucugcccugcuggccggcacaaucacaagcggcuggacauuuggagcuggcgccgcucugcagauccccuuugcuaugcagauggccuaccgguucaacggcaucggagugacccagaaugugcuguacgagaaccagaagcugaucgccaaccaguucaacagcgccaucggcaagauccaggacagccugagcagcacagcaagcgcccugggaaagcugcaggacguggucaaccagaaugcccaggcacugaacacccuggucaagcagcuguccuccaacuucggcgccaucagcucugugcugaacgauauccugagcagacuggacccuccugaggccgaggugcagaucgacagacugaucacaggcagacugcagagccuccagacauacgugacccagcagcugaucagagccgccgagauuagagccucugccaaucuggccgccaccaagaugucugagugugugcugggccagagcaagagaguggacuuuugcggcaagggcuaccaccugaugagcuucccucagucugccccucacggcgugguguuucugcacgugacauaugugcccgcucaagagaagaauuucaccaccgcuccagccaucugccacgacggcaaagcccacuuuccuagagaaggcguguucguguccaacggcacccauugguucgugacacagcggaacuucuacgagccccagaucaucaccaccgacaacaccuucgugucuggcaacugcgacguugugaucggcauugugaacaauaccguguacgacccucugcagcccgagcuggacagcuucaaagaggaacuggacaaguacuuuaagaaccacacaagccccgacguggaccugggcgauaucagcggaaucaaugccagcgucgugaacauccagaaagagaucgaccggcugaacgagguggccaagaaucugaacgagagccugaucgaccugcaagaacuggggaaguacgagcaguacaucaaguggcccugguacaucuggcugggcuuuaucgccggacugauugccaucgugauggucacaaucaugcuguguugcaugaccagcugcuguagcugccugaagggcuguuguagcuguggcagcugcugcaaguucgacgaggacgauucugagcccgugcugaagggcgugaaacugcacuacaccugaggacuagucccuguucccagagcccacuuuuuuuucuuuuuuugaaauaaaauagccugucuuucagaucuaaaaaaaaaaaaaaaaaaaaaaaaaaaaaaaaaaaaaaaaaaaaaaaaaaaaaaaaaaaaaaaaaaaaaaaaaaaaaaaaaaaaaaaaaaaaaaaaaaaa

SEQ ID NO: 25137 - RNA, 4167 nt, Artificial Sequence
  SARS-CoV-2/Wuhan/WIV05/2019__EPI_ISL_402128 spike protein mRNA gc mod (1-1273)(K986P_V987P_D614G_I692V)
aggagagggcgcuuggcuugcaaggacccugagcugcggcauugaagcacacccaacccaacucgacugaagucagccucacugaaccggaucugagaaucuucucucucugggcuugccagggcucuccgaaccuagcuagcauccucuucaauuccaacuagaaagcuuaccauguucguguuucuggugcugcugccccugguguccagccagugugugaaccugaccaccagaacacagcugccuccagccuacaccaacagcuucaccagaggcguguacuaccccgacaagguguucagauccagcgugcugcacucuacccaggaccuguuccugccuuucuucagcaacgugaccugguuccacgccauccacguguccggcaccaauggcaccaagagauucgacaaccccgugcugcccuucaacgacgggguguacuuugccagcaccgagaaguccaacaucaucagaggcuggaucuucggcaccacacuggacagcaagacccagagccugcugaucgugaacaacgccaccaacguggucaucaaagugugcgaguuccaguucugcaacgaccccuuccugggcgucuacuaccacaagaacaacaagagcuggauggaaagcgaguuccggguguacagcagcgccaacaacugcaccuucgaguacgugucccagccuuuccugauggaccuggaaggcaagcagggcaacuucaagaaccugcgcgaguucguguucaagaacaucgacggcuacuucaaaaucuacagcaagcacaccccuaucaaccucgugcgggaucugccucagggcuucucugcucuggaaccccugguggaucugcccaucggcaucaacaucacccgguuucagacacugcuggcccugcacagaagcuaccugacaccuggcgauagcagcagcggauggacagcuggugccgccgcuuacuaugugggcuaccugcagccuagaaccuuccugcugaaguacaacgagaacggcaccaucaccgacgccguggauugugcucuggauccucugagcgagacaaagugcacccugaaguccuucaccguggaaaagggcaucuaccagaccagcaacuuccgggugcagcccaccgaauccaucgugcgguuccccaauaucaccaaucugugccccuucggcgagguguucaaugccaccagauucgccucuguguacgccuggaaccggaagcggaucagcaauugcguggccgacuacuccgugcuguacaacuccgccagcuucagcaccuucaagugcuacggcguguccccuaccaagcugaacgaccugugcuucacaaacguguacgccgacagcuucgugauccggggagaugaagugcggcagauugccccuggacagacaggcaagaucgccgacuacaacuacaagcugcccgacgacuucaccggcugugugauugccuggaacagcaacaaccuggacuccaaagucggcggcaacuacaauuaccuguaccggcuguuccggaaguccaaucugaagcccuucgagcgggacaucagcaccgaaaucuaucaggccggcagcaccccuugcaacggcguggaaggcuucaacugcuacuucccacugcaguccuacggcuuucagcccacaaauggcgugggcuaucagcccuacagagugguggugcugagcuucgaacugcugcaugcuccugccacagugugcggcccuaagaaaagcaccaaucucgugaagaacaaaugcgugaacuucaacuucaacggccugaccggcaccggcgugcugacagagagcaacaagaaguuccugccauuccagcaguuuggccgggauaucgccgauaccacagacgccguuagagauccccagacacuggaaauccuggacaucaccccaugcagcuucggcggagugucugugaucaccccuggcaccaacaccagcaaucagguggcagugcuguaccagggcgugaacuguaccgaagugcccguggccauucacgccgaucagcugacaccuacauggcggguguacuccaccggcagcaauguguuucagaccagagccggcugucugaucggagccgagcacgugaacaauagcuacgagugcgacauccccaucggcgcuggcaucugugccagcuaccagacacagacaaacagccccagacgggcuagaagcguggccagccagagcgugauugccuacacaaugucucugggcgccgagaacagcguggccuacuccaacaacucuaucgcuauccccaccaacuucaccaucagcgugaccaccgagauccugccuguguccaugaccaagaccagcguggacugcaccauguacaucugcggcgauuccaccgagugcuccaaccugcugcugcaguacggcagcuucugcacccagcugaauagagcccugacagggaucgccguggaacaggacaagaacacccaagagguguucgcccaagugaagcaaaucuacaagaccccuccuaucaaggacuucggcggcuucaauuucagccagauucugcccgauccuagcaagcccagcaagcggagcuucaucgaggaccugcuguucaacaaagugacacuggccgacgccggcuucaucaagcaguauggcgauugucugggcgacauugccgccagggaucugauuugcgcccagaaguuuaacggacugacagugcugccuccucugcugaccgaugagaugaucgcccaguacacaucugcccugcuggccggcacaaucacaagcggcuggacauuuggagcuggcgccgcucugcagauccccuuugcuaugcagauggccuaccgguucaacggcaucggagugacccagaaugugcuguacgagaaccagaagcugaucgccaaccaguucaacagcgccaucggcaagauccaggacagccugagcagcacagcaagcgcccugggaaagcugcaggacguggucaaccagaaugcccaggcacugaacacccuggucaagcagcuguccuccaacuucggcgccaucagcucugugcugaacgauauccugagcagacuggacccuccugaggccgaggugcagaucgacagacugaucacaggcagacugcagagccuccagacauacgugacccagcagcugaucagagccgccgagauuagagccucugccaaucuggccgccaccaagaugucugagugugugcugggccagagcaagagaguggacuuuugcggcaagggcuaccaccugaugagcuucccucagucugccccucacggcgugguguuucugcacgugacauaugugcccgcucaagagaagaauuucaccaccgcuccagccaucugccacgacggcaaagcccacuuuccuagagaaggcguguucguguccaacggcacccauugguucgugacacagcggaacuucuacgagccccagaucaucaccaccgacaacaccuucgugucuggcaacugcgacguugugaucggcauugugaacaauaccguguacgacccucugcagcccgagcuggacagcuucaaagaggaacuggacaaguacuuuaagaaccacacaagccccgacguggaccugggcgauaucagcggaaucaaugccagcgucgugaacauccagaaagagaucgaccggcugaacgagguggccaagaaucugaacgagagccugaucgaccugcaagaacuggggaaguacgagcaguacaucaaguggcccugguacaucuggcugggcuuuaucgccggacugauugccaucgugauggucacaaucaugcuguguugcaugaccagcugcuguagcugccugaagggcuguuguagcuguggcagcugcugcaaguucgacgaggacgauucugagcccgugcugaagggcgugaaacugcacuacaccugaggacuagucccuguucccagagcccacuuuuuuuucuuuuuuugaaauaaaauagccugucuuucagaucuaaaaaaaaaaaaaaaaaaaaaaaaaaaaaaaaaaaaaaaaaaaaaaaaaaaaaaaaaaaaaaaaaaaaaaaaaaaaaaaaaaaaaaaaaaaaaaaaaaaa

SEQ ID NO: 25138 - RNA, 4167 nt, Artificial Sequence
  SARS-CoV-2/Wuhan/WIV05/2019__EPI_ISL_402128 spike protein mRNA gc mod (1-1273)(K986P_V987P_D614G_M1229I)
aggagagggcgcuuggcuugcaaggacccugagcugcggcauugaagcacacccaacccaacucgacugaagucagccucacugaaccggaucugagaaucuucucucucugggcuugccagggcucuccgaaccuagcuagcauccucuucaauuccaacuagaaagcuuaccauguucguguuucuggugcugcugccccugguguccagccagugugugaaccugaccaccagaacacagcugccuccagccuacaccaacagcuucaccagaggcguguacuaccccgacaagguguucagauccagcgugcugcacucuacccaggaccuguuccugccuuucuucagcaacgugaccugguuccacgccauccacguguccggcaccaauggcaccaagagauucgacaaccccgugcugcccuucaacgacgggguguacuuugccagcaccgagaaguccaacaucaucagaggcuggaucuucggcaccacacuggacagcaagacccagagccugcugaucgugaacaacgccaccaacguggucaucaaagugugcgaguuccaguucugcaacgaccccuuccugggcgucuacuaccacaagaacaacaagagcuggauggaaagcgaguuccggguguacagcagcgccaacaacugcaccuucgaguacgugucccagccuuuccugauggaccuggaaggcaagcagggcaacuucaagaaccugcgcgaguucguguucaagaacaucgacggcuacuucaaaaucuacagcaagcacaccccuaucaaccucgugcgggaucugccucagggcuucucugcucuggaaccccugguggaucugcccaucggcaucaacaucacccgguuucagacacugcuggcccugcacagaagcuaccugacaccuggcgauagcagcagcggauggacagcuggugccgccgcuuacuaugugggcuaccugcagccuagaaccuuccugcugaaguacaacgagaacggcaccaucaccgacgccguggauugugcucuggauccucugagcgagacaaagugcacccugaaguccuucaccguggaaaagggcaucuaccagaccagcaacuuccgggugcagcccaccgaauccaucgugcgguuccccaauaucaccaaucugugccccuucggcgagguguucaaugccaccagauucgccucuguguacgccuggaaccggaagcggaucagcaauugcguggccgacuacuccgugcuguacaacuccgccagcuucagcaccuucaagugcuacggcguguccccuaccaagcugaacgaccugugcuucacaaacguguacgccgacagcuucgugauccggggagaugaagugcggcagauugccccuggacagacaggcaagaucgccgacuacaacuacaagcugcccgacgacuucaccggcugugugauugccuggaacagcaacaaccuggacuccaaagucggcggcaacuacaauuaccuguaccggcuguuccggaaguccaaucugaagcccuucgagcgggacaucagcaccgaaaucuaucaggccggcagcaccccuugcaacggcguggaaggcuucaacugcuacuucccacugcaguccuacggcuuucagcccacaaauggcgugggcuaucagcccuacagagugguggugcugagcuucgaacugcugcaugcuccugccacagugugcggcccuaagaaaagcaccaaucucgugaagaacaaaugcgugaacuucaacuucaacggccugaccggcaccggcgugcugacagagagcaacaagaaguuccugccauuccagcaguuuggccgggauaucgccgauaccacagacgccguuagagauccccagacacuggaaauccuggacaucaccccaugcagcuucggcggagugucugugaucaccccuggcaccaacaccagcaaucagguggcagugcuguaccagggcgugaacuguaccgaagugcccguggccauucacgccgaucagcugacaccuacauggcggguguacuccaccggcagcaauguguuucagaccagagccggcugucugaucggagccgagcacgugaacaauagcuacgagugcgacauccccaucggcgcuggcaucugugccagcuaccagacacagacaaacagccccagacgggcuagaagcguggccagccagagcaucauugccuacacaaugucucugggcgccgagaacagcguggccuacuccaacaacucuaucgcuauccccaccaacuucaccaucagcgugaccaccgagauccugccuguguccaugaccaagaccagcguggacugcaccauguacaucugcggcgauuccaccgagugcuccaaccugcugcugcaguacggcagcuucugcacccagcugaauagagcccugacagggaucgccguggaacaggacaagaacacccaagagguguucgcccaagugaagcaaaucuacaagaccccuccuaucaaggacuucggcggcuucaauuucagccagauucugcccgauccuagcaagcccagcaagcggagcuucaucgaggaccugcuguucaacaaagugacacuggccgacgccggcuucaucaagcaguauggcgauugucugggcgacauugccgccagggaucugauuugcgcccagaaguuuaacggacugacagugcugccuccucugcugaccgaugagaugaucgcccaguacacaucugcccugcuggccggcacaaucacaagcggcuggacauuuggagcuggcgccgcucugcagauccccuuugcuaugcagauggccuaccgguucaacggcaucggagugacccagaaugugcuguacgagaaccagaagcugaucgccaaccaguucaacagcgccaucggcaagauccaggacagccugagcagcacagcaagcgcccugggaaagcugcaggacguggucaaccagaaugcccaggcacugaacacccuggucaagcagcuguccuccaacuucggcgccaucagcucugugcugaacgauauccugagcagacuggacccuccugaggccgaggugcagaucgacagacugaucacaggcagacugcagagccuccagacauacgugacccagcagcugaucagagccgccgagauuagagccucugccaaucuggccgccaccaagaugucugagugugugcugggccagagcaagagaguggacuuuugcggcaagggcuaccaccugaugagcuucccucagucugccccucacggcgugguguuucugcacgugacauaugugcccgcucaagagaagaauuucaccaccgcuccagccaucugccacgacggcaaagcccacuuuccuagagaaggcguguucguguccaacggcacccauugguucgugacacagcggaacuucuacgagccccagaucaucaccaccgacaacaccuucgugucuggcaacugcgacguugugaucggcauugugaacaauaccguguacgacccucugcagcccgagcuggacagcuucaaagaggaacuggacaaguacuuuaagaaccacacaagccccgacguggaccugggcgauaucagcggaaucaaugccagcgucgugaacauccagaaagagaucgaccggcugaacgagguggccaagaaucugaacgagagccugaucgaccugcaagaacuggggaaguacgagcaguacaucaaguggcccugguacaucuggcugggcuuuaucgccggacugauugccaucgugaucgucacaaucaugcuguguugcaugaccagcugcuguagcugccugaagggcuguuguagcuguggcagcugcugcaaguucgacgaggacgauucugagcccgugcugaagggcgugaaacugcacuacaccugaggacuagucccuguucccagagcccacuuuuuuuucuuuuuuugaaauaaaauagccugucuuucagaucuaaaaaaaaaaaaaaaaaaaaaaaaaaaaaaaaaaaaaaaaaaaaaaaaaaaaaaaaaaaaaaaaaaaaaaaaaaaaaaaaaaaaaaaaaaaaaaaaaaaa

SEQ ID NO: 25139 - RNA, 4161 nt, Artificial Sequence
  SARS-CoV-2/Wuhan/WIV05/2019__EPI_ISL_402128 spike protein mRNA gc mod (1-1273)(K986P_V987P_H69del_V70del_A222V_Y453F_S477N_D614G_I692V)
aggagagggcgcuuggcuugcaaggacccugagcugcggcauugaagcacacccaacccaacucgacugaagucagccucacugaaccggaucugagaaucuucucucucugggcuugccagggcucuccgaaccuagcuagcauccucuucaauuccaacuagaaagcuuaccauguucguguuucuggugcugcugccccugguguccagccagugugugaaccugaccaccagaacacagcugccuccagccuacaccaacagcuucaccagaggcguguacuaccccgacaagguguucagauccagcgugcugcacucuacccaggaccuguuccugccuuucuucagcaacgugaccugguuccacgccaucuccggcaccaauggcaccaagagauucgacaaccccgugcugcccuucaacgacgggguguacuuugccagcaccgagaaguccaacaucaucagaggcuggaucuucggcaccacacuggacagcaagacccagagccugcugaucgugaacaacgccaccaacguggucaucaaagugugcgaguuccaguucugcaacgaccccuuccugggcgucuacuaccacaagaacaacaagagcuggauggaaagcgaguuccggguguacagcagcgccaacaacugcaccuucgaguacgugucccagccuuuccugauggaccuggaaggcaagcagggcaacuucaagaaccugcgcgaguucguguucaagaacaucgacggcuacuucaaaaucuacagcaagcacaccccuaucaaccucgugcgggaucugccucagggcuucucugugcuggaaccccugguggaucugcccaucggcaucaacaucacccgguuucagacacugcuggcccugcacagaagcuaccugacaccuggcgauagcagcagcggauggacagcuggugccgccgcuuacuaugugggcuaccugcagccuagaaccuuccugcugaaguacaacgagaacggcaccaucaccgacgccguggauugugcucuggauccucugagcgagacaaagugcacccugaaguccuucaccguggaaaagggcaucuaccagaccagcaacuuccgggugcagcccaccgaauccaucgugcgguuccccaauaucaccaaucugugccccuucggcgagguguucaaugccaccagauucgccucuguguacgccuggaaccggaagcggaucagcaauugcguggccgacuacuccgugcuguacaacuccgccagcuucagcaccuucaagugcuacggcguguccccuaccaagcugaacgaccugugcuucacaaacguguacgccgacagcuucgugauccggggagaugaagugcggcagauugccccuggacagacaggcaagaucgccgacuacaacuacaagcugcccgacgacuucaccggcugugugauugccuggaacagcaacaaccuggacuccaaagucggcggcaacuacaauuaccuguuccggcuguuccggaaguccaaucugaagcccuucgagcgggacaucagcaccgaaaucuaucaggccggcaacaccccuugcaacggcguggaaggcuucaacugcuacuucccacugcaguccuacggcuuucagcccacaaauggcgugggcuaucagcccuacagagugguggugcugagcuucgaacugcugcaugcuccugccacagugugcggcccuaagaaaagcaccaaucucgugaagaacaaaugcgugaacuucaacuucaacggccugaccggcaccggcgugcugacagagagcaacaagaaguuccugccauuccagcaguuuggccgggauaucgccgauaccacagacgccguuagagauccccagacacuggaaauccuggacaucaccccaugcagcuucggcggagugucugugaucaccccuggcaccaacaccagcaaucagguggcagugcuguaccagggcgugaacuguaccgaagugcccguggccauucacgccgaucagcugacaccuacauggcggguguacuccaccggcagcaauguguuucagaccagagccggcugucugaucggagccgagcacgugaacaauagcuacgagugcgacauccccaucggcgcuggcaucugugccagcuaccagacacagacaaacagccccagacgggcuagaagcguggccagccagagcgugauugccuacacaaugucucugggcgccgagaacagcguggccuacuccaacaacucuaucgcuauccccaccaacuucaccaucagcgugaccaccgagauccugccuguguccaugaccaagaccagcguggacugcaccauguacaucugcggcgauuccaccgagugcuccaaccugcugcugcaguacggcagcuucugcacccagcugaauagagcccugacagggaucgccguggaacaggacaagaacacccaagagguguucgcccaagugaagcaaaucuacaagaccccuccuaucaaggacuucggcggcuucaauuucagccagauucugcccgauccuagcaagcccagcaagcggagcuucaucgaggaccugcuguucaacaaagugacacuggccgacgccggcuucaucaagcaguauggcgauugucugggcgacauugccgccagggaucugauuugcgcccagaaguuuaacggacugacagugcugccuccucugcugaccgaugagaugaucgcccaguacacaucugcccugcuggccggcacaaucacaagcggcuggacauuuggagcuggcgccgcucugcagauccccuuugcuaugcagauggccuaccgguucaacggcaucggagugacccagaaugugcuguacgagaaccagaagcugaucgccaaccaguucaacagcgccaucggcaagauccaggacagccugagcagcacagcaagcgcccugggaaagcugcaggacguggucaaccagaaugcccaggcacugaacacccuggucaagcagcuguccuccaacuucggcgccaucagcucugugcugaacgauauccugagcagacuggacccuccugaggccgaggugcagaucgacagacugaucacaggcagacugcagagccuccagacauacgugacccagcagcugaucagagccgccgagauuagagccucugccaaucuggccgccaccaagaugucugagugugugcugggccagagcaagagaguggacuuuugcggcaagggcuaccaccugaugagcuucccucagucugccccucacggcgugguguuucugcacgugacauaugugcccgcucaagagaagaauuucaccaccgcuccagccaucugccacgacggcaaagcccacuuuccuagagaaggcguguucguguccaacggcacccauugguucgugacacagcggaacuucuacgagccccagaucaucaccaccgacaacaccuucgugucuggcaacugcgacguugugaucggcauugugaacaauaccguguacgacccucugcagcccgagcuggacagcuucaaagaggaacuggacaaguacuuuaagaaccacacaagccccgacguggaccugggcgauaucagcggaaucaaugccagcgucgugaacauccagaaagagaucgaccggcugaacgagguggccaagaaucugaacgagagccugaucgaccugcaagaacuggggaaguacgagcaguacaucaaguggcccugguacaucuggcugggcuuuaucgccggacugauugccaucgugauggucacaaucaugcuguguugcaugaccagcugcuguagcugccugaagggcuguuguagcuguggcagcugcugcaaguucgacgaggacgauucugagcccgugcugaagggcgugaaacugcacuacaccugaggacuagucccuguucccagagcccacuuuuuuuucuuuuuuugaaauaaaauagccugucuuucagaucuaaaaaaaaaaaaaaaaaaaaaaaaaaaaaaaaaaaaaaaaaaaaaaaaaaaaaaaaaaaaaaaaaaaaaaaaaaaaaaaaaaaaaaaaaaaaaaaaaaaa

SEQ ID NO: 25140 - RNA, 4161 nt, Artificial Sequence
  SARS-CoV-2/Wuhan/WIV05/2019__EPI_ISL_402128 spike protein mRNA gc mod (1-1273)(K986P_V987P_H69del_V70del_Y453F_D614G_I692V_M1229I)
aggagagggcgcuuggcuugcaaggacccugagcugcggcauugaagcacacccaacccaacucgacugaagucagccucacugaaccggaucugagaaucuucucucucugggcuugccagggcucuccgaaccuagcuagcauccucuucaauuccaacuagaaagcuuaccauguucguguuucuggugcugcugccccugguguccagccagugugugaaccugaccaccagaacacagcugccuccagccuacaccaacagcuucaccagaggcguguacuaccccgacaagguguucagauccagcgugcugcacucuacccaggaccuguuccugccuuucuucagcaacgugaccugguuccacgccaucuccggcaccaauggcaccaagagauucgacaaccccgugcugcccuucaacgacgggguguacuuugccagcaccgagaaguccaacaucaucagaggcuggaucuucggcaccacacuggacagcaagacccagagccugcugaucgugaacaacgccaccaacguggucaucaaagugugcgaguuccaguucugcaacgaccccuuccugggcgucuacuaccacaagaacaacaagagcuggauggaaagcgaguuccggguguacagcagcgccaacaacugcaccuucgaguacgugucccagccuuuccugauggaccuggaaggcaagcagggcaacuucaagaaccugcgcgaguucguguucaagaacaucgacggcuacuucaaaaucuacagcaagcacaccccuaucaaccucgugcgggaucugccucagggcuucucugcucuggaaccccugguggaucugcccaucggcaucaacaucacccgguuucagacacugcuggcccugcacagaagcuaccugacaccuggcgauagcagcagcggauggacagcuggugccgccgcuuacuaugugggcuaccugcagccuagaaccuuccugcugaaguacaacgagaacggcaccaucaccgacgccguggauugugcucuggauccucugagcgagacaaagugcacccugaaguccuucaccguggaaaagggcaucuaccagaccagcaacuuccgggugcagcccaccgaauccaucgugcgguuccccaauaucaccaaucugugccccuucggcgagguguucaaugccaccagauucgccucuguguacgccuggaaccggaagcggaucagcaauugcguggccgacuacuccgugcuguacaacuccgccagcuucagcaccuucaagugcuacggcguguccccuaccaagcugaacgaccugugcuucacaaacguguacgccgacagcuucgugauccggggagaugaagugcggcagauugccccuggacagacaggcaagaucgccgacuacaacuacaagcugcccgacgacuucaccggcugugugauugccuggaacagcaacaaccuggacuccaaagucggcggcaacuacaauuaccuguuccggcuguuccggaaguccaaucugaagcccuucgagcgggacaucagcaccgaaaucuaucaggccggcagcaccccuugcaacggcguggaaggcuucaacugcuacuucccacugcaguccuacggcuuucagcccacaaauggcgugggcuaucagcccuacagagugguggugcugagcuucgaacugcugcaugcuccugccacagugugcggcccuaagaaaagcaccaaucucgugaagaacaaaugcgugaacuucaacuucaacggccugaccggcaccggcgugcugacagagagcaacaagaaguuccugccauuccagcaguuuggccgggauaucgccgauaccacagacgccguuagagauccccagacacuggaaauccuggacaucaccccaugcagcuucggcggagugucugugaucaccccuggcaccaacaccagcaaucagguggcagugcuguaccagggcgugaacuguaccgaagugcccguggccauucacgccgaucagcugacaccuacauggcggguguacuccaccggcagcaauguguuucagaccagagccggcugucugaucggagccgagcacgugaacaauagcuacgagugcgacauccccaucggcgcuggcaucugugccagcuaccagacacagacaaacagccccagacgggcuagaagcguggccagccagagcgugauugccuacacaaugucucugggcgccgagaacagcguggccuacuccaacaacucuaucgcuauccccaccaacuucaccaucagcgugaccaccgagauccugccuguguccaugaccaagaccagcguggacugcaccauguacaucugcggcgauuccaccgagugcuccaaccugcugcugcaguacggcagcuucugcacccagcugaauagagcccugacagggaucgccguggaacaggacaagaacacccaagagguguucgcccaagugaagcaaaucuacaagaccccuccuaucaaggacuucggcggcuucaauuucagccagauucugcccgauccuagcaagcccagcaagcggagcuucaucgaggaccugcuguucaacaaagugacacuggccgacgccggcuucaucaagcaguauggcgauugucugggcgacauugccgccagggaucugauuugcgcccagaaguuuaacggacugacagugcugccuccucugcugaccgaugagaugaucgcccaguacacaucugcccugcuggccggcacaaucacaagcggcuggacauuuggagcuggcgccgcucugcagauccccuuugcuaugcagauggccuaccgguucaacggcaucggagugacccagaaugugcuguacgagaaccagaagcugaucgccaaccaguucaacagcgccaucggcaagauccaggacagccugagcagcacagcaagcgcccugggaaagcugcaggacguggucaaccagaaugcccaggcacugaacacccuggucaagcagcuguccuccaacuucggcgccaucagcucugugcugaacgauauccugagcagacuggacccuccugaggccgaggugcagaucgacagacugaucacaggcagacugcagagccuccagacauacgugacccagcagcugaucagagccgccgagauuagagccucugccaaucuggccgccaccaagaugucugagugugugcugggccagagcaagagaguggacuuuugcggcaagggcuaccaccugaugagcuucccucagucugccccucacggcgugguguuucugcacgugacauaugugcccgcucaagagaagaauuucaccaccgcuccagccaucugccacgacggcaaagcccacuuuccuagagaaggcguguucguguccaacggcacccauugguucgugacacagcggaacuucuacgagccccagaucaucaccaccgacaacaccuucgugucuggcaacugcgacguugugaucggcauugugaacaauaccguguacgacccucugcagcccgagcuggacagcuucaaagaggaacuggacaaguacuuuaagaaccacacaagccccgacguggaccugggcgauaucagcggaaucaaugccagcgucgugaacauccagaaagagaucgaccggcugaacgagguggccaagaaucugaacgagagccugaucgaccugcaagaacuggggaaguacgagcaguacaucaaguggcccugguacaucuggcugggcuuuaucgccggacugauugccaucgugaucgucacaaucaugcuguguugcaugaccagcugcuguagcugccugaagggcuguuguagcuguggcagcugcugcaaguucgacgaggacgauucugagcccgugcugaagggcgugaaacugcacuacaccugaggacuagucccuguucccagagcccacuuuuuuuucuuuuuuugaaauaaaauagccugucuuucagaucuaaaaaaaaaaaaaaaaaaaaaaaaaaaaaaaaaaaaaaaaaaaaaaaaaaaaaaaaaaaaaaaaaaaaaaaaaaaaaaaaaaaaaaaaaaaaaaaaaaaa

SEQ ID NO: 25141 - RNA, 4158 nt, Artificial Sequence
  SARS-CoV-2/Wuhan/WIV05/2019__EPI_ISL_402128 spike protein mRNA gc mod (1-1273)(K986P_V987P_K986P_V987P_H69del_V70del_Y144del_N501Y_A570 D_D614G_P681H_T716I_S982A_D1118H)
aggagagggcgcuuggcuugcaaggacccugagcugcggcauugaagcacacccaacccaacucgacugaagucagccucacugaaccggaucugagaaucuucucucucugggcuugccagggcucuccgaaccuagcuagcauccucuucaauuccaacuagaaagcuuaccauguucguguuucuggugcugcugccccugguguccagccagugugugaaccugaccaccagaacacagcugccuccagccuacaccaacagcuucaccagaggcguguacuaccccgacaagguguucagauccagcgugcugcacucuacccaggaccuguuccugccuuucuucagcaacgugaccugguuccacgccaucuccggcaccaauggcaccaagagauucgacaaccccgugcugcccuucaacgacgggguguacuuugccagcaccgagaaguccaacaucaucagaggcuggaucuucggcaccacacuggacagcaagacccagagccugcugaucgugaacaacgccaccaacguggucaucaaagugugcgaguuccaguucugcaacgaccccuuccugggcgucuaccacaagaacaacaagagcuggauggaaagcgaguuccggguguacagcagcgccaacaacugcaccuucgaguacgugucccagccuuuccugauggaccuggaaggcaagcagggcaacuucaagaaccugcgcgaguucguguucaagaacaucgacggcuacuucaaaaucuacagcaagcacaccccuaucaaccucgugcgggaucugccucagggcuucucugcucuggaaccccugguggaucugcccaucggcaucaacaucacccgguuucagacacugcuggcccugcacagaagcuaccugacaccuggcgauagcagcagcggauggacagcuggugccgccgcuuacuaugugggcuaccugcagccuagaaccuuccugcugaaguacaacgagaacggcaccaucaccgacgccguggauugugcucuggauccucugagcgagacaaagugcacccugaaguccuucaccguggaaaagggcaucuaccagaccagcaacuuccgggugcagcccaccgaauccaucgugcgguuccccaauaucaccaaucugugccccuucggcgagguguucaaugccaccagauucgccucuguguacgccuggaaccggaagcggaucagcaauugcguggccgacuacuccgugcuguacaacuccgccagcuucagcaccuucaagugcuacggcguguccccuaccaagcugaacgaccugugcuucacaaacguguacgccgacagcuucgugauccggggagaugaagugcggcagauugccccuggacagacaggcaagaucgccgacuacaacuacaagcugcccgacgacuucaccggcugugugauugccuggaacagcaacaaccuggacuccaaagucggcggcaacuacaauuaccuguaccggcuguuccggaaguccaaucugaagcccuucgagcgggacaucagcaccgaaaucuaucaggccggcagcaccccuugcaacggcguggaaggcuucaacugcuacuucccacugcaguccuacggcuuucagcccacauacggcgugggcuaucagcccuacagagugguggugcugagcuucgaacugcugcaugcuccugccacagugugcggcccuaagaaaagcaccaaucucgugaagaacaaaugcgugaacuucaacuucaacggccugaccggcaccggcgugcugacagagagcaacaagaaguuccugccauuccagcaguuuggccgggauaucgacgauaccacagacgccguuagagauccccagacacuggaaauccuggacaucaccccaugcagcuucggcggagugucugugaucaccccuggcaccaacaccagcaaucagguggcagugcuguaccagggcgugaacuguaccgaagugcccguggccauucacgccgaucagcugacaccuacauggcggguguacuccaccggcagcaauguguuucagaccagagccggcugucugaucggagccgagcacgugaacaauagcuacgagugcgacauccccaucggcgcuggcaucugugccagcuaccagacacagacaaacagccacagacgggcuagaagcguggccagccagagcaucauugccuacacaaugucucugggcgccgagaacagcguggccuacuccaacaacucuaucgcuauccccaucaacuucaccaucagcgugaccaccgagauccugccuguguccaugaccaagaccagcguggacugcaccauguacaucugcggcgauuccaccgagugcuccaaccugcugcugcaguacggcagcuucugcacccagcugaauagagcccugacagggaucgccguggaacaggacaagaacacccaagagguguucgcccaagugaagcaaaucuacaagaccccuccuaucaaggacuucggcggcuucaauuucagccagauucugcccgauccuagcaagcccagcaagcggagcuucaucgaggaccugcuguucaacaaagugacacuggccgacgccggcuucaucaagcaguauggcgauugucugggcgacauugccgccagggaucugauuugcgcccagaaguuuaacggacugacagugcugccuccucugcugaccgaugagaugaucgcccaguacacaucugcccugcuggccggcacaaucacaagcggcuggacauuuggagcuggcgccgcucugcagauccccuuugcuaugcagauggccuaccgguucaacggcaucggagugacccagaaugugcuguacgagaaccagaagcugaucgccaaccaguucaacagcgccaucggcaagauccaggacagccugagcagcacagcaagcgcccugggaaagcugcaggacguggucaaccagaaugcccaggcacugaacacccuggucaagcagcuguccuccaacuucggcgccaucagcucugugcugaacgauauccuggccagacuggacccuccugaggccgaggugcagaucgacagacugaucacaggcagacugcagagccuccagacauacgugacccagcagcugaucagagccgccgagauuagagccucugccaaucuggccgccaccaagaugucugagugugugcugggccagagcaagagaguggacuuuugcggcaagggcuaccaccugaugagcuucccucagucugccccucacggcgugguguuucugcacgugacauaugugcccgcucaagagaagaauuucaccaccgcuccagccaucugccacgacggcaaagcccacuuuccuagagaaggcguguucguguccaacggcacccauugguucgugacacagcggaacuucuacgagccccagaucaucaccacccacaacaccuucgugucuggcaacugcgacguugugaucggcauugugaacaauaccguguacgacccucugcagcccgagcuggacagcuucaaagaggaacuggacaaguacuuuaagaaccacacaagccccgacguggaccugggcgauaucagcggaaucaaugccagcgucgugaacauccagaaagagaucgaccggcugaacgagguggccaagaaucugaacgagagccugaucgaccugcaagaacuggggaaguacgagcaguacaucaaguggcccugguacaucuggcugggcuuuaucgccggacugauugccaucgugauggucacaaucaugcuguguugcaugaccagcugcuguagcugccugaagggcuguuguagcuguggcagcugcugcaaguucgacgaggacgauucugagcccgugcugaagggcgugaaacugcacuacaccugaggacuagucccuguucccagagcccacuuuuuuuucuuuuuuugaaauaaaauagccugucuuucagaucuaaaaaaaaaaaaaaaaaaaaaaaaaaaaaaaaaaaaaaaaaaaaaaaaaaaaaaaaaaaaaaaaaaaaaaaaaaaaaaaaaaaaaaaaaaaaaaaaaaaa

SEQ ID NO: 25142 - RNA, 4167 nt, Artificial Sequence
  SARS-CoV-2/Wuhan/WIV05/2019__EPI_ISL_402128 spike protein mRNA gc mod (1-1273)(K986P_V987P_K986P_V987P_K417N_E484K_N501Y_D614G)
aggagagggcgcuuggcuugcaaggacccugagcugcggcauugaagcacacccaacccaacucgacugaagucagccucacugaaccggaucugagaaucuucucucucugggcuugccagggcucuccgaaccuagcuagcauccucuucaauuccaacuagaaagcuuaccauguucguguuucuggugcugcugccccugguguccagccagugugugaaccugaccaccagaacacagcugccuccagccuacaccaacagcuucaccagaggcguguacuaccccgacaagguguucagauccagcgugcugcacucuacccaggaccuguuccugccuuucuucagcaacgugaccugguuccacgccauccacguguccggcaccaauggcaccaagagauucgacaaccccgugcugcccuucaacgacgggguguacuuugccagcaccgagaaguccaacaucaucagaggcuggaucuucggcaccacacuggacagcaagacccagagccugcugaucgugaacaacgccaccaacguggucaucaaagugugcgaguuccaguucugcaacgaccccuuccugggcgucuacuaccacaagaacaacaagagcuggauggaaagcgaguuccggguguacagcagcgccaacaacugcaccuucgaguacgugucccagccuuuccugauggaccuggaaggcaagcagggcaacuucaagaaccugcgcgaguucguguucaagaacaucgacggcuacuucaaaaucuacagcaagcacaccccuaucaaccucgugcgggaucugccucagggcuucucugcucuggaaccccugguggaucugcccaucggcaucaacaucacccgguuucagacacugcuggcccugcacagaagcuaccugacaccuggcgauagcagcagcggauggacagcuggugccgccgcuuacuaugugggcuaccugcagccuagaaccuuccugcugaaguacaacgagaacggcaccaucaccgacgccguggauugugcucuggauccucugagcgagacaaagugcacccugaaguccuucaccguggaaaagggcaucuaccagaccagcaacuuccgggugcagcccaccgaauccaucgugcgguuccccaauaucaccaaucugugccccuucggcgagguguucaaugccaccagauucgccucuguguacgccuggaaccggaagcggaucagcaauugcguggccgacuacuccgugcuguacaacuccgccagcuucagcaccuucaagugcuacggcguguccccuaccaagcugaacgaccugugcuucacaaacguguacgccgacagcuucgugauccggggagaugaagugcggcagauugccccuggacagacaggcaacaucgccgacuacaacuacaagcugcccgacgacuucaccggcugugugauugccuggaacagcaacaaccuggacuccaaagucggcggcaacuacaauuaccuguaccggcuguuccggaaguccaaucugaagcccuucgagcgggacaucagcaccgaaaucuaucaggccggcagcaccccuugcaacggcgugaagggcuucaacugcuacuucccacugcaguccuacggcuuucagcccacauacggcgugggcuaucagcccuacagagugguggugcugagcuucgaacugcugcaugcuccugccacagugugcggcccuaagaaaagcaccaaucucgugaagaacaaaugcgugaacuucaacuucaacggccugaccggcaccggcgugcugacagagagcaacaagaaguuccugccauuccagcaguuuggccgggauaucgccgauaccacagacgccguuagagauccccagacacuggaaauccuggacaucaccccaugcagcuucggcggagugucugugaucaccccuggcaccaacaccagcaaucagguggcagugcuguaccagggcgugaacuguaccgaagugcccguggccauucacgccgaucagcugacaccuacauggcggguguacuccaccggcagcaauguguuucagaccagagccggcugucugaucggagccgagcacgugaacaauagcuacgagugcgacauccccaucggcgcuggcaucugugccagcuaccagacacagacaaacagccccagacgggcuagaagcguggccagccagagcaucauugccuacacaaugucucugggcgccgagaacagcguggccuacuccaacaacucuaucgcuauccccaccaacuucaccaucagcgugaccaccgagauccugccuguguccaugaccaagaccagcguggacugcaccauguacaucugcggcgauuccaccgagugcuccaaccugcugcugcaguacggcagcuucugcacccagcugaauagagcccugacagggaucgccguggaacaggacaagaacacccaagagguguucgcccaagugaagcaaaucuacaagaccccuccuaucaaggacuucggcggcuucaauuucagccagauucugcccgauccuagcaagcccagcaagcggagcuucaucgaggaccugcuguucaacaaagugacacuggccgacgccggcuucaucaagcaguauggcgauugucugggcgacauugccgccagggaucugauuugcgcccagaaguuuaacggacugacagugcugccuccucugcugaccgaugagaugaucgcccaguacacaucugcccugcuggccggcacaaucacaagcggcuggacauuuggagcuggcgccgcucugcagauccccuuugcuaugcagauggccuaccgguucaacggcaucggagugacccagaaugugcuguacgagaaccagaagcugaucgccaaccaguucaacagcgccaucggcaagauccaggacagccugagcagcacagcaagcgcccugggaaagcugcaggacguggucaaccagaaugcccaggcacugaacacccuggucaagcagcuguccuccaacuucggcgccaucagcucugugcugaacgauauccugagcagacuggacccuccugaggccgaggugcagaucgacagacugaucacaggcagacugcagagccuccagacauacgugacccagcagcugaucagagccgccgagauuagagccucugccaaucuggccgccaccaagaugucugagugugugcugggccagagcaagagaguggacuuuugcggcaagggcuaccaccugaugagcuucccucagucugccccucacggcgugguguuucugcacgugacauaugugcccgcucaagagaagaauuucaccaccgcuccagccaucugccacgacggcaaagcccacuuuccuagagaaggcguguucguguccaacggcacccauugguucgugacacagcggaacuucuacgagccccagaucaucaccaccgacaacaccuucgugucuggcaacugcgacguugugaucggcauugugaacaauaccguguacgacccucugcagcccgagcuggacagcuucaaagaggaacuggacaaguacuuuaagaaccacacaagccccgacguggaccugggcgauaucagcggaaucaaugccagcgucgugaacauccagaaagagaucgaccggcugaacgagguggccaagaaucugaacgagagccugaucgaccugcaagaacuggggaaguacgagcaguacaucaaguggcccugguacaucuggcugggcuuuaucgccggacugauugccaucgugauggucacaaucaugcuguguugcaugaccagcugcuguagcugccugaagggcuguuguagcuguggcagcugcugcaaguucgacgaggacgauucugagcccgugcugaagggcgugaaacugcacuacaccugaggacuagucccuguucccagagcccacuuuuuuuucuuuuuuugaaauaaaauagccugucuuucagaucuaaaaaaaaaaaaaaaaaaaaaaaaaaaaaaaaaaaaaaaaaaaaaaaaaaaaaaaaaaaaaaaaaaaaaaaaaaaaaaaaaaaaaaaaaaaaaaaaaaaa

SEQ ID NO: 25143 - RNA, 4158 nt, Artificial Sequence
  SARS-CoV-2/Wuhan/WIV05/2019__EPI_ISL_402128 spike protein mRNA gc mod (1-1273)(K986P_V987P_K986P_V987P_L18F_D80A_D215G_L242del_A243del_ L244del_R246I_K417N_E484K_N501Y_D614G_A701V)
aggagagggcgcuuggcuugcaaggacccugagcugcggcauugaagcacacccaacccaacucgacugaagucagccucacugaaccggaucugagaaucuucucucucugggcuugccagggcucuccgaaccuagcuagcauccucuucaauuccaacuagaaagcuuaccauguucguguuucuggugcugcugccccugguguccagccagugugugaacuucaccaccagaacacagcugccuccagccuacaccaacagcuucaccagaggcguguacuaccccgacaagguguucagauccagcgugcugcacucuacccaggaccuguuccugccuuucuucagcaacgugaccugguuccacgccauccacguguccggcaccaauggcaccaagagauucgccaaccccgugcugcccuucaacgacgggguguacuuugccagcaccgagaaguccaacaucaucagaggcuggaucuucggcaccacacuggacagcaagacccagagccugcugaucgugaacaacgccaccaacguggucaucaaagugugcgaguuccaguucugcaacgaccccuuccugggcgucuacuaccacaagaacaacaagagcuggauggaaagcgaguuccggguguacagcagcgccaacaacugcaccuucgaguacgugucccagccuuuccugauggaccuggaaggcaagcagggcaacuucaagaaccugcgcgaguucguguucaagaacaucgacggcuacuucaaaaucuacagcaagcacaccccuaucaaccucgugcggggccugccucagggcuucucugcucuggaaccccugguggaucugcccaucggcaucaacaucacccgguuucagacacugcacaucagcuaccugacaccuggcgauagcagcagcggauggacagcuggugccgccgcuuacuaugugggcuaccugcagccuagaaccuuccugcugaaguacaacgagaacggcaccaucaccgacgccguggauugugcucuggauccucugagcgagacaaagugcacccugaaguccuucaccguggaaaagggcaucuaccagaccagcaacuuccgggugcagcccaccgaauccaucgugcgguuccccaauaucaccaaucugugccccuucggcgagguguucaaugccaccagauucgccucuguguacgccuggaaccggaagcggaucagcaauugcguggccgacuacuccgugcuguacaacuccgccagcuucagcaccuucaagugcuacggcguguccccuaccaagcugaacgaccugugcuucacaaacguguacgccgacagcuucgugauccggggagaugaagugcggcagauugccccuggacagacaggcaacaucgccgacuacaacuacaagcugcccgacgacuucaccggcugugugauugccuggaacagcaacaaccuggacuccaaagucggcggcaacuacaauuaccuguaccggcuguuccggaaguccaaucugaagcccuucgagcgggacaucagcaccgaaaucuaucaggccggcagcaccccuugcaacggcgugaagggcuucaacugcuacuucccacugcaguccuacggcuuucagcccacauacggcgugggcuaucagcccuacagagugguggugcugagcuucgaacugcugcaugcuccugccacagugugcggcccuaagaaaagcaccaaucucgugaagaacaaaugcgugaacuucaacuucaacggccugaccggcaccggcgugcugacagagagcaacaagaaguuccugccauuccagcaguuuggccgggauaucgccgauaccacagacgccguuagagauccccagacacuggaaauccuggacaucaccccaugcagcuucggcggagugucugugaucaccccuggcaccaacaccagcaaucagguggcagugcuguaccagggcgugaacuguaccgaagugcccguggccauucacgccgaucagcugacaccuacauggcggguguacuccaccggcagcaauguguuucagaccagagccggcugucugaucggagccgagcacgugaacaauagcuacgagugcgacauccccaucggcgcuggcaucugugccagcuaccagacacagacaaacagccccagacgggcuagaagcguggccagccagagcaucauugccuacacaaugucucugggcguggagaacagcguggccuacuccaacaacucuaucgcuauccccaccaacuucaccaucagcgugaccaccgagauccugccuguguccaugaccaagaccagcguggacugcaccauguacaucugcggcgauuccaccgagugcuccaaccugcugcugcaguacggcagcuucugcacccagcugaauagagcccugacagggaucgccguggaacaggacaagaacacccaagagguguucgcccaagugaagcaaaucuacaagaccccuccuaucaaggacuucggcggcuucaauuucagccagauucugcccgauccuagcaagcccagcaagcggagcuucaucgaggaccugcuguucaacaaagugacacuggccgacgccggcuucaucaagcaguauggcgauugucugggcgacauugccgccagggaucugauuugcgcccagaaguuuaacggacugacagugcugccuccucugcugaccgaugagaugaucgcccaguacacaucugcccugcuggccggcacaaucacaagcggcuggacauuuggagcuggcgccgcucugcagauccccuuugcuaugcagauggccuaccgguucaacggcaucggagugacccagaaugugcuguacgagaaccagaagcugaucgccaaccaguucaacagcgccaucggcaagauccaggacagccugagcagcacagcaagcgcccugggaaagcugcaggacguggucaaccagaaugcccaggcacugaacacccuggucaagcagcuguccuccaacuucggcgccaucagcucugugcugaacgauauccugagcagacuggacccuccugaggccgaggugcagaucgacagacugaucacaggcagacugcagagccuccagacauacgugacccagcagcugaucagagccgccgagauuagagccucugccaaucuggccgccaccaagaugucugagugugugcugggccagagcaagagaguggacuuuugcggcaagggcuaccaccugaugagcuucccucagucugccccucacggcgugguguuucugcacgugacauaugugcccgcucaagagaagaauuucaccaccgcuccagccaucugccacgacggcaaagcccacuuuccuagagaaggcguguucguguccaacggcacccauugguucgugacacagcggaacuucuacgagccccagaucaucaccaccgacaacaccuucgugucuggcaacugcgacguugugaucggcauugugaacaauaccguguacgacccucugcagcccgagcuggacagcuucaaagaggaacuggacaaguacuuuaagaaccacacaagccccgacguggaccugggcgauaucagcggaaucaaugccagcgucgugaacauccagaaagagaucgaccggcugaacgagguggccaagaaucugaacgagagccugaucgaccugcaagaacuggggaaguacgagcaguacaucaaguggcccugguacaucuggcugggcuuuaucgccggacugauugccaucgugauggucacaaucaugcuguguugcaugaccagcugcuguagcugccugaagggcuguuguagcuguggcagcugcugcaaguucgacgaggacgauucugagcccgugcugaagggcgugaaacugcacuacaccugaggacuagucccuguucccagagcccacuuuuuuuucuuuuuuugaaauaaaauagccugucuuucagaucuaaaaaaaaaaaaaaaaaaaaaaaaaaaaaaaaaaaaaaaaaaaaaaaaaaaaaaaaaaaaaaaaaaaaaaaaaaaaaaaaaaaaaaaaaaaaaaaaaaaa

SEQ ID NO: 25144 - RNA, 4167 nt, Artificial Sequence
  SARS-CoV-2/Wuhan/WIV05/2019__EPI_ISL_402128 spike protein mRNA gc mod (1-1273)(K986P_V987P_K986P_V987P_E484K_D614G)
aggagagggcgcuuggcuugcaaggacccugagcugcggcauugaagcacacccaacccaacucgacugaagucagccucacugaaccggaucugagaaucuucucucucugggcuugccagggcucuccgaaccuagcuagcauccucuucaauuccaacuagaaagcuuaccauguucguguuucuggugcugcugccccugguguccagccagugugugaaccugaccaccagaacacagcugccuccagccuacaccaacagcuucaccagaggcguguacuaccccgacaagguguucagauccagcgugcugcacucuacccaggaccuguuccugccuuucuucagcaacgugaccugguuccacgccauccacguguccggcaccaauggcaccaagagauucgacaaccccgugcugcccuucaacgacgggguguacuuugccagcaccgagaaguccaacaucaucagaggcuggaucuucggcaccacacuggacagcaagacccagagccugcugaucgugaacaacgccaccaacguggucaucaaagugugcgaguuccaguucugcaacgaccccuuccugggcgucuacuaccacaagaacaacaagagcuggauggaaagcgaguuccggguguacagcagcgccaacaacugcaccuucgaguacgugucccagccuuuccugauggaccuggaaggcaagcagggcaacuucaagaaccugcgcgaguucguguucaagaacaucgacggcuacuucaaaaucuacagcaagcacaccccuaucaaccucgugcgggaucugccucagggcuucucugcucuggaaccccugguggaucugcccaucggcaucaacaucacccgguuucagacacugcuggcccugcacagaagcuaccugacaccuggcgauagcagcagcggauggacagcuggugccgccgcuuacuaugugggcuaccugcagccuagaaccuuccugcugaaguacaacgagaacggcaccaucaccgacgccguggauugugcucuggauccucugagcgagacaaagugcacccugaaguccuucaccguggaaaagggcaucuaccagaccagcaacuuccgggugcagcccaccgaauccaucgugcgguuccccaauaucaccaaucugugccccuucggcgagguguucaaugccaccagauucgccucuguguacgccuggaaccggaagcggaucagcaauugcguggccgacuacuccgugcuguacaacuccgccagcuucagcaccuucaagugcuacggcguguccccuaccaagcugaacgaccugugcuucacaaacguguacgccgacagcuucgugauccggggagaugaagugcggcagauugccccuggacagacaggcaagaucgccgacuacaacuacaagcugcccgacgacuucaccggcugugugauugccuggaacagcaacaaccuggacuccaaagucggcggcaacuacaauuaccuguaccggcuguuccggaaguccaaucugaagcccuucgagcgggacaucagcaccgaaaucuaucaggccggcagcaccccuugcaacggcgugaagggcuucaacugcuacuucccacugcaguccuacggcuuucagcccacaaauggcgugggcuaucagcccuacagagugguggugcugagcuucgaacugcugcaugcuccugccacagugugcggcccuaagaaaagcaccaaucucgugaagaacaaaugcgugaacuucaacuucaacggccugaccggcaccggcgugcugacagagagcaacaagaaguuccugccauuccagcaguuuggccgggauaucgccgauaccacagacgccguuagagauccccagacacuggaaauccuggacaucaccccaugcagcuucggcggagugucugugaucaccccuggcaccaacaccagcaaucagguggcagugcuguaccagggcgugaacuguaccgaagugcccguggccauucacgccgaucagcugacaccuacauggcggguguacuccaccggcagcaauguguuucagaccagagccggcugucugaucggagccgagcacgugaacaauagcuacgagugcgacauccccaucggcgcuggcaucugugccagcuaccagacacagacaaacagccccagacgggcuagaagcguggccagccagagcaucauugccuacacaaugucucugggcgccgagaacagcguggccuacuccaacaacucuaucgcuauccccaccaacuucaccaucagcgugaccaccgagauccugccuguguccaugaccaagaccagcguggacugcaccauguacaucugcggcgauuccaccgagugcuccaaccugcugcugcaguacggcagcuucugcacccagcugaauagagcccugacagggaucgccguggaacaggacaagaacacccaagagguguucgcccaagugaagcaaaucuacaagaccccuccuaucaaggacuucggcggcuucaauuucagccagauucugcccgauccuagcaagcccagcaagcggagcuucaucgaggaccugcuguucaacaaagugacacuggccgacgccggcuucaucaagcaguauggcgauugucugggcgacauugccgccagggaucugauuugcgcccagaaguuuaacggacugacagugcugccuccucugcugaccgaugagaugaucgcccaguacacaucugcccugcuggccggcacaaucacaagcggcuggacauuuggagcuggcgccgcucugcagauccccuuugcuaugcagauggccuaccgguucaacggcaucggagugacccagaaugugcuguacgagaaccagaagcugaucgccaaccaguucaacagcgccaucggcaagauccaggacagccugagcagcacagcaagcgcccugggaaagcugcaggacguggucaaccagaaugcccaggcacugaacacccuggucaagcagcuguccuccaacuucggcgccaucagcucugugcugaacgauauccugagcagacuggacccuccugaggccgaggugcagaucgacagacugaucacaggcagacugcagagccuccagacauacgugacccagcagcugaucagagccgccgagauuagagccucugccaaucuggccgccaccaagaugucugagugugugcugggccagagcaagagaguggacuuuugcggcaagggcuaccaccugaugagcuucccucagucugccccucacggcgugguguuucugcacgugacauaugugcccgcucaagagaagaauuucaccaccgcuccagccaucugccacgacggcaaagcccacuuuccuagagaaggcguguucguguccaacggcacccauugguucgugacacagcggaacuucuacgagccccagaucaucaccaccgacaacaccuucgugucuggcaacugcgacguugugaucggcauugugaacaauaccguguacgacccucugcagcccgagcuggacagcuucaaagaggaacuggacaaguacuuuaagaaccacacaagccccgacguggaccugggcgauaucagcggaaucaaugccagcgucgugaacauccagaaagagaucgaccggcugaacgagguggccaagaaucugaacgagagccugaucgaccugcaagaacuggggaaguacgagcaguacaucaaguggcccugguacaucuggcugggcuuuaucgccggacugauugccaucgugauggucacaaucaugcuguguugcaugaccagcugcuguagcugccugaagggcuguuguagcuguggcagcugcugcaaguucgacgaggacgauucugagcccgugcugaagggcgugaaacugcacuacaccugaggacuagucccuguucccagagcccacuuuuuuuucuuuuuuugaaauaaaauagccugucuuucagaucuaaaaaaaaaaaaaaaaaaaaaaaaaaaaaaaaaaaaaaaaaaaaaaaaaaaaaaaaaaaaaaaaaaaaaaaaaaaaaaaaaaaaaaaaaaaaaaaaaaaa

SEQ ID NO: 25145 - RNA, 4167 nt, Artificial Sequence
  SARS-CoV-2/Wuhan/WIV05/2019__EPI_ISL_402128 spike protein mRNA gc mod (1-1273)(K986P_V987P_K986P_V987P_L18F_T20N_P26S_D138Y_R190S_K417T _E484K_N501Y_D614G_H655Y_T1027I)
aggagagggcgcuuggcuugcaaggacccugagcugcggcauugaagcacacccaacccaacucgacugaagucagccucacugaaccggaucugagaaucuucucucucugggcuugccagggcucuccgaaccuagcuagcauccucuucaauuccaacuagaaagcuuaccauguucguguuucuggugcugcugccccugguguccagccagugugugaacuucaccaacagaacacagcugccuagcgccuacaccaacagcuucaccagaggcguguacuaccccgacaagguguucagauccagcgugcugcacucuacccaggaccuguuccugccuuucuucagcaacgugaccugguuccacgccauccacguguccggcaccaauggcaccaagagauucgacaaccccgugcugcccuucaacgacgggguguacuuugccagcaccgagaaguccaacaucaucagaggcuggaucuucggcaccacacuggacagcaagacccagagccugcugaucgugaacaacgccaccaacguggucaucaaagugugcgaguuccaguucugcaacuaccccuuccugggcgucuacuaccacaagaacaacaagagcuggauggaaagcgaguuccggguguacagcagcgccaacaacugcaccuucgaguacgugucccagccuuuccugauggaccuggaaggcaagcagggcaacuucaagaaccugagcgaguucguguucaagaacaucgacggcuacuucaaaaucuacagcaagcacaccccuaucaaccucgugcgggaucugccucagggcuucucugcucuggaaccccugguggaucugcccaucggcaucaacaucacccgguuucagacacugcuggcccugcacagaagcuaccugacaccuggcgauagcagcagcggauggacagcuggugccgccgcuuacuaugugggcuaccugcagccuagaaccuuccugcugaaguacaacgagaacggcaccaucaccgacgccguggauugugcucuggauccucugagcgagacaaagugcacccugaaguccuucaccguggaaaagggcaucuaccagaccagcaacuuccgggugcagcccaccgaauccaucgugcgguuccccaauaucaccaaucugugccccuucggcgagguguucaaugccaccagauucgccucuguguacgccuggaaccggaagcggaucagcaauugcguggccgacuacuccgugcuguacaacuccgccagcuucagcaccuucaagugcuacggcguguccccuaccaagcugaacgaccugugcuucacaaacguguacgccgacagcuucgugauccggggagaugaagugcggcagauugccccuggacagacaggcaccaucgccgacuacaacuacaagcugcccgacgacuucaccggcugugugauugccuggaacagcaacaaccuggacuccaaagucggcggcaacuacaauuaccuguaccggcuguuccggaaguccaaucugaagcccuucgagcgggacaucagcaccgaaaucuaucaggccggcagcaccccuugcaacggcgugaagggcuucaacugcuacuucccacugcaguccuacggcuuucagcccacauacggcgugggcuaucagcccuacagagugguggugcugagcuucgaacugcugcaugcuccugccacagugugcggcccuaagaaaagcaccaaucucgugaagaacaaaugcgugaacuucaacuucaacggccugaccggcaccggcgugcugacagagagcaacaagaaguuccugccauuccagcaguuuggccgggauaucgccgauaccacagacgccguuagagauccccagacacuggaaauccuggacaucaccccaugcagcuucggcggagugucugugaucaccccuggcaccaacaccagcaaucagguggcagugcuguaccagggcgugaacuguaccgaagugcccguggccauucacgccgaucagcugacaccuacauggcggguguacuccaccggcagcaauguguuucagaccagagccggcugucugaucggagccgaguacgugaacaauagcuacgagugcgacauccccaucggcgcuggcaucugugccagcuaccagacacagacaaacagccccagacgggcuagaagcguggccagccagagcaucauugccuacacaaugucucugggcgccgagaacagcguggccuacuccaacaacucuaucgcuauccccaccaacuucaccaucagcgugaccaccgagauccugccuguguccaugaccaagaccagcguggacugcaccauguacaucugcggcgauuccaccgagugcuccaaccugcugcugcaguacggcagcuucugcacccagcugaauagagcccugacagggaucgccguggaacaggacaagaacacccaagagguguucgcccaagugaagcaaaucuacaagaccccuccuaucaaggacuucggcggcuucaauuucagccagauucugcccgauccuagcaagcccagcaagcggagcuucaucgaggaccugcuguucaacaaagugacacuggccgacgccggcuucaucaagcaguauggcgauugucugggcgacauugccgccagggaucugauuugcgcccagaaguuuaacggacugacagugcugccuccucugcugaccgaugagaugaucgcccaguacacaucugcccugcuggccggcacaaucacaagcggcuggacauuuggagcuggcgccgcucugcagauccccuuugcuaugcagauggccuaccgguucaacggcaucggagugacccagaaugugcuguacgagaaccagaagcugaucgccaaccaguucaacagcgccaucggcaagauccaggacagccugagcagcacagcaagcgcccugggaaagcugcaggacguggucaaccagaaugcccaggcacugaacacccuggucaagcagcuguccuccaacuucggcgccaucagcucugugcugaacgauauccugagcagacuggacccuccugaggccgaggugcagaucgacagacugaucacaggcagacugcagagccuccagacauacgugacccagcagcugaucagagccgccgagauuagagccucugccaaucuggccgccaucaagaugucugagugugugcugggccagagcaagagaguggacuuuugcggcaagggcuaccaccugaugagcuucccucagucugccccucacggcgugguguuucugcacgugacauaugugcccgcucaagagaagaauuucaccaccgcuccagccaucugccacgacggcaaagcccacuuuccuagagaaggcguguucguguccaacggcacccauugguucgugacacagcggaacuucuacgagccccagaucaucaccaccgacaacaccuucgugucuggcaacugcgacguugugaucggcauugugaacaauaccguguacgacccucugcagcccgagcuggacagcuucaaagaggaacuggacaaguacuuuaagaaccacacaagccccgacguggaccugggcgauaucagcggaaucaaugccagcgucgugaacauccagaaagagaucgaccggcugaacgagguggccaagaaucugaacgagagccugaucgaccugcaagaacuggggaaguacgagcaguacaucaaguggcccugguacaucuggcugggcuuuaucgccggacugauugccaucgugauggucacaaucaugcuguguugcaugaccagcugcuguagcugccugaagggcuguuguagcuguggcagcugcugcaaguucgacgaggacgauucugagcccgugcugaagggcgugaaacugcacuacaccugaggacuagucccuguucccagagcccacuuuuuuuucuuuuuuugaaauaaaauagccugucuuucagaucuaaaaaaaaaaaaaaaaaaaaaaaaaaaaaaaaaaaaaaaaaaaaaaaaaaaaaaaaaaaaaaaaaaaaaaaaaaaaaaaaaaaaaaaaaaaaaaaaaaaa

SEQ ID NO: 25146 - RNA, 4167 nt, Artificial Sequence
  SARS-CoV-2/Wuhan/WIV05/2019__EPI_ISL_402128 spike protein mRNA gc mod (1-1273)(K986P_V987P_K986P_V987P_S13I_W152C_L452R_D614G)
aggagagggcgcuuggcuugcaaggacccugagcugcggcauugaagcacacccaacccaacucgacugaagucagccucacugaaccggaucugagaaucuucucucucugggcuugccagggcucuccgaaccuagcuagcauccucuucaauuccaacuagaaagcuuaccauguucguguuucuggugcugcugccccugguguccauccagugugugaaccugaccaccagaacacagcugccuccagccuacaccaacagcuucaccagaggcguguacuaccccgacaagguguucagauccagcgugcugcacucuacccaggaccuguuccugccuuucuucagcaacgugaccugguuccacgccauccacguguccggcaccaauggcaccaagagauucgacaaccccgugcugcccuucaacgacgggguguacuuugccagcaccgagaaguccaacaucaucagaggcuggaucuucggcaccacacuggacagcaagacccagagccugcugaucgugaacaacgccaccaacguggucaucaaagugugcgaguuccaguucugcaacgaccccuuccugggcgucuacuaccacaagaacaacaagagcugcauggaaagcgaguuccggguguacagcagcgccaacaacugcaccuucgaguacgugucccagccuuuccugauggaccuggaaggcaagcagggcaacuucaagaaccugcgcgaguucguguucaagaacaucgacggcuacuucaaaaucuacagcaagcacaccccuaucaaccucgugcgggaucugccucagggcuucucugcucuggaaccccugguggaucugcccaucggcaucaacaucacccgguuucagacacugcuggcccugcacagaagcuaccugacaccuggcgauagcagcagcggauggacagcuggugccgccgcuuacuaugugggcuaccugcagccuagaaccuuccugcugaaguacaacgagaacggcaccaucaccgacgccguggauugugcucuggauccucugagcgagacaaagugcacccugaaguccuucaccguggaaaagggcaucuaccagaccagcaacuuccgggugcagcccaccgaauccaucgugcgguuccccaauaucaccaaucugugccccuucggcgagguguucaaugccaccagauucgccucuguguacgccuggaaccggaagcggaucagcaauugcguggccgacuacuccgugcuguacaacuccgccagcuucagcaccuucaagugcuacggcguguccccuaccaagcugaacgaccugugcuucacaaacguguacgccgacagcuucgugauccggggagaugaagugcggcagauugccccuggacagacaggcaagaucgccgacuacaacuacaagcugcccgacgacuucaccggcugugugauugccuggaacagcaacaaccuggacuccaaagucggcggcaacuacaauuaccgcuaccggcuguuccggaaguccaaucugaagcccuucgagcgggacaucagcaccgaaaucuaucaggccggcagcaccccuugcaacggcguggaaggcuucaacugcuacuucccacugcaguccuacggcuuucagcccacaaauggcgugggcuaucagcccuacagagugguggugcugagcuucgaacugcugcaugcuccugccacagugugcggcccuaagaaaagcaccaaucucgugaagaacaaaugcgugaacuucaacuucaacggccugaccggcaccggcgugcugacagagagcaacaagaaguuccugccauuccagcaguuuggccgggauaucgccgauaccacagacgccguuagagauccccagacacuggaaauccuggacaucaccccaugcagcuucggcggagugucugugaucaccccuggcaccaacaccagcaaucagguggcagugcuguaccagggcgugaacuguaccgaagugcccguggccauucacgccgaucagcugacaccuacauggcggguguacuccaccggcagcaauguguuucagaccagagccggcugucugaucggagccgagcacgugaacaauagcuacgagugcgacauccccaucggcgcuggcaucugugccagcuaccagacacagacaaacagccccagacgggcuagaagcguggccagccagagcaucauugccuacacaaugucucugggcgccgagaacagcguggccuacuccaacaacucuaucgcuauccccaccaacuucaccaucagcgugaccaccgagauccugccuguguccaugaccaagaccagcguggacugcaccauguacaucugcggcgauuccaccgagugcuccaaccugcugcugcaguacggcagcuucugcacccagcugaauagagcccugacagggaucgccguggaacaggacaagaacacccaagagguguucgcccaagugaagcaaaucuacaagaccccuccuaucaaggacuucggcggcuucaauuucagccagauucugcccgauccuagcaagcccagcaagcggagcuucaucgaggaccugcuguucaacaaagugacacuggccgacgccggcuucaucaagcaguauggcgauugucugggcgacauugccgccagggaucugauuugcgcccagaaguuuaacggacugacagugcugccuccucugcugaccgaugagaugaucgcccaguacacaucugcccugcuggccggcacaaucacaagcggcuggacauuuggagcuggcgccgcucugcagauccccuuugcuaugcagauggccuaccgguucaacggcaucggagugacccagaaugugcuguacgagaaccagaagcugaucgccaaccaguucaacagcgccaucggcaagauccaggacagccugagcagcacagcaagcgcccugggaaagcugcaggacguggucaaccagaaugcccaggcacugaacacccuggucaagcagcuguccuccaacuucggcgccaucagcucugugcugaacgauauccugagcagacuggacccuccugaggccgaggugcagaucgacagacugaucacaggcagacugcagagccuccagacauacgugacccagcagcugaucagagccgccgagauuagagccucugccaaucuggccgccaccaagaugucugagugugugcugggccagagcaagagaguggacuuuugcggcaagggcuaccaccugaugagcuucccucagucugccccucacggcgugguguuucugcacgugacauaugugcccgcucaagagaagaauuucaccaccgcuccagccaucugccacgacggcaaagcccacuuuccuagagaaggcguguucguguccaacggcacccauugguucgugacacagcggaacuucuacgagccccagaucaucaccaccgacaacaccuucgugucuggcaacugcgacguugugaucggcauugugaacaauaccguguacgacccucugcagcccgagcuggacagcuucaaagaggaacuggacaaguacuuuaagaaccacacaagccccgacguggaccugggcgauaucagcggaaucaaugccagcgucgugaacauccagaaagagaucgaccggcugaacgagguggccaagaaucugaacgagagccugaucgaccugcaagaacuggggaaguacgagcaguacaucaaguggcccugguacaucuggcugggcuuuaucgccggacugauugccaucgugauggucacaaucaugcuguguugcaugaccagcugcuguagcugccugaagggcuguuguagcuguggcagcugcugcaaguucgacgaggacgauucugagcccgugcugaagggcgugaaacugcacuacaccugaggacuagucccuguucccagagcccacuuuuuuuucuuuuuuugaaauaaaauagccugucuuucagaucuaaaaaaaaaaaaaaaaaaaaaaaaaaaaaaaaaaaaaaaaaaaaaaaaaaaaaaaaaaaaaaaaaaaaaaaaaaaaaaaaaaaaaaaaaaaaaaaaaaaa

SEQ ID NO: 25147 - RNA, 4167 nt, Artificial Sequence
  SARS-CoV-2/Wuhan/WIV05/2019__EPI_ISL_402128 spike protein mRNA gc mod (1-1273)(K986P_V987P)
aggagagggcgcuuggcuugcaaggacccugagcugcggcauugaagcacacccaacccaacucgacugaagucagccucacugaaccggaucugagaaucuucucucucugggcuugccagggcucuccgaaccuagcuagcauccucuucaauuccaacuagaaagcuuaccauguucguguuccuggugcugcugccucugguguccagccagugugugaaccugaccaccagaacacagcugccuccagccuacaccaacagcuuuaccagaggcguguacuaccccgacaagguguucagauccagcgugcugcacucuacccaggaccuguuccugccuuucuucagcaacgugaccugguuccacgccauccacguguccggcaccaauggcaccaagagauucgacaaccccgugcugcccuucaacgacgggguguacuuugccagcaccgagaaguccaacaucaucagaggcuggaucuucggcaccacacuggacagcaagacccagagccugcugaucgugaacaacgccaccaacguggucaucaaagugugcgaguuccaguucugcaacgaccccuuccugggcgucuacuaccacaagaacaacaagagcuggauggaaagcgaguuccggguguacagcagcgccaacaacugcaccuucgaguacgugucccagccuuuccugauggaccuggaaggcaagcagggcaacuucaagaaccugcgcgaguucguguuuaagaacaucgacggcuacuucaagaucuacagcaagcacaccccuaucaaccucgugcgggaucugccucagggcuucucugcucuggaaccccugguggaucugcccaucggcaucaacaucacccgguuucagacacugcuggcccugcacagaagcuaccugacaccuggcgauagcagcagcggauggacagcuggugccgccgcuuacuaugugggcuaccugcagccuagaaccuuccugcugaaguacaacgagaacggcaccaucaccgacgccguggauugugcucuggauccucugagcgagacaaagugcacccugaaguccuucaccguggaaaagggcaucuaccagaccagcaacuuccgggugcagcccaccgaauccaucgugcgguuccccaauaucaccaaucugugccccuucggcgagguguucaaugccaccagauucgccucuguguacgccuggaaccggaagcggaucagcaauugcguggccgacuacuccgugcuguacaacuccgccagcuucagcaccuucaagugcuacggcguguccccuaccaagcugaacgaccugugcuucacaaacguguacgccgacagcuucgugauccggggagaugaagugcggcagauugccccuggacagacaggcaagaucgccgacuacaacuacaagcugcccgacgacuucaccggcugugugauugccuggaacagcaacaaccuggacuccaaagucggcggcaacuacaauuaccuguaccggcuguuccggaaguccaaucugaagcccuucgagcgggacaucuccaccgagaucuaucaggccggcagcaccccuuguaacggcguggaaggcuucaacugcuacuucccacugcaguccuacggcuuucagcccacaaauggcgugggcuaucagcccuacagagugguggugcugagcuucgaacugcugcaugccccugccacagugugcggcccuaagaaaagcaccaaucucgugaagaacaaaugcgugaacuucaacuucaacggccugaccggcaccggcgugcugacagagagcaacaagaaguuccugccauuccagcaguuuggccgggauaucgccgauaccacagacgccguuagagauccccagacacuggaaauccuggacaucaccccuugcagcuucggcggagugucugugaucaccccuggcaccaacaccagcaaucagguggcagugcuguaccaggacgugaacuguaccgaagugcccguggccauucacgccgaucagcugacaccuacauggcggguguacuccaccggcagcaauguguuucagaccagagccggcugucugaucggagccgagcacgugaacaauagcuacgagugcgacauccccaucggcgcuggaaucugcgccagcuaccagacacagacaaacagcccucggagagccagaagcguggccagccagagcaucauugccuacacaaugucucugggcgccgagaacagcguggccuacuccaacaacucuaucgcuauccccaccaacuucaccaucagcgugaccacagagauccugccuguguccaugaccaagaccagcguggacugcaccauguacaucugcggcgauuccaccgagugcuccaaccugcugcugcaguacggcagcuucugcacccagcugaauagagcccugacagggaucgccguggaacaggacaagaacacccaagagguguucgcccaagugaagcagaucuacaagaccccuccuaucaaggacuucggcggcuucaauuucagccagauucugcccgauccuagcaagcccagcaagcggagcuucaucgaggaccugcuguucaacaaagugacacuggccgacgccggcuucaucaagcaguauggcgauugucugggcgacauugccgccagggaucugauuugcgcccagaaguuuaacggacugacagugcugccuccucugcugaccgaugagaugaucgcccaguacacaucugcccugcuggccggcacaaucacaagcggcuggacauuuggagcaggcgccgcucugcagauccccuuugcuaugcagauggccuaccgguucaacggcaucggagugacccagaaugugcuguacgagaaccagaagcugaucgccaaccaguucaacagcgccaucggcaagauccaggacagccugagcagcacagcaagcgcccugggaaagcugcaggacguggucaaccagaaugcccaggcacugaacacccuggucaagcagcuguccuccaacuucggcgccaucagcucugugcugaacgauauccugagcagacuggacccuccugaggccgaggugcagaucgacagacugaucacaggcagacugcagagccuccagacauacgugacccagcagcugaucagagccgccgagauuagagccucugccaaucuggccgccaccaagaugucugagugugugcugggccagagcaagagaguggacuuuugcggcaagggcuaccaccugaugagcuucccucagucugccccucacggcgugguguuucugcacgugacauaugugcccgcucaagagaagaauuucaccaccgcuccagccaucugccacgacggcaaagcccacuuuccuagagaaggcguguucguguccaacggcacccauugguucgugacacagcggaacuucuacgagccccagaucaucaccaccgacaacaccuucgugucuggcaacugcgacgucgugaucggcauugugaacaauaccguguacgacccucugcagcccgagcuggacagcuucaaagaggaacuggacaaguacuuuaagaaccacacaagccccgacguggaccugggcgauaucagcggaaucaaugccagcgucgugaacauccagaaagagaucgaccggcugaacgagguggccaagaaucugaacgagagccugaucgaccugcaagaacuggggaaguacgagcaguacaucaaguggcccugguacaucuggcugggcuuuaucgccggacugauugccaucgugauggucacaaucaugcuguguugcaugaccagcugcuguagcugccugaagggcuguuguagcuguggcagcugcugcaaguucgacgaggacgauucugagcccgugcugaagggcgugaaacugcacuacacaugaggacuagucccuguucccagagcccacuuuuuuuucuuuuuuugaaauaaaauagccugucuuucagaucuaaaaaaaaaaaaaaaaaaaaaaaaaaaaaaaaaaaaaaaaaaaaaaaaaaaaaaaaaaaaaaaaaaaaaaaaaaaaaaaaaaaaaaaaaaaaaaaaaaaa

SEQ ID NO: 25148 - RNA, 4167 nt, Artificial Sequence
  SARS-CoV-2/Wuhan/WIV05/2019__EPI_ISL_402128 spike protein mRNA gc mod (1-1273)(K986P_V987P_ D614G)
aggagagggcgcuuggcuugcaaggacccugagcugcggcauugaagcacacccaacccaacucgacugaagucagccucacugaaccggaucugagaaucuucucucucugggcuugccagggcucuccgaaccuagcuagcauccucuucaauuccaacuagaaagcuuaccauguucguguuccuggugcugcugccucugguguccagccagugugugaaccugaccaccagaacacagcugccuccagccuacaccaacagcuuuaccagaggcguguacuaccccgacaagguguucagauccagcgugcugcacucuacccaggaccuguuccugccuuucuucagcaacgugaccugguuccacgccauccacguguccggcaccaauggcaccaagagauucgacaaccccgugcugcccuucaacgacgggguguacuuugccagcaccgagaaguccaacaucaucagaggcuggaucuucggcaccacacuggacagcaagacccagagccugcugaucgugaacaacgccaccaacguggucaucaaagugugcgaguuccaguucugcaacgaccccuuccugggcgucuacuaccacaagaacaacaagagcuggauggaaagcgaguuccggguguacagcagcgccaacaacugcaccuucgaguacgugucccagccuuuccugauggaccuggaaggcaagcagggcaacuucaagaaccugcgcgaguucguguuuaagaacaucgacggcuacuucaagaucuacagcaagcacaccccuaucaaccucgugcgggaucugccucagggcuucucugcucuggaaccccugguggaucugcccaucggcaucaacaucacccgguuucagacacugcuggcccugcacagaagcuaccugacaccuggcgauagcagcagcggauggacagcuggugccgccgcuuacuaugugggcuaccugcagccuagaaccuuccugcugaaguacaacgagaacggcaccaucaccgacgccguggauugugcucuggauccucugagcgagacaaagugcacccugaaguccuucaccguggaaaagggcaucuaccagaccagcaacuuccgggugcagcccaccgaauccaucgugcgguuccccaauaucaccaaucugugccccuucggcgagguguucaaugccaccagauucgccucuguguacgccuggaaccggaagcggaucagcaauugcguggccgacuacuccgugcuguacaacuccgccagcuucagcaccuucaagugcuacggcguguccccuaccaagcugaacgaccugugcuucacaaacguguacgccgacagcuucgugauccggggagaugaagugcggcagauugccccuggacagacaggcaagaucgccgacuacaacuacaagcugcccgacgacuucaccggcugugugauugccuggaacagcaacaaccuggacuccaaagucggcggcaacuacaauuaccuguaccggcuguuccggaaguccaaucugaagcccuucgagcgggacaucuccaccgagaucuaucaggccggcagcaccccuuguaacggcguggaaggcuucaacugcuacuucccacugcaguccuacggcuuucagcccacaaauggcgugggcuaucagcccuacagagugguggugcugagcuucgaacugcugcaugccccugccacagugugcggcccuaagaaaagcaccaaucucgugaagaacaaaugcgugaacuucaacuucaacggccugaccggcaccggcgugcugacagagagcaacaagaaguuccugccauuccagcaguuuggccgggauaucgccgauaccacagacgccguuagagauccccagacacuggaaauccuggacaucaccccuugcagcuucggcggagugucugugaucaccccuggcaccaacaccagcaaucagguggcagugcuguaccagggcgugaacuguaccgaagugcccguggccauucacgccgaucagcugacaccuacauggcggguguacuccaccggcagcaauguguuucagaccagagccggcugucugaucggagccgagcacgugaacaauagcuacgagugcgacauccccaucggcgcuggaaucugcgccagcuaccagacacagacaaacagcccucggagagccagaagcguggccagccagagcaucauugccuacacaaugucucugggcgccgagaacagcguggccuacuccaacaacucuaucgcuauccccaccaacuucaccaucagcgugaccacagagauccugccuguguccaugaccaagaccagcguggacugcaccauguacaucugcggcgauuccaccgagugcuccaaccugcugcugcaguacggcagcuucugcacccagcugaauagagcccugacagggaucgccguggaacaggacaagaacacccaagagguguucgcccaagugaagcagaucuacaagaccccuccuaucaaggacuucggcggcuucaauuucagccagauucugcccgauccuagcaagcccagcaagcggagcuucaucgaggaccugcuguucaacaaagugacacuggccgacgccggcuucaucaagcaguauggcgauugucugggcgacauugccgccagggaucugauuugcgcccagaaguuuaacggacugacagugcugccuccucugcugaccgaugagaugaucgcccaguacacaucugcccugcuggccggcacaaucacaagcggcuggacauuuggagcaggcgccgcucugcagauccccuuugcuaugcagauggccuaccgguucaacggcaucggagugacccagaaugugcuguacgagaaccagaagcugaucgccaaccaguucaacagcgccaucggcaagauccaggacagccugagcagcacagcaagcgcccugggaaagcugcaggacguggucaaccagaaugcccaggcacugaacacccuggucaagcagcuguccuccaacuucggcgccaucagcucugugcugaacgauauccugagcagacuggacccuccugaggccgaggugcagaucgacagacugaucacaggcagacugcagagccuccagacauacgugacccagcagcugaucagagccgccgagauuagagccucugccaaucuggccgccaccaagaugucugagugugugcugggccagagcaagagaguggacuuuugcggcaagggcuaccaccugaugagcuucccucagucugccccucacggcgugguguuucugcacgugacauaugugcccgcucaagagaagaauuucaccaccgcuccagccaucugccacgacggcaaagcccacuuuccuagagaaggcguguucguguccaacggcacccauugguucgugacacagcggaacuucuacgagccccagaucaucaccaccgacaacaccuucgugucuggcaacugcgacgucgugaucggcauugugaacaauaccguguacgacccucugcagcccgagcuggacagcuucaaagaggaacuggacaaguacuuuaagaaccacacaagccccgacguggaccugggcgauaucagcggaaucaaugccagcgucgugaacauccagaaagagaucgaccggcugaacgagguggccaagaaucugaacgagagccugaucgaccugcaagaacuggggaaguacgagcaguacaucaaguggcccugguacaucuggcugggcuuuaucgccggacugauugccaucgugauggucacaaucaugcuguguugcaugaccagcugcuguagcugccugaagggcuguuguagcuguggcagcugcugcaaguucgacgaggacgauucugagcccgugcugaagggcgugaaacugcacuacacaugaggacuagucccuguucccagagcccacuuuuuuuucuuuuuuugaaauaaaauagccugucuuucagaucuaaaaaaaaaaaaaaaaaaaaaaaaaaaaaaaaaaaaaaaaaaaaaaaaaaaaaaaaaaaaaaaaaaaaaaaaaaaaaaaaaaaaaaaaaaaaaaaaaaaa

SEQ ID NO: 25149 - RNA, 4167 nt, Artificial Sequence
  SARS-CoV-2/Wuhan/WIV05/2019__EPI_ISL_402128 spike protein mRNA gc mod (1-1273)(K986P_V987P_A222V_D614G)
aggagagggcgcuuggcuugcaaggacccugagcugcggcauugaagcacacccaacccaacucgacugaagucagccucacugaaccggaucugagaaucuucucucucugggcuugccagggcucuccgaaccuagcuagcauccucuucaauuccaacuagaaagcuuaccauguucguguuccuggugcugcugccucugguguccagccagugugugaaccugaccaccagaacacagcugccuccagccuacaccaacagcuuuaccagaggcguguacuaccccgacaagguguucagauccagcgugcugcacucuacccaggaccuguuccugccuuucuucagcaacgugaccugguuccacgccauccacguguccggcaccaauggcaccaagagauucgacaaccccgugcugcccuucaacgacgggguguacuuugccagcaccgagaaguccaacaucaucagaggcuggaucuucggcaccacacuggacagcaagacccagagccugcugaucgugaacaacgccaccaacguggucaucaaagugugcgaguuccaguucugcaacgaccccuuccugggcgucuacuaccacaagaacaacaagagcuggauggaaagcgaguuccggguguacagcagcgccaacaacugcaccuucgaguacgugucccagccuuuccugauggaccuggaaggcaagcagggcaacuucaagaaccugcgcgaguucguguuuaagaacaucgacggcuacuucaagaucuacagcaagcacaccccuaucaaccucgugcgggaucugccucagggcuucucugugcuggaaccccugguggaucugcccaucggcaucaacaucacccgguuucagacacugcuggcccugcacagaagcuaccugacaccuggcgauagcagcagcggauggacagcuggugccgccgcuuacuaugugggcuaccugcagccuagaaccuuccugcugaaguacaacgagaacggcaccaucaccgacgccguggauugugcucuggauccucugagcgagacaaagugcacccugaaguccuucaccguggaaaagggcaucuaccagaccagcaacuuccgggugcagcccaccgaauccaucgugcgguuccccaauaucaccaaucugugccccuucggcgagguguucaaugccaccagauucgccucuguguacgccuggaaccggaagcggaucagcaauugcguggccgacuacuccgugcuguacaacuccgccagcuucagcaccuucaagugcuacggcguguccccuaccaagcugaacgaccugugcuucacaaacguguacgccgacagcuucgugauccggggagaugaagugcggcagauugccccuggacagacaggcaagaucgccgacuacaacuacaagcugcccgacgacuucaccggcugugugauugccuggaacagcaacaaccuggacuccaaagucggcggcaacuacaauuaccuguaccggcuguuccggaaguccaaucugaagcccuucgagcgggacaucuccaccgagaucuaucaggccggcagcaccccuuguaacggcguggaaggcuucaacugcuacuucccacugcaguccuacggcuuucagcccacaaauggcgugggcuaucagcccuacagagugguggugcugagcuucgaacugcugcaugccccugccacagugugcggcccuaagaaaagcaccaaucucgugaagaacaaaugcgugaacuucaacuucaacggccugaccggcaccggcgugcugacagagagcaacaagaaguuccugccauuccagcaguuuggccgggauaucgccgauaccacagacgccguuagagauccccagacacuggaaauccuggacaucaccccuugcagcuucggcggagugucugugaucaccccuggcaccaacaccagcaaucagguggcagugcuguaccagggcgugaacuguaccgaagugcccguggccauucacgccgaucagcugacaccuacauggcggguguacuccaccggcagcaauguguuucagaccagagccggcugucugaucggagccgagcacgugaacaauagcuacgagugcgacauccccaucggcgcuggaaucugcgccagcuaccagacacagacaaacagcccucggagagccagaagcguggccagccagagcaucauugccuacacaaugucucugggcgccgagaacagcguggccuacuccaacaacucuaucgcuauccccaccaacuucaccaucagcgugaccacagagauccugccuguguccaugaccaagaccagcguggacugcaccauguacaucugcggcgauuccaccgagugcuccaaccugcugcugcaguacggcagcuucugcacccagcugaauagagcccugacagggaucgccguggaacaggacaagaacacccaagagguguucgcccaagugaagcagaucuacaagaccccuccuaucaaggacuucggcggcuucaauuucagccagauucugcccgauccuagcaagcccagcaagcggagcuucaucgaggaccugcuguucaacaaagugacacuggccgacgccggcuucaucaagcaguauggcgauugucugggcgacauugccgccagggaucugauuugcgcccagaaguuuaacggacugacagugcugccuccucugcugaccgaugagaugaucgcccaguacacaucugcccugcuggccggcacaaucacaagcggcuggacauuuggagcaggcgccgcucugcagauccccuuugcuaugcagauggccuaccgguucaacggcaucggagugacccagaaugugcuguacgagaaccagaagcugaucgccaaccaguucaacagcgccaucggcaagauccaggacagccugagcagcacagcaagcgcccugggaaagcugcaggacguggucaaccagaaugcccaggcacugaacacccuggucaagcagcuguccuccaacuucggcgccaucagcucugugcugaacgauauccugagcagacuggacccuccugaggccgaggugcagaucgacagacugaucacaggcagacugcagagccuccagacauacgugacccagcagcugaucagagccgccgagauuagagccucugccaaucuggccgccaccaagaugucugagugugugcugggccagagcaagagaguggacuuuugcggcaagggcuaccaccugaugagcuucccucagucugccccucacggcgugguguuucugcacgugacauaugugcccgcucaagagaagaauuucaccaccgcuccagccaucugccacgacggcaaagcccacuuuccuagagaaggcguguucguguccaacggcacccauugguucgugacacagcggaacuucuacgagccccagaucaucaccaccgacaacaccuucgugucuggcaacugcgacgucgugaucggcauugugaacaauaccguguacgacccucugcagcccgagcuggacagcuucaaagaggaacuggacaaguacuuuaagaaccacacaagccccgacguggaccugggcgauaucagcggaaucaaugccagcgucgugaacauccagaaagagaucgaccggcugaacgagguggccaagaaucugaacgagagccugaucgaccugcaagaacuggggaaguacgagcaguacaucaaguggcccugguacaucuggcugggcuuuaucgccggacugauugccaucgugauggucacaaucaugcuguguugcaugaccagcugcuguagcugccugaagggcuguuguagcuguggcagcugcugcaaguucgacgaggacgauucugagcccgugcugaagggcgugaaacugcacuacacaugaggacuagucccuguucccagagcccacuuuuuuuucuuuuuuugaaauaaaauagccugucuuucagaucuaaaaaaaaaaaaaaaaaaaaaaaaaaaaaaaaaaaaaaaaaaaaaaaaaaaaaaaaaaaaaaaaaaaaaaaaaaaaaaaaaaaaaaaaaaaaaaaaaaaa

SEQ ID NO: 25150 - RNA, 4167 nt, Artificial Sequence
  SARS-CoV-2/Wuhan/WIV05/2019__EPI_ISL_402128 spike protein mRNA gc mod (1-1273)(K986P_V987P_N439K_D614G)
aggagagggcgcuuggcuugcaaggacccugagcugcggcauugaagcacacccaacccaacucgacugaagucagccucacugaaccggaucugagaaucuucucucucugggcuugccagggcucuccgaaccuagcuagcauccucuucaauuccaacuagaaagcuuaccauguucguguuccuggugcugcugccucugguguccagccagugugugaaccugaccaccagaacacagcugccuccagccuacaccaacagcuuuaccagaggcguguacuaccccgacaagguguucagauccagcgugcugcacucuacccaggaccuguuccugccuuucuucagcaacgugaccugguuccacgccauccacguguccggcaccaauggcaccaagagauucgacaaccccgugcugcccuucaacgacgggguguacuuugccagcaccgagaaguccaacaucaucagaggcuggaucuucggcaccacacuggacagcaagacccagagccugcugaucgugaacaacgccaccaacguggucaucaaagugugcgaguuccaguucugcaacgaccccuuccugggcgucuacuaccacaagaacaacaagagcuggauggaaagcgaguuccggguguacagcagcgccaacaacugcaccuucgaguacgugucccagccuuuccugauggaccuggaaggcaagcagggcaacuucaagaaccugcgcgaguucguguuuaagaacaucgacggcuacuucaagaucuacagcaagcacaccccuaucaaccucgugcgggaucugccucagggcuucucugcucuggaaccccugguggaucugcccaucggcaucaacaucacccgguuucagacacugcuggcccugcacagaagcuaccugacaccuggcgauagcagcagcggauggacagcuggugccgccgcuuacuaugugggcuaccugcagccuagaaccuuccugcugaaguacaacgagaacggcaccaucaccgacgccguggauugugcucuggauccucugagcgagacaaagugcacccugaaguccuucaccguggaaaagggcaucuaccagaccagcaacuuccgggugcagcccaccgaauccaucgugcgguuccccaauaucaccaaucugugccccuucggcgagguguucaaugccaccagauucgccucuguguacgccuggaaccggaagcggaucagcaauugcguggccgacuacuccgugcuguacaacuccgccagcuucagcaccuucaagugcuacggcguguccccuaccaagcugaacgaccugugcuucacaaacguguacgccgacagcuucgugauccggggagaugaagugcggcagauugccccuggacagacaggcaagaucgccgacuacaacuacaagcugcccgacgacuucaccggcugugugauugccuggaacagcaagaaccuggacuccaaagucggcggcaacuacaauuaccuguaccggcuguuccggaaguccaaucugaagcccuucgagcgggacaucuccaccgagaucuaucaggccggcagcaccccuuguaacggcguggaaggcuucaacugcuacuucccacugcaguccuacggcuuucagcccacaaauggcgugggcuaucagcccuacagagugguggugcugagcuucgaacugcugcaugccccugccacagugugcggcccuaagaaaagcaccaaucucgugaagaacaaaugcgugaacuucaacuucaacggccugaccggcaccggcgugcugacagagagcaacaagaaguuccugccauuccagcaguuuggccgggauaucgccgauaccacagacgccguuagagauccccagacacuggaaauccuggacaucaccccuugcagcuucggcggagugucugugaucaccccuggcaccaacaccagcaaucagguggcagugcuguaccagggcgugaacuguaccgaagugcccguggccauucacgccgaucagcugacaccuacauggcggguguacuccaccggcagcaauguguuucagaccagagccggcugucugaucggagccgagcacgugaacaauagcuacgagugcgacauccccaucggcgcuggaaucugcgccagcuaccagacacagacaaacagcccucggagagccagaagcguggccagccagagcaucauugccuacacaaugucucugggcgccgagaacagcguggccuacuccaacaacucuaucgcuauccccaccaacuucaccaucagcgugaccacagagauccugccuguguccaugaccaagaccagcguggacugcaccauguacaucugcggcgauuccaccgagugcuccaaccugcugcugcaguacggcagcuucugcacccagcugaauagagcccugacagggaucgccguggaacaggacaagaacacccaagagguguucgcccaagugaagcagaucuacaagaccccuccuaucaaggacuucggcggcuucaauuucagccagauucugcccgauccuagcaagcccagcaagcggagcuucaucgaggaccugcuguucaacaaagugacacuggccgacgccggcuucaucaagcaguauggcgauugucugggcgacauugccgccagggaucugauuugcgcccagaaguuuaacggacugacagugcugccuccucugcugaccgaugagaugaucgcccaguacacaucugcccugcuggccggcacaaucacaagcggcuggacauuuggagcaggcgccgcucugcagauccccuuugcuaugcagauggccuaccgguucaacggcaucggagugacccagaaugugcuguacgagaaccagaagcugaucgccaaccaguucaacagcgccaucggcaagauccaggacagccugagcagcacagcaagcgcccugggaaagcugcaggacguggucaaccagaaugcccaggcacugaacacccuggucaagcagcuguccuccaacuucggcgccaucagcucugugcugaacgauauccugagcagacuggacccuccugaggccgaggugcagaucgacagacugaucacaggcagacugcagagccuccagacauacgugacccagcagcugaucagagccgccgagauuagagccucugccaaucuggccgccaccaagaugucugagugugugcugggccagagcaagagaguggacuuuugcggcaagggcuaccaccugaugagcuucccucagucugccccucacggcgugguguuucugcacgugacauaugugcccgcucaagagaagaauuucaccaccgcuccagccaucugccacgacggcaaagcccacuuuccuagagaaggcguguucguguccaacggcacccauugguucgugacacagcggaacuucuacgagccccagaucaucaccaccgacaacaccuucgugucuggcaacugcgacgucgugaucggcauugugaacaauaccguguacgacccucugcagcccgagcuggacagcuucaaagaggaacuggacaaguacuuuaagaaccacacaagccccgacguggaccugggcgauaucagcggaaucaaugccagcgucgugaacauccagaaagagaucgaccggcugaacgagguggccaagaaucugaacgagagccugaucgaccugcaagaacuggggaaguacgagcaguacaucaaguggcccugguacaucuggcugggcuuuaucgccggacugauugccaucgugauggucacaaucaugcuguguugcaugaccagcugcuguagcugccugaagggcuguuguagcuguggcagcugcugcaaguucgacgaggacgauucugagcccgugcugaagggcgugaaacugcacuacacaugaggacuagucccuguucccagagcccacuuuuuuuucuuuuuuugaaauaaaauagccugucuuucagaucuaaaaaaaaaaaaaaaaaaaaaaaaaaaaaaaaaaaaaaaaaaaaaaaaaaaaaaaaaaaaaaaaaaaaaaaaaaaaaaaaaaaaaaaaaaaaaaaaaaaa

SEQ ID NO: 25151 - RNA, 4167 nt, Artificial Sequence
  SARS-CoV-2/Wuhan/WIV05/2019__EPI_ISL_402128 spike protein mRNA gc mod (1-1273)(K986P_V987P_S477N_D614G)
aggagagggcgcuuggcuugcaaggacccugagcugcggcauugaagcacacccaacccaacucgacugaagucagccucacugaaccggaucugagaaucuucucucucugggcuugccagggcucuccgaaccuagcuagcauccucuucaauuccaacuagaaagcuuaccauguucguguuccuggugcugcugccucugguguccagccagugugugaaccugaccaccagaacacagcugccuccagccuacaccaacagcuuuaccagaggcguguacuaccccgacaagguguucagauccagcgugcugcacucuacccaggaccuguuccugccuuucuucagcaacgugaccugguuccacgccauccacguguccggcaccaauggcaccaagagauucgacaaccccgugcugcccuucaacgacgggguguacuuugccagcaccgagaaguccaacaucaucagaggcuggaucuucggcaccacacuggacagcaagacccagagccugcugaucgugaacaacgccaccaacguggucaucaaagugugcgaguuccaguucugcaacgaccccuuccugggcgucuacuaccacaagaacaacaagagcuggauggaaagcgaguuccggguguacagcagcgccaacaacugcaccuucgaguacgugucccagccuuuccugauggaccuggaaggcaagcagggcaacuucaagaaccugcgcgaguucguguuuaagaacaucgacggcuacuucaagaucuacagcaagcacaccccuaucaaccucgugcgggaucugccucagggcuucucugcucuggaaccccugguggaucugcccaucggcaucaacaucacccgguuucagacacugcuggcccugcacagaagcuaccugacaccuggcgauagcagcagcggauggacagcuggugccgccgcuuacuaugugggcuaccugcagccuagaaccuuccugcugaaguacaacgagaacggcaccaucaccgacgccguggauugugcucuggauccucugagcgagacaaagugcacccugaaguccuucaccguggaaaagggcaucuaccagaccagcaacuuccgggugcagcccaccgaauccaucgugcgguuccccaauaucaccaaucugugccccuucggcgagguguucaaugccaccagauucgccucuguguacgccuggaaccggaagcggaucagcaauugcguggccgacuacuccgugcuguacaacuccgccagcuucagcaccuucaagugcuacggcguguccccuaccaagcugaacgaccugugcuucacaaacguguacgccgacagcuucgugauccggggagaugaagugcggcagauugccccuggacagacaggcaagaucgccgacuacaacuacaagcugcccgacgacuucaccggcugugugauugccuggaacagcaacaaccuggacuccaaagucggcggcaacuacaauuaccuguaccggcuguuccggaaguccaaucugaagcccuucgagcgggacaucuccaccgagaucuaucaggccggcaacaccccuuguaacggcguggaaggcuucaacugcuacuucccacugcaguccuacggcuuucagcccacaaauggcgugggcuaucagcccuacagagugguggugcugagcuucgaacugcugcaugccccugccacagugugcggcccuaagaaaagcaccaaucucgugaagaacaaaugcgugaacuucaacuucaacggccugaccggcaccggcgugcugacagagagcaacaagaaguuccugccauuccagcaguuuggccgggauaucgccgauaccacagacgccguuagagauccccagacacuggaaauccuggacaucaccccuugcagcuucggcggagugucugugaucaccccuggcaccaacaccagcaaucagguggcagugcuguaccagggcgugaacuguaccgaagugcccguggccauucacgccgaucagcugacaccuacauggcggguguacuccaccggcagcaauguguuucagaccagagccggcugucugaucggagccgagcacgugaacaauagcuacgagugcgacauccccaucggcgcuggaaucugcgccagcuaccagacacagacaaacagcccucggagagccagaagcguggccagccagagcaucauugccuacacaaugucucugggcgccgagaacagcguggccuacuccaacaacucuaucgcuauccccaccaacuucaccaucagcgugaccacagagauccugccuguguccaugaccaagaccagcguggacugcaccauguacaucugcggcgauuccaccgagugcuccaaccugcugcugcaguacggcagcuucugcacccagcugaauagagcccugacagggaucgccguggaacaggacaagaacacccaagagguguucgcccaagugaagcagaucuacaagaccccuccuaucaaggacuucggcggcuucaauuucagccagauucugcccgauccuagcaagcccagcaagcggagcuucaucgaggaccugcuguucaacaaagugacacuggccgacgccggcuucaucaagcaguauggcgauugucugggcgacauugccgccagggaucugauuugcgcccagaaguuuaacggacugacagugcugccuccucugcugaccgaugagaugaucgcccaguacacaucugcccugcuggccggcacaaucacaagcggcuggacauuuggagcaggcgccgcucugcagauccccuuugcuaugcagauggccuaccgguucaacggcaucggagugacccagaaugugcuguacgagaaccagaagcugaucgccaaccaguucaacagcgccaucggcaagauccaggacagccugagcagcacagcaagcgcccugggaaagcugcaggacguggucaaccagaaugcccaggcacugaacacccuggucaagcagcuguccuccaacuucggcgccaucagcucugugcugaacgauauccugagcagacuggacccuccugaggccgaggugcagaucgacagacugaucacaggcagacugcagagccuccagacauacgugacccagcagcugaucagagccgccgagauuagagccucugccaaucuggccgccaccaagaugucugagugugugcugggccagagcaagagaguggacuuuugcggcaagggcuaccaccugaugagcuucccucagucugccccucacggcgugguguuucugcacgugacauaugugcccgcucaagagaagaauuucaccaccgcuccagccaucugccacgacggcaaagcccacuuuccuagagaaggcguguucguguccaacggcacccauugguucgugacacagcggaacuucuacgagccccagaucaucaccaccgacaacaccuucgugucuggcaacugcgacgucgugaucggcauugugaacaauaccguguacgacccucugcagcccgagcuggacagcuucaaagaggaacuggacaaguacuuuaagaaccacacaagccccgacguggaccugggcgauaucagcggaaucaaugccagcgucgugaacauccagaaagagaucgaccggcugaacgagguggccaagaaucugaacgagagccugaucgaccugcaagaacuggggaaguacgagcaguacaucaaguggcccugguacaucuggcugggcuuuaucgccggacugauugccaucgugauggucacaaucaugcuguguugcaugaccagcugcuguagcugccugaagggcuguuguagcuguggcagcugcugcaaguucgacgaggacgauucugagcccgugcugaagggcgugaaacugcacuacacaugaggacuagucccuguucccagagcccacuuuuuuuucuuuuuuugaaauaaaauagccugucuuucagaucuaaaaaaaaaaaaaaaaaaaaaaaaaaaaaaaaaaaaaaaaaaaaaaaaaaaaaaaaaaaaaaaaaaaaaaaaaaaaaaaaaaaaaaaaaaaaaaaaaaaa

SEQ ID NO: 25152 - RNA, 4167 nt, Artificial Sequence
  SARS-CoV-2/Wuhan/WIV05/2019__EPI_ISL_402128 spike protein mRNA gc mod (1-1273)(K986P_V987P_N501Y_D614G)
aggagagggcgcuuggcuugcaaggacccugagcugcggcauugaagcacacccaacccaacucgacugaagucagccucacugaaccggaucugagaaucuucucucucugggcuugccagggcucuccgaaccuagcuagcauccucuucaauuccaacuagaaagcuuaccauguucguguuccuggugcugcugccucugguguccagccagugugugaaccugaccaccagaacacagcugccuccagccuacaccaacagcuuuaccagaggcguguacuaccccgacaagguguucagauccagcgugcugcacucuacccaggaccuguuccugccuuucuucagcaacgugaccugguuccacgccauccacguguccggcaccaauggcaccaagagauucgacaaccccgugcugcccuucaacgacgggguguacuuugccagcaccgagaaguccaacaucaucagaggcuggaucuucggcaccacacuggacagcaagacccagagccugcugaucgugaacaacgccaccaacguggucaucaaagugugcgaguuccaguucugcaacgaccccuuccugggcgucuacuaccacaagaacaacaagagcuggauggaaagcgaguuccggguguacagcagcgccaacaacugcaccuucgaguacgugucccagccuuuccugauggaccuggaaggcaagcagggcaacuucaagaaccugcgcgaguucguguuuaagaacaucgacggcuacuucaagaucuacagcaagcacaccccuaucaaccucgugcgggaucugccucagggcuucucugcucuggaaccccugguggaucugcccaucggcaucaacaucacccgguuucagacacugcuggcccugcacagaagcuaccugacaccuggcgauagcagcagcggauggacagcuggugccgccgcuuacuaugugggcuaccugcagccuagaaccuuccugcugaaguacaacgagaacggcaccaucaccgacgccguggauugugcucuggauccucugagcgagacaaagugcacccugaaguccuucaccguggaaaagggcaucuaccagaccagcaacuuccgggugcagcccaccgaauccaucgugcgguuccccaauaucaccaaucugugccccuucggcgagguguucaaugccaccagauucgccucuguguacgccuggaaccggaagcggaucagcaauugcguggccgacuacuccgugcuguacaacuccgccagcuucagcaccuucaagugcuacggcguguccccuaccaagcugaacgaccugugcuucacaaacguguacgccgacagcuucgugauccggggagaugaagugcggcagauugccccuggacagacaggcaagaucgccgacuacaacuacaagcugcccgacgacuucaccggcugugugauugccuggaacagcaacaaccuggacuccaaagucggcggcaacuacaauuaccuguaccggcuguuccggaaguccaaucugaagcccuucgagcgggacaucuccaccgagaucuaucaggccggcagcaccccuuguaacggcguggaaggcuucaacugcuacuucccacugcaguccuacggcuuucagcccacauacggcgugggcuaucagcccuacagagugguggugcugagcuucgaacugcugcaugccccugccacagugugcggcccuaagaaaagcaccaaucucgugaagaacaaaugcgugaacuucaacuucaacggccugaccggcaccggcgugcugacagagagcaacaagaaguuccugccauuccagcaguuuggccgggauaucgccgauaccacagacgccguuagagauccccagacacuggaaauccuggacaucaccccuugcagcuucggcggagugucugugaucaccccuggcaccaacaccagcaaucagguggcagugcuguaccagggcgugaacuguaccgaagugcccguggccauucacgccgaucagcugacaccuacauggcggguguacuccaccggcagcaauguguuucagaccagagccggcugucugaucggagccgagcacgugaacaauagcuacgagugcgacauccccaucggcgcuggaaucugcgccagcuaccagacacagacaaacagcccucggagagccagaagcguggccagccagagcaucauugccuacacaaugucucugggcgccgagaacagcguggccuacuccaacaacucuaucgcuauccccaccaacuucaccaucagcgugaccacagagauccugccuguguccaugaccaagaccagcguggacugcaccauguacaucugcggcgauuccaccgagugcuccaaccugcugcugcaguacggcagcuucugcacccagcugaauagagcccugacagggaucgccguggaacaggacaagaacacccaagagguguucgcccaagugaagcagaucuacaagaccccuccuaucaaggacuucggcggcuucaauuucagccagauucugcccgauccuagcaagcccagcaagcggagcuucaucgaggaccugcuguucaacaaagugacacuggccgacgccggcuucaucaagcaguauggcgauugucugggcgacauugccgccagggaucugauuugcgcccagaaguuuaacggacugacagugcugccuccucugcugaccgaugagaugaucgcccaguacacaucugcccugcuggccggcacaaucacaagcggcuggacauuuggagcaggcgccgcucugcagauccccuuugcuaugcagauggccuaccgguucaacggcaucggagugacccagaaugugcuguacgagaaccagaagcugaucgccaaccaguucaacagcgccaucggcaagauccaggacagccugagcagcacagcaagcgcccugggaaagcugcaggacguggucaaccagaaugcccaggcacugaacacccuggucaagcagcuguccuccaacuucggcgccaucagcucugugcugaacgauauccugagcagacuggacccuccugaggccgaggugcagaucgacagacugaucacaggcagacugcagagccuccagacauacgugacccagcagcugaucagagccgccgagauuagagccucugccaaucuggccgccaccaagaugucugagugugugcugggccagagcaagagaguggacuuuugcggcaagggcuaccaccugaugagcuucccucagucugccccucacggcgugguguuucugcacgugacauaugugcccgcucaagagaagaauuucaccaccgcuccagccaucugccacgacggcaaagcccacuuuccuagagaaggcguguucguguccaacggcacccauugguucgugacacagcggaacuucuacgagccccagaucaucaccaccgacaacaccuucgugucuggcaacugcgacgucgugaucggcauugugaacaauaccguguacgacccucugcagcccgagcuggacagcuucaaagaggaacuggacaaguacuuuaagaaccacacaagccccgacguggaccugggcgauaucagcggaaucaaugccagcgucgugaacauccagaaagagaucgaccggcugaacgagguggccaagaaucugaacgagagccugaucgaccugcaagaacuggggaaguacgagcaguacaucaaguggcccugguacaucuggcugggcuuuaucgccggacugauugccaucgugauggucacaaucaugcuguguugcaugaccagcugcuguagcugccugaagggcuguuguagcuguggcagcugcugcaaguucgacgaggacgauucugagcccgugcugaagggcgugaaacugcacuacacaugaggacuagucccuguucccagagcccacuuuuuuuucuuuuuuugaaauaaaauagccugucuuucagaucuaaaaaaaaaaaaaaaaaaaaaaaaaaaaaaaaaaaaaaaaaaaaaaaaaaaaaaaaaaaaaaaaaaaaaaaaaaaaaaaaaaaaaaaaaaaaaaaaaaaa

SEQ ID NO: 25153 - RNA, 4161 nt, Artificial Sequence
  SARS-CoV-2/Wuhan/WIV05/2019__EPI_ISL_402128 spike protein mRNA gc mod (1-1273)(K986P_V987P_H69del_V70del_D614G)
aggagagggcgcuuggcuugcaaggacccugagcugcggcauugaagcacacccaacccaacucgacugaagucagccucacugaaccggaucugagaaucuucucucucugggcuugccagggcucuccgaaccuagcuagcauccucuucaauuccaacuagaaagcuuaccauguucguguuccuggugcugcugccucugguguccagccagugugugaaccugaccaccagaacacagcugccuccagccuacaccaacagcuuuaccagaggcguguacuaccccgacaagguguucagauccagcgugcugcacucuacccaggaccuguuccugccuuucuucagcaacgugaccugguuccacgccaucuccggcaccaauggcaccaagagauucgacaaccccgugcugcccuucaacgacgggguguacuuugccagcaccgagaaguccaacaucaucagaggcuggaucuucggcaccacacuggacagcaagacccagagccugcugaucgugaacaacgccaccaacguggucaucaaagugugcgaguuccaguucugcaacgaccccuuccugggcgucuacuaccacaagaacaacaagagcuggauggaaagcgaguuccggguguacagcagcgccaacaacugcaccuucgaguacgugucccagccuuuccugauggaccuggaaggcaagcagggcaacuucaagaaccugcgcgaguucguguuuaagaacaucgacggcuacuucaagaucuacagcaagcacaccccuaucaaccucgugcgggaucugccucagggcuucucugcucuggaaccccugguggaucugcccaucggcaucaacaucacccgguuucagacacugcuggcccugcacagaagcuaccugacaccuggcgauagcagcagcggauggacagcuggugccgccgcuuacuaugugggcuaccugcagccuagaaccuuccugcugaaguacaacgagaacggcaccaucaccgacgccguggauugugcucuggauccucugagcgagacaaagugcacccugaaguccuucaccguggaaaagggcaucuaccagaccagcaacuuccgggugcagcccaccgaauccaucgugcgguuccccaauaucaccaaucugugccccuucggcgagguguucaaugccaccagauucgccucuguguacgccuggaaccggaagcggaucagcaauugcguggccgacuacuccgugcuguacaacuccgccagcuucagcaccuucaagugcuacggcguguccccuaccaagcugaacgaccugugcuucacaaacguguacgccgacagcuucgugauccggggagaugaagugcggcagauugccccuggacagacaggcaagaucgccgacuacaacuacaagcugcccgacgacuucaccggcugugugauugccuggaacagcaacaaccuggacuccaaagucggcggcaacuacaauuaccuguaccggcuguuccggaaguccaaucugaagcccuucgagcgggacaucuccaccgagaucuaucaggccggcagcaccccuuguaacggcguggaaggcuucaacugcuacuucccacugcaguccuacggcuuucagcccacaaauggcgugggcuaucagcccuacagagugguggugcugagcuucgaacugcugcaugccccugccacagugugcggcccuaagaaaagcaccaaucucgugaagaacaaaugcgugaacuucaacuucaacggccugaccggcaccggcgugcugacagagagcaacaagaaguuccugccauuccagcaguuuggccgggauaucgccgauaccacagacgccguuagagauccccagacacuggaaauccuggacaucaccccuugcagcuucggcggagugucugugaucaccccuggcaccaacaccagcaaucagguggcagugcuguaccagggcgugaacuguaccgaagugcccguggccauucacgccgaucagcugacaccuacauggcggguguacuccaccggcagcaauguguuucagaccagagccggcugucugaucggagccgagcacgugaacaauagcuacgagugcgacauccccaucggcgcuggaaucugcgccagcuaccagacacagacaaacagcccucggagagccagaagcguggccagccagagcaucauugccuacacaaugucucugggcgccgagaacagcguggccuacuccaacaacucuaucgcuauccccaccaacuucaccaucagcgugaccacagagauccugccuguguccaugaccaagaccagcguggacugcaccauguacaucugcggcgauuccaccgagugcuccaaccugcugcugcaguacggcagcuucugcacccagcugaauagagcccugacagggaucgccguggaacaggacaagaacacccaagagguguucgcccaagugaagcagaucuacaagaccccuccuaucaaggacuucggcggcuucaauuucagccagauucugcccgauccuagcaagcccagcaagcggagcuucaucgaggaccugcuguucaacaaagugacacuggccgacgccggcuucaucaagcaguauggcgauugucugggcgacauugccgccagggaucugauuugcgcccagaaguuuaacggacugacagugcugccuccucugcugaccgaugagaugaucgcccaguacacaucugcccugcuggccggcacaaucacaagcggcuggacauuuggagcaggcgccgcucugcagauccccuuugcuaugcagauggccuaccgguucaacggcaucggagugacccagaaugugcuguacgagaaccagaagcugaucgccaaccaguucaacagcgccaucggcaagauccaggacagccugagcagcacagcaagcgcccugggaaagcugcaggacguggucaaccagaaugcccaggcacugaacacccuggucaagcagcuguccuccaacuucggcgccaucagcucugugcugaacgauauccugagcagacuggacccuccugaggccgaggugcagaucgacagacugaucacaggcagacugcagagccuccagacauacgugacccagcagcugaucagagccgccgagauuagagccucugccaaucuggccgccaccaagaugucugagugugugcugggccagagcaagagaguggacuuuugcggcaagggcuaccaccugaugagcuucccucagucugccccucacggcgugguguuucugcacgugacauaugugcccgcucaagagaagaauuucaccaccgcuccagccaucugccacgacggcaaagcccacuuuccuagagaaggcguguucguguccaacggcacccauugguucgugacacagcggaacuucuacgagccccagaucaucaccaccgacaacaccuucgugucuggcaacugcgacgucgugaucggcauugugaacaauaccguguacgacccucugcagcccgagcuggacagcuucaaagaggaacuggacaaguacuuuaagaaccacacaagccccgacguggaccugggcgauaucagcggaaucaaugccagcgucgugaacauccagaaagagaucgaccggcugaacgagguggccaagaaucugaacgagagccugaucgaccugcaagaacuggggaaguacgagcaguacaucaaguggcccugguacaucuggcugggcuuuaucgccggacugauugccaucgugauggucacaaucaugcuguguugcaugaccagcugcuguagcugccugaagggcuguuguagcuguggcagcugcugcaaguucgacgaggacgauucugagcccgugcugaagggcgugaaacugcacuacacaugaggacuagucccuguucccagagcccacuuuuuuuucuuuuuuugaaauaaaauagccugucuuucagaucuaaaaaaaaaaaaaaaaaaaaaaaaaaaaaaaaaaaaaaaaaaaaaaaaaaaaaaaaaaaaaaaaaaaaaaaaaaaaaaaaaaaaaaaaaaaaaaaaaaaa

SEQ ID NO: 25154 - RNA, 4167 nt, Artificial Sequence
  SARS-CoV-2/Wuhan/WIV05/2019__EPI_ISL_402128 spike protein mRNA gc mod (1-1273)(K986P_V987P_Y453F_D614G)
aggagagggcgcuuggcuugcaaggacccugagcugcggcauugaagcacacccaacccaacucgacugaagucagccucacugaaccggaucugagaaucuucucucucugggcuugccagggcucuccgaaccuagcuagcauccucuucaauuccaacuagaaagcuuaccauguucguguuccuggugcugcugccucugguguccagccagugugugaaccugaccaccagaacacagcugccuccagccuacaccaacagcuuuaccagaggcguguacuaccccgacaagguguucagauccagcgugcugcacucuacccaggaccuguuccugccuuucuucagcaacgugaccugguuccacgccauccacguguccggcaccaauggcaccaagagauucgacaaccccgugcugcccuucaacgacgggguguacuuugccagcaccgagaaguccaacaucaucagaggcuggaucuucggcaccacacuggacagcaagacccagagccugcugaucgugaacaacgccaccaacguggucaucaaagugugcgaguuccaguucugcaacgaccccuuccugggcgucuacuaccacaagaacaacaagagcuggauggaaagcgaguuccggguguacagcagcgccaacaacugcaccuucgaguacgugucccagccuuuccugauggaccuggaaggcaagcagggcaacuucaagaaccugcgcgaguucguguuuaagaacaucgacggcuacuucaagaucuacagcaagcacaccccuaucaaccucgugcgggaucugccucagggcuucucugcucuggaaccccugguggaucugcccaucggcaucaacaucacccgguuucagacacugcuggcccugcacagaagcuaccugacaccuggcgauagcagcagcggauggacagcuggugccgccgcuuacuaugugggcuaccugcagccuagaaccuuccugcugaaguacaacgagaacggcaccaucaccgacgccguggauugugcucuggauccucugagcgagacaaagugcacccugaaguccuucaccguggaaaagggcaucuaccagaccagcaacuuccgggugcagcccaccgaauccaucgugcgguuccccaauaucaccaaucugugccccuucggcgagguguucaaugccaccagauucgccucuguguacgccuggaaccggaagcggaucagcaauugcguggccgacuacuccgugcuguacaacuccgccagcuucagcaccuucaagugcuacggcguguccccuaccaagcugaacgaccugugcuucacaaacguguacgccgacagcuucgugauccggggagaugaagugcggcagauugccccuggacagacaggcaagaucgccgacuacaacuacaagcugcccgacgacuucaccggcugugugauugccuggaacagcaacaaccuggacuccaaagucggcggcaacuacaauuaccuguuccggcuguuccggaaguccaaucugaagcccuucgagcgggacaucuccaccgagaucuaucaggccggcagcaccccuuguaacggcguggaaggcuucaacugcuacuucccacugcaguccuacggcuuucagcccacaaauggcgugggcuaucagcccuacagagugguggugcugagcuucgaacugcugcaugccccugccacagugugcggcccuaagaaaagcaccaaucucgugaagaacaaaugcgugaacuucaacuucaacggccugaccggcaccggcgugcugacagagagcaacaagaaguuccugccauuccagcaguuuggccgggauaucgccgauaccacagacgccguuagagauccccagacacuggaaauccuggacaucaccccuugcagcuucggcggagugucugugaucaccccuggcaccaacaccagcaaucagguggcagugcuguaccagggcgugaacuguaccgaagugcccguggccauucacgccgaucagcugacaccuacauggcggguguacuccaccggcagcaauguguuucagaccagagccggcugucugaucggagccgagcacgugaacaauagcuacgagugcgacauccccaucggcgcuggaaucugcgccagcuaccagacacagacaaacagcccucggagagccagaagcguggccagccagagcaucauugccuacacaaugucucugggcgccgagaacagcguggccuacuccaacaacucuaucgcuauccccaccaacuucaccaucagcgugaccacagagauccugccuguguccaugaccaagaccagcguggacugcaccauguacaucugcggcgauuccaccgagugcuccaaccugcugcugcaguacggcagcuucugcacccagcugaauagagcccugacagggaucgccguggaacaggacaagaacacccaagagguguucgcccaagugaagcagaucuacaagaccccuccuaucaaggacuucggcggcuucaauuucagccagauucugcccgauccuagcaagcccagcaagcggagcuucaucgaggaccugcuguucaacaaagugacacuggccgacgccggcuucaucaagcaguauggcgauugucugggcgacauugccgccagggaucugauuugcgcccagaaguuuaacggacugacagugcugccuccucugcugaccgaugagaugaucgcccaguacacaucugcccugcuggccggcacaaucacaagcggcuggacauuuggagcaggcgccgcucugcagauccccuuugcuaugcagauggccuaccgguucaacggcaucggagugacccagaaugugcuguacgagaaccagaagcugaucgccaaccaguucaacagcgccaucggcaagauccaggacagccugagcagcacagcaagcgcccugggaaagcugcaggacguggucaaccagaaugcccaggcacugaacacccuggucaagcagcuguccuccaacuucggcgccaucagcucugugcugaacgauauccugagcagacuggacccuccugaggccgaggugcagaucgacagacugaucacaggcagacugcagagccuccagacauacgugacccagcagcugaucagagccgccgagauuagagccucugccaaucuggccgccaccaagaugucugagugugugcugggccagagcaagagaguggacuuuugcggcaagggcuaccaccugaugagcuucccucagucugccccucacggcgugguguuucugcacgugacauaugugcccgcucaagagaagaauuucaccaccgcuccagccaucugccacgacggcaaagcccacuuuccuagagaaggcguguucguguccaacggcacccauugguucgugacacagcggaacuucuacgagccccagaucaucaccaccgacaacaccuucgugucuggcaacugcgacgucgugaucggcauugugaacaauaccguguacgacccucugcagcccgagcuggacagcuucaaagaggaacuggacaaguacuuuaagaaccacacaagccccgacguggaccugggcgauaucagcggaaucaaugccagcgucgugaacauccagaaagagaucgaccggcugaacgagguggccaagaaucugaacgagagccugaucgaccugcaagaacuggggaaguacgagcaguacaucaaguggcccugguacaucuggcugggcuuuaucgccggacugauugccaucgugauggucacaaucaugcuguguugcaugaccagcugcuguagcugccugaagggcuguuguagcuguggcagcugcugcaaguucgacgaggacgauucugagcccgugcugaagggcgugaaacugcacuacacaugaggacuagucccuguucccagagcccacuuuuuuuucuuuuuuugaaauaaaauagccugucuuucagaucuaaaaaaaaaaaaaaaaaaaaaaaaaaaaaaaaaaaaaaaaaaaaaaaaaaaaaaaaaaaaaaaaaaaaaaaaaaaaaaaaaaaaaaaaaaaaaaaaaaaa

SEQ ID NO: 25155 - RNA, 4167 nt, Artificial Sequence
  SARS-CoV-2/Wuhan/WIV05/2019__EPI_ISL_402128 spike protein mRNA gc mod (1-1273)(K986P_V987P_D614G_I692V)
aggagagggcgcuuggcuugcaaggacccugagcugcggcauugaagcacacccaacccaacucgacugaagucagccucacugaaccggaucugagaaucuucucucucugggcuugccagggcucuccgaaccuagcuagcauccucuucaauuccaacuagaaagcuuaccauguucguguuccuggugcugcugccucugguguccagccagugugugaaccugaccaccagaacacagcugccuccagccuacaccaacagcuuuaccagaggcguguacuaccccgacaagguguucagauccagcgugcugcacucuacccaggaccuguuccugccuuucuucagcaacgugaccugguuccacgccauccacguguccggcaccaauggcaccaagagauucgacaaccccgugcugcccuucaacgacgggguguacuuugccagcaccgagaaguccaacaucaucagaggcuggaucuucggcaccacacuggacagcaagacccagagccugcugaucgugaacaacgccaccaacguggucaucaaagugugcgaguuccaguucugcaacgaccccuuccugggcgucuacuaccacaagaacaacaagagcuggauggaaagcgaguuccggguguacagcagcgccaacaacugcaccuucgaguacgugucccagccuuuccugauggaccuggaaggcaagcagggcaacuucaagaaccugcgcgaguucguguuuaagaacaucgacggcuacuucaagaucuacagcaagcacaccccuaucaaccucgugcgggaucugccucagggcuucucugcucuggaaccccugguggaucugcccaucggcaucaacaucacccgguuucagacacugcuggcccugcacagaagcuaccugacaccuggcgauagcagcagcggauggacagcuggugccgccgcuuacuaugugggcuaccugcagccuagaaccuuccugcugaaguacaacgagaacggcaccaucaccgacgccguggauugugcucuggauccucugagcgagacaaagugcacccugaaguccuucaccguggaaaagggcaucuaccagaccagcaacuuccgggugcagcccaccgaauccaucgugcgguuccccaauaucaccaaucugugccccuucggcgagguguucaaugccaccagauucgccucuguguacgccuggaaccggaagcggaucagcaauugcguggccgacuacuccgugcuguacaacuccgccagcuucagcaccuucaagugcuacggcguguccccuaccaagcugaacgaccugugcuucacaaacguguacgccgacagcuucgugauccggggagaugaagugcggcagauugccccuggacagacaggcaagaucgccgacuacaacuacaagcugcccgacgacuucaccggcugugugauugccuggaacagcaacaaccuggacuccaaagucggcggcaacuacaauuaccuguaccggcuguuccggaaguccaaucugaagcccuucgagcgggacaucuccaccgagaucuaucaggccggcagcaccccuuguaacggcguggaaggcuucaacugcuacuucccacugcaguccuacggcuuucagcccacaaauggcgugggcuaucagcccuacagagugguggugcugagcuucgaacugcugcaugccccugccacagugugcggcccuaagaaaagcaccaaucucgugaagaacaaaugcgugaacuucaacuucaacggccugaccggcaccggcgugcugacagagagcaacaagaaguuccugccauuccagcaguuuggccgggauaucgccgauaccacagacgccguuagagauccccagacacuggaaauccuggacaucaccccuugcagcuucggcggagugucugugaucaccccuggcaccaacaccagcaaucagguggcagugcuguaccagggcgugaacuguaccgaagugcccguggccauucacgccgaucagcugacaccuacauggcggguguacuccaccggcagcaauguguuucagaccagagccggcugucugaucggagccgagcacgugaacaauagcuacgagugcgacauccccaucggcgcuggaaucugcgccagcuaccagacacagacaaacagcccucggagagccagaagcguggccagccagagcgugauugccuacacaaugucucugggcgccgagaacagcguggccuacuccaacaacucuaucgcuauccccaccaacuucaccaucagcgugaccacagagauccugccuguguccaugaccaagaccagcguggacugcaccauguacaucugcggcgauuccaccgagugcuccaaccugcugcugcaguacggcagcuucugcacccagcugaauagagcccugacagggaucgccguggaacaggacaagaacacccaagagguguucgcccaagugaagcagaucuacaagaccccuccuaucaaggacuucggcggcuucaauuucagccagauucugcccgauccuagcaagcccagcaagcggagcuucaucgaggaccugcuguucaacaaagugacacuggccgacgccggcuucaucaagcaguauggcgauugucugggcgacauugccgccagggaucugauuugcgcccagaaguuuaacggacugacagugcugccuccucugcugaccgaugagaugaucgcccaguacacaucugcccugcuggccggcacaaucacaagcggcuggacauuuggagcaggcgccgcucugcagauccccuuugcuaugcagauggccuaccgguucaacggcaucggagugacccagaaugugcuguacgagaaccagaagcugaucgccaaccaguucaacagcgccaucggcaagauccaggacagccugagcagcacagcaagcgcccugggaaagcugcaggacguggucaaccagaaugcccaggcacugaacacccuggucaagcagcuguccuccaacuucggcgccaucagcucugugcugaacgauauccugagcagacuggacccuccugaggccgaggugcagaucgacagacugaucacaggcagacugcagagccuccagacauacgugacccagcagcugaucagagccgccgagauuagagccucugccaaucuggccgccaccaagaugucugagugugugcugggccagagcaagagaguggacuuuugcggcaagggcuaccaccugaugagcuucccucagucugccccucacggcgugguguuucugcacgugacauaugugcccgcucaagagaagaauuucaccaccgcuccagccaucugccacgacggcaaagcccacuuuccuagagaaggcguguucguguccaacggcacccauugguucgugacacagcggaacuucuacgagccccagaucaucaccaccgacaacaccuucgugucuggcaacugcgacgucgugaucggcauugugaacaauaccguguacgacccucugcagcccgagcuggacagcuucaaagaggaacuggacaaguacuuuaagaaccacacaagccccgacguggaccugggcgauaucagcggaaucaaugccagcgucgugaacauccagaaagagaucgaccggcugaacgagguggccaagaaucugaacgagagccugaucgaccugcaagaacuggggaaguacgagcaguacaucaaguggcccugguacaucuggcugggcuuuaucgccggacugauugccaucgugauggucacaaucaugcuguguugcaugaccagcugcuguagcugccugaagggcuguuguagcuguggcagcugcugcaaguucgacgaggacgauucugagcccgugcugaagggcgugaaacugcacuacacaugaggacuagucccuguucccagagcccacuuuuuuuucuuuuuuugaaauaaaauagccugucuuucagaucuaaaaaaaaaaaaaaaaaaaaaaaaaaaaaaaaaaaaaaaaaaaaaaaaaaaaaaaaaaaaaaaaaaaaaaaaaaaaaaaaaaaaaaaaaaaaaaaaaaaa

SEQ ID NO: 25156 - RNA, 4167 nt, Artificial Sequence
  SARS-CoV-2/Wuhan/WIV05/2019__EPI_ISL_402128 spike protein mRNA gc mod (1-1273)(K986P_V987P_D614G_M1229I)
aggagagggcgcuuggcuugcaaggacccugagcugcggcauugaagcacacccaacccaacucgacugaagucagccucacugaaccggaucugagaaucuucucucucugggcuugccagggcucuccgaaccuagcuagcauccucuucaauuccaacuagaaagcuuaccauguucguguuccuggugcugcugccucugguguccagccagugugugaaccugaccaccagaacacagcugccuccagccuacaccaacagcuuuaccagaggcguguacuaccccgacaagguguucagauccagcgugcugcacucuacccaggaccuguuccugccuuucuucagcaacgugaccugguuccacgccauccacguguccggcaccaauggcaccaagagauucgacaaccccgugcugcccuucaacgacgggguguacuuugccagcaccgagaaguccaacaucaucagaggcuggaucuucggcaccacacuggacagcaagacccagagccugcugaucgugaacaacgccaccaacguggucaucaaagugugcgaguuccaguucugcaacgaccccuuccugggcgucuacuaccacaagaacaacaagagcuggauggaaagcgaguuccggguguacagcagcgccaacaacugcaccuucgaguacgugucccagccuuuccugauggaccuggaaggcaagcagggcaacuucaagaaccugcgcgaguucguguuuaagaacaucgacggcuacuucaagaucuacagcaagcacaccccuaucaaccucgugcgggaucugccucagggcuucucugcucuggaaccccugguggaucugcccaucggcaucaacaucacccgguuucagacacugcuggcccugcacagaagcuaccugacaccuggcgauagcagcagcggauggacagcuggugccgccgcuuacuaugugggcuaccugcagccuagaaccuuccugcugaaguacaacgagaacggcaccaucaccgacgccguggauugugcucuggauccucugagcgagacaaagugcacccugaaguccuucaccguggaaaagggcaucuaccagaccagcaacuuccgggugcagcccaccgaauccaucgugcgguuccccaauaucaccaaucugugccccuucggcgagguguucaaugccaccagauucgccucuguguacgccuggaaccggaagcggaucagcaauugcguggccgacuacuccgugcuguacaacuccgccagcuucagcaccuucaagugcuacggcguguccccuaccaagcugaacgaccugugcuucacaaacguguacgccgacagcuucgugauccggggagaugaagugcggcagauugccccuggacagacaggcaagaucgccgacuacaacuacaagcugcccgacgacuucaccggcugugugauugccuggaacagcaacaaccuggacuccaaagucggcggcaacuacaauuaccuguaccggcuguuccggaaguccaaucugaagcccuucgagcgggacaucuccaccgagaucuaucaggccggcagcaccccuuguaacggcguggaaggcuucaacugcuacuucccacugcaguccuacggcuuucagcccacaaauggcgugggcuaucagcccuacagagugguggugcugagcuucgaacugcugcaugccccugccacagugugcggcccuaagaaaagcaccaaucucgugaagaacaaaugcgugaacuucaacuucaacggccugaccggcaccggcgugcugacagagagcaacaagaaguuccugccauuccagcaguuuggccgggauaucgccgauaccacagacgccguuagagauccccagacacuggaaauccuggacaucaccccuugcagcuucggcggagugucugugaucaccccuggcaccaacaccagcaaucagguggcagugcuguaccagggcgugaacuguaccgaagugcccguggccauucacgccgaucagcugacaccuacauggcggguguacuccaccggcagcaauguguuucagaccagagccggcugucugaucggagccgagcacgugaacaauagcuacgagugcgacauccccaucggcgcuggaaucugcgccagcuaccagacacagacaaacagcccucggagagccagaagcguggccagccagagcaucauugccuacacaaugucucugggcgccgagaacagcguggccuacuccaacaacucuaucgcuauccccaccaacuucaccaucagcgugaccacagagauccugccuguguccaugaccaagaccagcguggacugcaccauguacaucugcggcgauuccaccgagugcuccaaccugcugcugcaguacggcagcuucugcacccagcugaauagagcccugacagggaucgccguggaacaggacaagaacacccaagagguguucgcccaagugaagcagaucuacaagaccccuccuaucaaggacuucggcggcuucaauuucagccagauucugcccgauccuagcaagcccagcaagcggagcuucaucgaggaccugcuguucaacaaagugacacuggccgacgccggcuucaucaagcaguauggcgauugucugggcgacauugccgccagggaucugauuugcgcccagaaguuuaacggacugacagugcugccuccucugcugaccgaugagaugaucgcccaguacacaucugcccugcuggccggcacaaucacaagcggcuggacauuuggagcaggcgccgcucugcagauccccuuugcuaugcagauggccuaccgguucaacggcaucggagugacccagaaugugcuguacgagaaccagaagcugaucgccaaccaguucaacagcgccaucggcaagauccaggacagccugagcagcacagcaagcgcccugggaaagcugcaggacguggucaaccagaaugcccaggcacugaacacccuggucaagcagcuguccuccaacuucggcgccaucagcucugugcugaacgauauccugagcagacuggacccuccugaggccgaggugcagaucgacagacugaucacaggcagacugcagagccuccagacauacgugacccagcagcugaucagagccgccgagauuagagccucugccaaucuggccgccaccaagaugucugagugugugcugggccagagcaagagaguggacuuuugcggcaagggcuaccaccugaugagcuucccucagucugccccucacggcgugguguuucugcacgugacauaugugcccgcucaagagaagaauuucaccaccgcuccagccaucugccacgacggcaaagcccacuuuccuagagaaggcguguucguguccaacggcacccauugguucgugacacagcggaacuucuacgagccccagaucaucaccaccgacaacaccuucgugucuggcaacugcgacgucgugaucggcauugugaacaauaccguguacgacccucugcagcccgagcuggacagcuucaaagaggaacuggacaaguacuuuaagaaccacacaagccccgacguggaccugggcgauaucagcggaaucaaugccagcgucgugaacauccagaaagagaucgaccggcugaacgagguggccaagaaucugaacgagagccugaucgaccugcaagaacuggggaaguacgagcaguacaucaaguggcccugguacaucuggcugggcuuuaucgccggacugauugccaucgugaucgucacaaucaugcuguguugcaugaccagcugcuguagcugccugaagggcuguuguagcuguggcagcugcugcaaguucgacgaggacgauucugagcccgugcugaagggcgugaaacugcacuacacaugaggacuagucccuguucccagagcccacuuuuuuuucuuuuuuugaaauaaaauagccugucuuucagaucuaaaaaaaaaaaaaaaaaaaaaaaaaaaaaaaaaaaaaaaaaaaaaaaaaaaaaaaaaaaaaaaaaaaaaaaaaaaaaaaaaaaaaaaaaaaaaaaaaaaa

SEQ ID NO: 25157 - RNA, 4161 nt, Artificial Sequence
  SARS-CoV-2/Wuhan/WIV05/2019__EPI_ISL_402128 spike protein mRNA gc mod (1-1273)(K986P_V987P_H69del_V70del_A222V_Y453F_S477N_D614G_I692V)
aggagagggcgcuuggcuugcaaggacccugagcugcggcauugaagcacacccaacccaacucgacugaagucagccucacugaaccggaucugagaaucuucucucucugggcuugccagggcucuccgaaccuagcuagcauccucuucaauuccaacuagaaagcuuaccauguucguguuccuggugcugcugccucugguguccagccagugugugaaccugaccaccagaacacagcugccuccagccuacaccaacagcuuuaccagaggcguguacuaccccgacaagguguucagauccagcgugcugcacucuacccaggaccuguuccugccuuucuucagcaacgugaccugguuccacgccaucuccggcaccaauggcaccaagagauucgacaaccccgugcugcccuucaacgacgggguguacuuugccagcaccgagaaguccaacaucaucagaggcuggaucuucggcaccacacuggacagcaagacccagagccugcugaucgugaacaacgccaccaacguggucaucaaagugugcgaguuccaguucugcaacgaccccuuccugggcgucuacuaccacaagaacaacaagagcuggauggaaagcgaguuccggguguacagcagcgccaacaacugcaccuucgaguacgugucccagccuuuccugauggaccuggaaggcaagcagggcaacuucaagaaccugcgcgaguucguguuuaagaacaucgacggcuacuucaagaucuacagcaagcacaccccuaucaaccucgugcgggaucugccucagggcuucucugugcuggaaccccugguggaucugcccaucggcaucaacaucacccgguuucagacacugcuggcccugcacagaagcuaccugacaccuggcgauagcagcagcggauggacagcuggugccgccgcuuacuaugugggcuaccugcagccuagaaccuuccugcugaaguacaacgagaacggcaccaucaccgacgccguggauugugcucuggauccucugagcgagacaaagugcacccugaaguccuucaccguggaaaagggcaucuaccagaccagcaacuuccgggugcagcccaccgaauccaucgugcgguuccccaauaucaccaaucugugccccuucggcgagguguucaaugccaccagauucgccucuguguacgccuggaaccggaagcggaucagcaauugcguggccgacuacuccgugcuguacaacuccgccagcuucagcaccuucaagugcuacggcguguccccuaccaagcugaacgaccugugcuucacaaacguguacgccgacagcuucgugauccggggagaugaagugcggcagauugccccuggacagacaggcaagaucgccgacuacaacuacaagcugcccgacgacuucaccggcugugugauugccuggaacagcaacaaccuggacuccaaagucggcggcaacuacaauuaccuguuccggcuguuccggaaguccaaucugaagcccuucgagcgggacaucuccaccgagaucuaucaggccggcaacaccccuuguaacggcguggaaggcuucaacugcuacuucccacugcaguccuacggcuuucagcccacaaauggcgugggcuaucagcccuacagagugguggugcugagcuucgaacugcugcaugccccugccacagugugcggcccuaagaaaagcaccaaucucgugaagaacaaaugcgugaacuucaacuucaacggccugaccggcaccggcgugcugacagagagcaacaagaaguuccugccauuccagcaguuuggccgggauaucgccgauaccacagacgccguuagagauccccagacacuggaaauccuggacaucaccccuugcagcuucggcggagugucugugaucaccccuggcaccaacaccagcaaucagguggcagugcuguaccagggcgugaacuguaccgaagugcccguggccauucacgccgaucagcugacaccuacauggcggguguacuccaccggcagcaauguguuucagaccagagccggcugucugaucggagccgagcacgugaacaauagcuacgagugcgacauccccaucggcgcuggaaucugcgccagcuaccagacacagacaaacagcccucggagagccagaagcguggccagccagagcgugauugccuacacaaugucucugggcgccgagaacagcguggccuacuccaacaacucuaucgcuauccccaccaacuucaccaucagcgugaccacagagauccugccuguguccaugaccaagaccagcguggacugcaccauguacaucugcggcgauuccaccgagugcuccaaccugcugcugcaguacggcagcuucugcacccagcugaauagagcccugacagggaucgccguggaacaggacaagaacacccaagagguguucgcccaagugaagcagaucuacaagaccccuccuaucaaggacuucggcggcuucaauuucagccagauucugcccgauccuagcaagcccagcaagcggagcuucaucgaggaccugcuguucaacaaagugacacuggccgacgccggcuucaucaagcaguauggcgauugucugggcgacauugccgccagggaucugauuugcgcccagaaguuuaacggacugacagugcugccuccucugcugaccgaugagaugaucgcccaguacacaucugcccugcuggccggcacaaucacaagcggcuggacauuuggagcaggcgccgcucugcagauccccuuugcuaugcagauggccuaccgguucaacggcaucggagugacccagaaugugcuguacgagaaccagaagcugaucgccaaccaguucaacagcgccaucggcaagauccaggacagccugagcagcacagcaagcgcccugggaaagcugcaggacguggucaaccagaaugcccaggcacugaacacccuggucaagcagcuguccuccaacuucggcgccaucagcucugugcugaacgauauccugagcagacuggacccuccugaggccgaggugcagaucgacagacugaucacaggcagacugcagagccuccagacauacgugacccagcagcugaucagagccgccgagauuagagccucugccaaucuggccgccaccaagaugucugagugugugcugggccagagcaagagaguggacuuuugcggcaagggcuaccaccugaugagcuucccucagucugccccucacggcgugguguuucugcacgugacauaugugcccgcucaagagaagaauuucaccaccgcuccagccaucugccacgacggcaaagcccacuuuccuagagaaggcguguucguguccaacggcacccauugguucgugacacagcggaacuucuacgagccccagaucaucaccaccgacaacaccuucgugucuggcaacugcgacgucgugaucggcauugugaacaauaccguguacgacccucugcagcccgagcuggacagcuucaaagaggaacuggacaaguacuuuaagaaccacacaagccccgacguggaccugggcgauaucagcggaaucaaugccagcgucgugaacauccagaaagagaucgaccggcugaacgagguggccaagaaucugaacgagagccugaucgaccugcaagaacuggggaaguacgagcaguacaucaaguggcccugguacaucuggcugggcuuuaucgccggacugauugccaucgugauggucacaaucaugcuguguugcaugaccagcugcuguagcugccugaagggcuguuguagcuguggcagcugcugcaaguucgacgaggacgauucugagcccgugcugaagggcgugaaacugcacuacacaugaggacuagucccuguucccagagcccacuuuuuuuucuuuuuuugaaauaaaauagccugucuuucagaucuaaaaaaaaaaaaaaaaaaaaaaaaaaaaaaaaaaaaaaaaaaaaaaaaaaaaaaaaaaaaaaaaaaaaaaaaaaaaaaaaaaaaaaaaaaaaaaaaaaaa

SEQ ID NO: 25158 - RNA, 4161 nt, Artificial Sequence
  SARS-CoV-2/Wuhan/WIV05/2019__EPI_ISL_402128 spike protein mRNA gc mod (1-1273)(K986P_V987P_H69del_V70del_Y453F_D614G_I692V_M1229I)
aggagagggcgcuuggcuugcaaggacccugagcugcggcauugaagcacacccaacccaacucgacugaagucagccucacugaaccggaucugagaaucuucucucucugggcuugccagggcucuccgaaccuagcuagcauccucuucaauuccaacuagaaagcuuaccauguucguguuccuggugcugcugccucugguguccagccagugugugaaccugaccaccagaacacagcugccuccagccuacaccaacagcuuuaccagaggcguguacuaccccgacaagguguucagauccagcgugcugcacucuacccaggaccuguuccugccuuucuucagcaacgugaccugguuccacgccaucuccggcaccaauggcaccaagagauucgacaaccccgugcugcccuucaacgacgggguguacuuugccagcaccgagaaguccaacaucaucagaggcuggaucuucggcaccacacuggacagcaagacccagagccugcugaucgugaacaacgccaccaacguggucaucaaagugugcgaguuccaguucugcaacgaccccuuccugggcgucuacuaccacaagaacaacaagagcuggauggaaagcgaguuccggguguacagcagcgccaacaacugcaccuucgaguacgugucccagccuuuccugauggaccuggaaggcaagcagggcaacuucaagaaccugcgcgaguucguguuuaagaacaucgacggcuacuucaagaucuacagcaagcacaccccuaucaaccucgugcgggaucugccucagggcuucucugcucuggaaccccugguggaucugcccaucggcaucaacaucacccgguuucagacacugcuggcccugcacagaagcuaccugacaccuggcgauagcagcagcggauggacagcuggugccgccgcuuacuaugugggcuaccugcagccuagaaccuuccugcugaaguacaacgagaacggcaccaucaccgacgccguggauugugcucuggauccucugagcgagacaaagugcacccugaaguccuucaccguggaaaagggcaucuaccagaccagcaacuuccgggugcagcccaccgaauccaucgugcgguuccccaauaucaccaaucugugccccuucggcgagguguucaaugccaccagauucgccucuguguacgccuggaaccggaagcggaucagcaauugcguggccgacuacuccgugcuguacaacuccgccagcuucagcaccuucaagugcuacggcguguccccuaccaagcugaacgaccugugcuucacaaacguguacgccgacagcuucgugauccggggagaugaagugcggcagauugccccuggacagacaggcaagaucgccgacuacaacuacaagcugcccgacgacuucaccggcugugugauugccuggaacagcaacaaccuggacuccaaagucggcggcaacuacaauuaccuguuccggcuguuccggaaguccaaucugaagcccuucgagcgggacaucuccaccgagaucuaucaggccggcagcaccccuuguaacggcguggaaggcuucaacugcuacuucccacugcaguccuacggcuuucagcccacaaauggcgugggcuaucagcccuacagagugguggugcugagcuucgaacugcugcaugccccugccacagugugcggcccuaagaaaagcaccaaucucgugaagaacaaaugcgugaacuucaacuucaacggccugaccggcaccggcgugcugacagagagcaacaagaaguuccugccauuccagcaguuuggccgggauaucgccgauaccacagacgccguuagagauccccagacacuggaaauccuggacaucaccccuugcagcuucggcggagugucugugaucaccccuggcaccaacaccagcaaucagguggcagugcuguaccagggcgugaacuguaccgaagugcccguggccauucacgccgaucagcugacaccuacauggcggguguacuccaccggcagcaauguguuucagaccagagccggcugucugaucggagccgagcacgugaacaauagcuacgagugcgacauccccaucggcgcuggaaucugcgccagcuaccagacacagacaaacagcccucggagagccagaagcguggccagccagagcgugauugccuacacaaugucucugggcgccgagaacagcguggccuacuccaacaacucuaucgcuauccccaccaacuucaccaucagcgugaccacagagauccugccuguguccaugaccaagaccagcguggacugcaccauguacaucugcggcgauuccaccgagugcuccaaccugcugcugcaguacggcagcuucugcacccagcugaauagagcccugacagggaucgccguggaacaggacaagaacacccaagagguguucgcccaagugaagcagaucuacaagaccccuccuaucaaggacuucggcggcuucaauuucagccagauucugcccgauccuagcaagcccagcaagcggagcuucaucgaggaccugcuguucaacaaagugacacuggccgacgccggcuucaucaagcaguauggcgauugucugggcgacauugccgccagggaucugauuugcgcccagaaguuuaacggacugacagugcugccuccucugcugaccgaugagaugaucgcccaguacacaucugcccugcuggccggcacaaucacaagcggcuggacauuuggagcaggcgccgcucugcagauccccuuugcuaugcagauggccuaccgguucaacggcaucggagugacccagaaugugcuguacgagaaccagaagcugaucgccaaccaguucaacagcgccaucggcaagauccaggacagccugagcagcacagcaagcgcccugggaaagcugcaggacguggucaaccagaaugcccaggcacugaacacccuggucaagcagcuguccuccaacuucggcgccaucagcucugugcugaacgauauccugagcagacuggacccuccugaggccgaggugcagaucgacagacugaucacaggcagacugcagagccuccagacauacgugacccagcagcugaucagagccgccgagauuagagccucugccaaucuggccgccaccaagaugucugagugugugcugggccagagcaagagaguggacuuuugcggcaagggcuaccaccugaugagcuucccucagucugccccucacggcgugguguuucugcacgugacauaugugcccgcucaagagaagaauuucaccaccgcuccagccaucugccacgacggcaaagcccacuuuccuagagaaggcguguucguguccaacggcacccauugguucgugacacagcggaacuucuacgagccccagaucaucaccaccgacaacaccuucgugucuggcaacugcgacgucgugaucggcauugugaacaauaccguguacgacccucugcagcccgagcuggacagcuucaaagaggaacuggacaaguacuuuaagaaccacacaagccccgacguggaccugggcgauaucagcggaaucaaugccagcgucgugaacauccagaaagagaucgaccggcugaacgagguggccaagaaucugaacgagagccugaucgaccugcaagaacuggggaaguacgagcaguacaucaaguggcccugguacaucuggcugggcuuuaucgccggacugauugccaucgugaucgucacaaucaugcuguguugcaugaccagcugcuguagcugccugaagggcuguuguagcuguggcagcugcugcaaguucgacgaggacgauucugagcccgugcugaagggcgugaaacugcacuacacaugaggacuagucccuguucccagagcccacuuuuuuuucuuuuuuugaaauaaaauagccugucuuucagaucuaaaaaaaaaaaaaaaaaaaaaaaaaaaaaaaaaaaaaaaaaaaaaaaaaaaaaaaaaaaaaaaaaaaaaaaaaaaaaaaaaaaaaaaaaaaaaaaaaaaa

SEQ ID NO: 25159 - RNA, 4158 nt, Artificial Sequence
  SARS-CoV-2/Wuhan/WIV05/2019__EPI_ISL_402128 spike protein mRNA gc mod (1-1273)(K986P_V987P_K986P_V987P_H69del_V70del_Y144del_N501Y_A570 D_D614G_P681H_T716I_S982A_D1118H)
aggagagggcgcuuggcuugcaaggacccugagcugcggcauugaagcacacccaacccaacucgacugaagucagccucacugaaccggaucugagaaucuucucucucugggcuugccagggcucuccgaaccuagcuagcauccucuucaauuccaacuagaaagcuuaccauguucguguuccuggugcugcugccucugguguccagccagugugugaaccugaccaccagaacacagcugccuccagccuacaccaacagcuuuaccagaggcguguacuaccccgacaagguguucagauccagcgugcugcacucuacccaggaccuguuccugccuuucuucagcaacgugaccugguuccacgccaucuccggcaccaauggcaccaagagauucgacaaccccgugcugcccuucaacgacgggguguacuuugccagcaccgagaaguccaacaucaucagaggcuggaucuucggcaccacacuggacagcaagacccagagccugcugaucgugaacaacgccaccaacguggucaucaaagugugcgaguuccaguucugcaacgaccccuuccugggcgucuaccacaagaacaacaagagcuggauggaaagcgaguuccggguguacagcagcgccaacaacugcaccuucgaguacgugucccagccuuuccugauggaccuggaaggcaagcagggcaacuucaagaaccugcgcgaguucguguuuaagaacaucgacggcuacuucaagaucuacagcaagcacaccccuaucaaccucgugcgggaucugccucagggcuucucugcucuggaaccccugguggaucugcccaucggcaucaacaucacccgguuucagacacugcuggcccugcacagaagcuaccugacaccuggcgauagcagcagcggauggacagcuggugccgccgcuuacuaugugggcuaccugcagccuagaaccuuccugcugaaguacaacgagaacggcaccaucaccgacgccguggauugugcucuggauccucugagcgagacaaagugcacccugaaguccuucaccguggaaaagggcaucuaccagaccagcaacuuccgggugcagcccaccgaauccaucgugcgguuccccaauaucaccaaucugugccccuucggcgagguguucaaugccaccagauucgccucuguguacgccuggaaccggaagcggaucagcaauugcguggccgacuacuccgugcuguacaacuccgccagcuucagcaccuucaagugcuacggcguguccccuaccaagcugaacgaccugugcuucacaaacguguacgccgacagcuucgugauccggggagaugaagugcggcagauugccccuggacagacaggcaagaucgccgacuacaacuacaagcugcccgacgacuucaccggcugugugauugccuggaacagcaacaaccuggacuccaaagucggcggcaacuacaauuaccuguaccggcuguuccggaaguccaaucugaagcccuucgagcgggacaucuccaccgagaucuaucaggccggcagcaccccuuguaacggcguggaaggcuucaacugcuacuucccacugcaguccuacggcuuucagcccacauacggcgugggcuaucagcccuacagagugguggugcugagcuucgaacugcugcaugccccugccacagugugcggcccuaagaaaagcaccaaucucgugaagaacaaaugcgugaacuucaacuucaacggccugaccggcaccggcgugcugacagagagcaacaagaaguuccugccauuccagcaguuuggccgggauaucgacgauaccacagacgccguuagagauccccagacacuggaaauccuggacaucaccccuugcagcuucggcggagugucugugaucaccccuggcaccaacaccagcaaucagguggcagugcuguaccagggcgugaacuguaccgaagugcccguggccauucacgccgaucagcugacaccuacauggcggguguacuccaccggcagcaauguguuucagaccagagccggcugucugaucggagccgagcacgugaacaauagcuacgagugcgacauccccaucggcgcuggaaucugcgccagcuaccagacacagacaaacagccaccggagagccagaagcguggccagccagagcaucauugccuacacaaugucucugggcgccgagaacagcguggccuacuccaacaacucuaucgcuauccccaucaacuucaccaucagcgugaccacagagauccugccuguguccaugaccaagaccagcguggacugcaccauguacaucugcggcgauuccaccgagugcuccaaccugcugcugcaguacggcagcuucugcacccagcugaauagagcccugacagggaucgccguggaacaggacaagaacacccaagagguguucgcccaagugaagcagaucuacaagaccccuccuaucaaggacuucggcggcuucaauuucagccagauucugcccgauccuagcaagcccagcaagcggagcuucaucgaggaccugcuguucaacaaagugacacuggccgacgccggcuucaucaagcaguauggcgauugucugggcgacauugccgccagggaucugauuugcgcccagaaguuuaacggacugacagugcugccuccucugcugaccgaugagaugaucgcccaguacacaucugcccugcuggccggcacaaucacaagcggcuggacauuuggagcaggcgccgcucugcagauccccuuugcuaugcagauggccuaccgguucaacggcaucggagugacccagaaugugcuguacgagaaccagaagcugaucgccaaccaguucaacagcgccaucggcaagauccaggacagccugagcagcacagcaagcgcccugggaaagcugcaggacguggucaaccagaaugcccaggcacugaacacccuggucaagcagcuguccuccaacuucggcgccaucagcucugugcugaacgauauccuggccagacuggacccuccugaggccgaggugcagaucgacagacugaucacaggcagacugcagagccuccagacauacgugacccagcagcugaucagagccgccgagauuagagccucugccaaucuggccgccaccaagaugucugagugugugcugggccagagcaagagaguggacuuuugcggcaagggcuaccaccugaugagcuucccucagucugccccucacggcgugguguuucugcacgugacauaugugcccgcucaagagaagaauuucaccaccgcuccagccaucugccacgacggcaaagcccacuuuccuagagaaggcguguucguguccaacggcacccauugguucgugacacagcggaacuucuacgagccccagaucaucaccacccacaacaccuucgugucuggcaacugcgacgucgugaucggcauugugaacaauaccguguacgacccucugcagcccgagcuggacagcuucaaagaggaacuggacaaguacuuuaagaaccacacaagccccgacguggaccugggcgauaucagcggaaucaaugccagcgucgugaacauccagaaagagaucgaccggcugaacgagguggccaagaaucugaacgagagccugaucgaccugcaagaacuggggaaguacgagcaguacaucaaguggcccugguacaucuggcugggcuuuaucgccggacugauugccaucgugauggucacaaucaugcuguguugcaugaccagcugcuguagcugccugaagggcuguuguagcuguggcagcugcugcaaguucgacgaggacgauucugagcccgugcugaagggcgugaaacugcacuacacaugaggacuagucccuguucccagagcccacuuuuuuuucuuuuuuugaaauaaaauagccugucuuucagaucuaaaaaaaaaaaaaaaaaaaaaaaaaaaaaaaaaaaaaaaaaaaaaaaaaaaaaaaaaaaaaaaaaaaaaaaaaaaaaaaaaaaaaaaaaaaaaaaaaaaa

SEQ ID NO: 25160 - RNA, 4167 nt, Artificial Sequence
  SARS-CoV-2/Wuhan/WIV05/2019__EPI_ISL_402128 spike protein mRNA gc mod (1-1273)(K986P_V987P_K986P_V987P_K417N_E484K_N501Y_D614G)
aggagagggcgcuuggcuugcaaggacccugagcugcggcauugaagcacacccaacccaacucgacugaagucagccucacugaaccggaucugagaaucuucucucucugggcuugccagggcucuccgaaccuagcuagcauccucuucaauuccaacuagaaagcuuaccauguucguguuccuggugcugcugccucugguguccagccagugugugaaccugaccaccagaacacagcugccuccagccuacaccaacagcuuuaccagaggcguguacuaccccgacaagguguucagauccagcgugcugcacucuacccaggaccuguuccugccuuucuucagcaacgugaccugguuccacgccauccacguguccggcaccaauggcaccaagagauucgacaaccccgugcugcccuucaacgacgggguguacuuugccagcaccgagaaguccaacaucaucagaggcuggaucuucggcaccacacuggacagcaagacccagagccugcugaucgugaacaacgccaccaacguggucaucaaagugugcgaguuccaguucugcaacgaccccuuccugggcgucuacuaccacaagaacaacaagagcuggauggaaagcgaguuccggguguacagcagcgccaacaacugcaccuucgaguacgugucccagccuuuccugauggaccuggaaggcaagcagggcaacuucaagaaccugcgcgaguucguguuuaagaacaucgacggcuacuucaagaucuacagcaagcacaccccuaucaaccucgugcgggaucugccucagggcuucucugcucuggaaccccugguggaucugcccaucggcaucaacaucacccgguuucagacacugcuggcccugcacagaagcuaccugacaccuggcgauagcagcagcggauggacagcuggugccgccgcuuacuaugugggcuaccugcagccuagaaccuuccugcugaaguacaacgagaacggcaccaucaccgacgccguggauugugcucuggauccucugagcgagacaaagugcacccugaaguccuucaccguggaaaagggcaucuaccagaccagcaacuuccgggugcagcccaccgaauccaucgugcgguuccccaauaucaccaaucugugccccuucggcgagguguucaaugccaccagauucgccucuguguacgccuggaaccggaagcggaucagcaauugcguggccgacuacuccgugcuguacaacuccgccagcuucagcaccuucaagugcuacggcguguccccuaccaagcugaacgaccugugcuucacaaacguguacgccgacagcuucgugauccggggagaugaagugcggcagauugccccuggacagacaggcaacaucgccgacuacaacuacaagcugcccgacgacuucaccggcugugugauugccuggaacagcaacaaccuggacuccaaagucggcggcaacuacaauuaccuguaccggcuguuccggaaguccaaucugaagcccuucgagcgggacaucuccaccgagaucuaucaggccggcagcaccccuuguaacggcgugaagggcuucaacugcuacuucccacugcaguccuacggcuuucagcccacauacggcgugggcuaucagcccuacagagugguggugcugagcuucgaacugcugcaugccccugccacagugugcggcccuaagaaaagcaccaaucucgugaagaacaaaugcgugaacuucaacuucaacggccugaccggcaccggcgugcugacagagagcaacaagaaguuccugccauuccagcaguuuggccgggauaucgccgauaccacagacgccguuagagauccccagacacuggaaauccuggacaucaccccuugcagcuucggcggagugucugugaucaccccuggcaccaacaccagcaaucagguggcagugcuguaccagggcgugaacuguaccgaagugcccguggccauucacgccgaucagcugacaccuacauggcggguguacuccaccggcagcaauguguuucagaccagagccggcugucugaucggagccgagcacgugaacaauagcuacgagugcgacauccccaucggcgcuggaaucugcgccagcuaccagacacagacaaacagcccucggagagccagaagcguggccagccagagcaucauugccuacacaaugucucugggcgccgagaacagcguggccuacuccaacaacucuaucgcuauccccaccaacuucaccaucagcgugaccacagagauccugccuguguccaugaccaagaccagcguggacugcaccauguacaucugcggcgauuccaccgagugcuccaaccugcugcugcaguacggcagcuucugcacccagcugaauagagcccugacagggaucgccguggaacaggacaagaacacccaagagguguucgcccaagugaagcagaucuacaagaccccuccuaucaaggacuucggcggcuucaauuucagccagauucugcccgauccuagcaagcccagcaagcggagcuucaucgaggaccugcuguucaacaaagugacacuggccgacgccggcuucaucaagcaguauggcgauugucugggcgacauugccgccagggaucugauuugcgcccagaaguuuaacggacugacagugcugccuccucugcugaccgaugagaugaucgcccaguacacaucugcccugcuggccggcacaaucacaagcggcuggacauuuggagcaggcgccgcucugcagauccccuuugcuaugcagauggccuaccgguucaacggcaucggagugacccagaaugugcuguacgagaaccagaagcugaucgccaaccaguucaacagcgccaucggcaagauccaggacagccugagcagcacagcaagcgcccugggaaagcugcaggacguggucaaccagaaugcccaggcacugaacacccuggucaagcagcuguccuccaacuucggcgccaucagcucugugcugaacgauauccugagcagacuggacccuccugaggccgaggugcagaucgacagacugaucacaggcagacugcagagccuccagacauacgugacccagcagcugaucagagccgccgagauuagagccucugccaaucuggccgccaccaagaugucugagugugugcugggccagagcaagagaguggacuuuugcggcaagggcuaccaccugaugagcuucccucagucugccccucacggcgugguguuucugcacgugacauaugugcccgcucaagagaagaauuucaccaccgcuccagccaucugccacgacggcaaagcccacuuuccuagagaaggcguguucguguccaacggcacccauugguucgugacacagcggaacuucuacgagccccagaucaucaccaccgacaacaccuucgugucuggcaacugcgacgucgugaucggcauugugaacaauaccguguacgacccucugcagcccgagcuggacagcuucaaagaggaacuggacaaguacuuuaagaaccacacaagccccgacguggaccugggcgauaucagcggaaucaaugccagcgucgugaacauccagaaagagaucgaccggcugaacgagguggccaagaaucugaacgagagccugaucgaccugcaagaacuggggaaguacgagcaguacaucaaguggcccugguacaucuggcugggcuuuaucgccggacugauugccaucgugauggucacaaucaugcuguguugcaugaccagcugcuguagcugccugaagggcuguuguagcuguggcagcugcugcaaguucgacgaggacgauucugagcccgugcugaagggcgugaaacugcacuacacaugaggacuagucccuguucccagagcccacuuuuuuuucuuuuuuugaaauaaaauagccugucuuucagaucuaaaaaaaaaaaaaaaaaaaaaaaaaaaaaaaaaaaaaaaaaaaaaaaaaaaaaaaaaaaaaaaaaaaaaaaaaaaaaaaaaaaaaaaaaaaaaaaaaaaa

SEQ ID NO: 25161 - RNA, 4158 nt, Artificial Sequence
  SARS-CoV-2/Wuhan/WIV05/2019__EPI_ISL_402128 spike protein mRNA gc mod (1-1273)(K986P_V987P_K986P_V987P_L18F_D80A_D215G_L242del_A243del_ L244del_R246I_K417N_E484K_N501Y_D614G_A701V)
aggagagggcgcuuggcuugcaaggacccugagcugcggcauugaagcacacccaacccaacucgacugaagucagccucacugaaccggaucugagaaucuucucucucugggcuugccagggcucuccgaaccuagcuagcauccucuucaauuccaacuagaaagcuuaccauguucguguuccuggugcugcugccucugguguccagccagugugugaacuucaccaccagaacacagcugccuccagccuacaccaacagcuuuaccagaggcguguacuaccccgacaagguguucagauccagcgugcugcacucuacccaggaccuguuccugccuuucuucagcaacgugaccugguuccacgccauccacguguccggcaccaauggcaccaagagauucgccaaccccgugcugcccuucaacgacgggguguacuuugccagcaccgagaaguccaacaucaucagaggcuggaucuucggcaccacacuggacagcaagacccagagccugcugaucgugaacaacgccaccaacguggucaucaaagugugcgaguuccaguucugcaacgaccccuuccugggcgucuacuaccacaagaacaacaagagcuggauggaaagcgaguuccggguguacagcagcgccaacaacugcaccuucgaguacgugucccagccuuuccugauggaccuggaaggcaagcagggcaacuucaagaaccugcgcgaguucguguuuaagaacaucgacggcuacuucaagaucuacagcaagcacaccccuaucaaccucgugcggggccugccucagggcuucucugcucuggaaccccugguggaucugcccaucggcaucaacaucacccgguuucagacacugcacaucagcuaccugacaccuggcgauagcagcagcggauggacagcuggugccgccgcuuacuaugugggcuaccugcagccuagaaccuuccugcugaaguacaacgagaacggcaccaucaccgacgccguggauugugcucuggauccucugagcgagacaaagugcacccugaaguccuucaccguggaaaagggcaucuaccagaccagcaacuuccgggugcagcccaccgaauccaucgugcgguuccccaauaucaccaaucugugccccuucggcgagguguucaaugccaccagauucgccucuguguacgccuggaaccggaagcggaucagcaauugcguggccgacuacuccgugcuguacaacuccgccagcuucagcaccuucaagugcuacggcguguccccuaccaagcugaacgaccugugcuucacaaacguguacgccgacagcuucgugauccggggagaugaagugcggcagauugccccuggacagacaggcaacaucgccgacuacaacuacaagcugcccgacgacuucaccggcugugugauugccuggaacagcaacaaccuggacuccaaagucggcggcaacuacaauuaccuguaccggcuguuccggaaguccaaucugaagcccuucgagcgggacaucuccaccgagaucuaucaggccggcagcaccccuuguaacggcgugaagggcuucaacugcuacuucccacugcaguccuacggcuuucagcccacauacggcgugggcuaucagcccuacagagugguggugcugagcuucgaacugcugcaugccccugccacagugugcggcccuaagaaaagcaccaaucucgugaagaacaaaugcgugaacuucaacuucaacggccugaccggcaccggcgugcugacagagagcaacaagaaguuccugccauuccagcaguuuggccgggauaucgccgauaccacagacgccguuagagauccccagacacuggaaauccuggacaucaccccuugcagcuucggcggagugucugugaucaccccuggcaccaacaccagcaaucagguggcagugcuguaccagggcgugaacuguaccgaagugcccguggccauucacgccgaucagcugacaccuacauggcggguguacuccaccggcagcaauguguuucagaccagagccggcugucugaucggagccgagcacgugaacaauagcuacgagugcgacauccccaucggcgcuggaaucugcgccagcuaccagacacagacaaacagcccucggagagccagaagcguggccagccagagcaucauugccuacacaaugucucugggcguggagaacagcguggccuacuccaacaacucuaucgcuauccccaccaacuucaccaucagcgugaccacagagauccugccuguguccaugaccaagaccagcguggacugcaccauguacaucugcggcgauuccaccgagugcuccaaccugcugcugcaguacggcagcuucugcacccagcugaauagagcccugacagggaucgccguggaacaggacaagaacacccaagagguguucgcccaagugaagcagaucuacaagaccccuccuaucaaggacuucggcggcuucaauuucagccagauucugcccgauccuagcaagcccagcaagcggagcuucaucgaggaccugcuguucaacaaagugacacuggccgacgccggcuucaucaagcaguauggcgauugucugggcgacauugccgccagggaucugauuugcgcccagaaguuuaacggacugacagugcugccuccucugcugaccgaugagaugaucgcccaguacacaucugcccugcuggccggcacaaucacaagcggcuggacauuuggagcaggcgccgcucugcagauccccuuugcuaugcagauggccuaccgguucaacggcaucggagugacccagaaugugcuguacgagaaccagaagcugaucgccaaccaguucaacagcgccaucggcaagauccaggacagccugagcagcacagcaagcgcccugggaaagcugcaggacguggucaaccagaaugcccaggcacugaacacccuggucaagcagcuguccuccaacuucggcgccaucagcucugugcugaacgauauccugagcagacuggacccuccugaggccgaggugcagaucgacagacugaucacaggcagacugcagagccuccagacauacgugacccagcagcugaucagagccgccgagauuagagccucugccaaucuggccgccaccaagaugucugagugugugcugggccagagcaagagaguggacuuuugcggcaagggcuaccaccugaugagcuucccucagucugccccucacggcgugguguuucugcacgugacauaugugcccgcucaagagaagaauuucaccaccgcuccagccaucugccacgacggcaaagcccacuuuccuagagaaggcguguucguguccaacggcacccauugguucgugacacagcggaacuucuacgagccccagaucaucaccaccgacaacaccuucgugucuggcaacugcgacgucgugaucggcauugugaacaauaccguguacgacccucugcagcccgagcuggacagcuucaaagaggaacuggacaaguacuuuaagaaccacacaagccccgacguggaccugggcgauaucagcggaaucaaugccagcgucgugaacauccagaaagagaucgaccggcugaacgagguggccaagaaucugaacgagagccugaucgaccugcaagaacuggggaaguacgagcaguacaucaaguggcccugguacaucuggcugggcuuuaucgccggacugauugccaucgugauggucacaaucaugcuguguugcaugaccagcugcuguagcugccugaagggcuguuguagcuguggcagcugcugcaaguucgacgaggacgauucugagcccgugcugaagggcgugaaacugcacuacacaugaggacuagucccuguucccagagcccacuuuuuuuucuuuuuuugaaauaaaauagccugucuuucagaucuaaaaaaaaaaaaaaaaaaaaaaaaaaaaaaaaaaaaaaaaaaaaaaaaaaaaaaaaaaaaaaaaaaaaaaaaaaaaaaaaaaaaaaaaaaaaaaaaaaaa

SEQ ID NO: 25162 - RNA, 4167 nt, Artificial Sequence
  SARS-CoV-2/Wuhan/WIV05/2019__EPI_ISL_402128 spike protein mRNA gc mod (1-1273)(K986P_V987P_K986P_V987P_E484K_D614G)
aggagagggcgcuuggcuugcaaggacccugagcugcggcauugaagcacacccaacccaacucgacugaagucagccucacugaaccggaucugagaaucuucucucucugggcuugccagggcucuccgaaccuagcuagcauccucuucaauuccaacuagaaagcuuaccauguucguguuccuggugcugcugccucugguguccagccagugugugaaccugaccaccagaacacagcugccuccagccuacaccaacagcuuuaccagaggcguguacuaccccgacaagguguucagauccagcgugcugcacucuacccaggaccuguuccugccuuucuucagcaacgugaccugguuccacgccauccacguguccggcaccaauggcaccaagagauucgacaaccccgugcugcccuucaacgacgggguguacuuugccagcaccgagaaguccaacaucaucagaggcuggaucuucggcaccacacuggacagcaagacccagagccugcugaucgugaacaacgccaccaacguggucaucaaagugugcgaguuccaguucugcaacgaccccuuccugggcgucuacuaccacaagaacaacaagagcuggauggaaagcgaguuccggguguacagcagcgccaacaacugcaccuucgaguacgugucccagccuuuccugauggaccuggaaggcaagcagggcaacuucaagaaccugcgcgaguucguguuuaagaacaucgacggcuacuucaagaucuacagcaagcacaccccuaucaaccucgugcgggaucugccucagggcuucucugcucuggaaccccugguggaucugcccaucggcaucaacaucacccgguuucagacacugcuggcccugcacagaagcuaccugacaccuggcgauagcagcagcggauggacagcuggugccgccgcuuacuaugugggcuaccugcagccuagaaccuuccugcugaaguacaacgagaacggcaccaucaccgacgccguggauugugcucuggauccucugagcgagacaaagugcacccugaaguccuucaccguggaaaagggcaucuaccagaccagcaacuuccgggugcagcccaccgaauccaucgugcgguuccccaauaucaccaaucugugccccuucggcgagguguucaaugccaccagauucgccucuguguacgccuggaaccggaagcggaucagcaauugcguggccgacuacuccgugcuguacaacuccgccagcuucagcaccuucaagugcuacggcguguccccuaccaagcugaacgaccugugcuucacaaacguguacgccgacagcuucgugauccggggagaugaagugcggcagauugccccuggacagacaggcaagaucgccgacuacaacuacaagcugcccgacgacuucaccggcugugugauugccuggaacagcaacaaccuggacuccaaagucggcggcaacuacaauuaccuguaccggcuguuccggaaguccaaucugaagcccuucgagcgggacaucuccaccgagaucuaucaggccggcagcaccccuuguaacggcgugaagggcuucaacugcuacuucccacugcaguccuacggcuuucagcccacaaauggcgugggcuaucagcccuacagagugguggugcugagcuucgaacugcugcaugccccugccacagugugcggcccuaagaaaagcaccaaucucgugaagaacaaaugcgugaacuucaacuucaacggccugaccggcaccggcgugcugacagagagcaacaagaaguuccugccauuccagcaguuuggccgggauaucgccgauaccacagacgccguuagagauccccagacacuggaaauccuggacaucaccccuugcagcuucggcggagugucugugaucaccccuggcaccaacaccagcaaucagguggcagugcuguaccagggcgugaacuguaccgaagugcccguggccauucacgccgaucagcugacaccuacauggcggguguacuccaccggcagcaauguguuucagaccagagccggcugucugaucggagccgagcacgugaacaauagcuacgagugcgacauccccaucggcgcuggaaucugcgccagcuaccagacacagacaaacagcccucggagagccagaagcguggccagccagagcaucauugccuacacaaugucucugggcgccgagaacagcguggccuacuccaacaacucuaucgcuauccccaccaacuucaccaucagcgugaccacagagauccugccuguguccaugaccaagaccagcguggacugcaccauguacaucugcggcgauuccaccgagugcuccaaccugcugcugcaguacggcagcuucugcacccagcugaauagagcccugacagggaucgccguggaacaggacaagaacacccaagagguguucgcccaagugaagcagaucuacaagaccccuccuaucaaggacuucggcggcuucaauuucagccagauucugcccgauccuagcaagcccagcaagcggagcuucaucgaggaccugcuguucaacaaagugacacuggccgacgccggcuucaucaagcaguauggcgauugucugggcgacauugccgccagggaucugauuugcgcccagaaguuuaacggacugacagugcugccuccucugcugaccgaugagaugaucgcccaguacacaucugcccugcuggccggcacaaucacaagcggcuggacauuuggagcaggcgccgcucugcagauccccuuugcuaugcagauggccuaccgguucaacggcaucggagugacccagaaugugcuguacgagaaccagaagcugaucgccaaccaguucaacagcgccaucggcaagauccaggacagccugagcagcacagcaagcgcccugggaaagcugcaggacguggucaaccagaaugcccaggcacugaacacccuggucaagcagcuguccuccaacuucggcgccaucagcucugugcugaacgauauccugagcagacuggacccuccugaggccgaggugcagaucgacagacugaucacaggcagacugcagagccuccagacauacgugacccagcagcugaucagagccgccgagauuagagccucugccaaucuggccgccaccaagaugucugagugugugcugggccagagcaagagaguggacuuuugcggcaagggcuaccaccugaugagcuucccucagucugccccucacggcgugguguuucugcacgugacauaugugcccgcucaagagaagaauuucaccaccgcuccagccaucugccacgacggcaaagcccacuuuccuagagaaggcguguucguguccaacggcacccauugguucgugacacagcggaacuucuacgagccccagaucaucaccaccgacaacaccuucgugucuggcaacugcgacgucgugaucggcauugugaacaauaccguguacgacccucugcagcccgagcuggacagcuucaaagaggaacuggacaaguacuuuaagaaccacacaagccccgacguggaccugggcgauaucagcggaaucaaugccagcgucgugaacauccagaaagagaucgaccggcugaacgagguggccaagaaucugaacgagagccugaucgaccugcaagaacuggggaaguacgagcaguacaucaaguggcccugguacaucuggcugggcuuuaucgccggacugauugccaucgugauggucacaaucaugcuguguugcaugaccagcugcuguagcugccugaagggcuguuguagcuguggcagcugcugcaaguucgacgaggacgauucugagcccgugcugaagggcgugaaacugcacuacacaugaggacuagucccuguucccagagcccacuuuuuuuucuuuuuuugaaauaaaauagccugucuuucagaucuaaaaaaaaaaaaaaaaaaaaaaaaaaaaaaaaaaaaaaaaaaaaaaaaaaaaaaaaaaaaaaaaaaaaaaaaaaaaaaaaaaaaaaaaaaaaaaaaaaaa

SEQ ID NO: 25163 - RNA, 4167 nt, Artificial Sequence
  SARS-CoV-2/Wuhan/WIV05/2019__EPI_ISL_402128 spike protein mRNA gc mod (1-1273)(K986P_V987P_K986P_V987P_L18F_T20N_P26S_D138Y_R190S_K417T _E484K_N501Y_D614G_H655Y_T1027I)
aggagagggcgcuuggcuugcaaggacccugagcugcggcauugaagcacacccaacccaacucgacugaagucagccucacugaaccggaucugagaaucuucucucucugggcuugccagggcucuccgaaccuagcuagcauccucuucaauuccaacuagaaagcuuaccauguucguguuccuggugcugcugccucugguguccagccagugugugaacuucaccaacagaacacagcugccuagcgccuacaccaacagcuuuaccagaggcguguacuaccccgacaagguguucagauccagcgugcugcacucuacccaggaccuguuccugccuuucuucagcaacgugaccugguuccacgccauccacguguccggcaccaauggcaccaagagauucgacaaccccgugcugcccuucaacgacgggguguacuuugccagcaccgagaaguccaacaucaucagaggcuggaucuucggcaccacacuggacagcaagacccagagccugcugaucgugaacaacgccaccaacguggucaucaaagugugcgaguuccaguucugcaacuaccccuuccugggcgucuacuaccacaagaacaacaagagcuggauggaaagcgaguuccggguguacagcagcgccaacaacugcaccuucgaguacgugucccagccuuuccugauggaccuggaaggcaagcagggcaacuucaagaaccugagcgaguucguguuuaagaacaucgacggcuacuucaagaucuacagcaagcacaccccuaucaaccucgugcgggaucugccucagggcuucucugcucuggaaccccugguggaucugcccaucggcaucaacaucacccgguuucagacacugcuggcccugcacagaagcuaccugacaccuggcgauagcagcagcggauggacagcuggugccgccgcuuacuaugugggcuaccugcagccuagaaccuuccugcugaaguacaacgagaacggcaccaucaccgacgccguggauugugcucuggauccucugagcgagacaaagugcacccugaaguccuucaccguggaaaagggcaucuaccagaccagcaacuuccgggugcagcccaccgaauccaucgugcgguuccccaauaucaccaaucugugccccuucggcgagguguucaaugccaccagauucgccucuguguacgccuggaaccggaagcggaucagcaauugcguggccgacuacuccgugcuguacaacuccgccagcuucagcaccuucaagugcuacggcguguccccuaccaagcugaacgaccugugcuucacaaacguguacgccgacagcuucgugauccggggagaugaagugcggcagauugccccuggacagacaggcaccaucgccgacuacaacuacaagcugcccgacgacuucaccggcugugugauugccuggaacagcaacaaccuggacuccaaagucggcggcaacuacaauuaccuguaccggcuguuccggaaguccaaucugaagcccuucgagcgggacaucuccaccgagaucuaucaggccggcagcaccccuuguaacggcgugaagggcuucaacugcuacuucccacugcaguccuacggcuuucagcccacauacggcgugggcuaucagcccuacagagugguggugcugagcuucgaacugcugcaugccccugccacagugugcggcccuaagaaaagcaccaaucucgugaagaacaaaugcgugaacuucaacuucaacggccugaccggcaccggcgugcugacagagagcaacaagaaguuccugccauuccagcaguuuggccgggauaucgccgauaccacagacgccguuagagauccccagacacuggaaauccuggacaucaccccuugcagcuucggcggagugucugugaucaccccuggcaccaacaccagcaaucagguggcagugcuguaccagggcgugaacuguaccgaagugcccguggccauucacgccgaucagcugacaccuacauggcggguguacuccaccggcagcaauguguuucagaccagagccggcugucugaucggagccgaguacgugaacaauagcuacgagugcgacauccccaucggcgcuggaaucugcgccagcuaccagacacagacaaacagcccucggagagccagaagcguggccagccagagcaucauugccuacacaaugucucugggcgccgagaacagcguggccuacuccaacaacucuaucgcuauccccaccaacuucaccaucagcgugaccacagagauccugccuguguccaugaccaagaccagcguggacugcaccauguacaucugcggcgauuccaccgagugcuccaaccugcugcugcaguacggcagcuucugcacccagcugaauagagcccugacagggaucgccguggaacaggacaagaacacccaagagguguucgcccaagugaagcagaucuacaagaccccuccuaucaaggacuucggcggcuucaauuucagccagauucugcccgauccuagcaagcccagcaagcggagcuucaucgaggaccugcuguucaacaaagugacacuggccgacgccggcuucaucaagcaguauggcgauugucugggcgacauugccgccagggaucugauuugcgcccagaaguuuaacggacugacagugcugccuccucugcugaccgaugagaugaucgcccaguacacaucugcccugcuggccggcacaaucacaagcggcuggacauuuggagcaggcgccgcucugcagauccccuuugcuaugcagauggccuaccgguucaacggcaucggagugacccagaaugugcuguacgagaaccagaagcugaucgccaaccaguucaacagcgccaucggcaagauccaggacagccugagcagcacagcaagcgcccugggaaagcugcaggacguggucaaccagaaugcccaggcacugaacacccuggucaagcagcuguccuccaacuucggcgccaucagcucugugcugaacgauauccugagcagacuggacccuccugaggccgaggugcagaucgacagacugaucacaggcagacugcagagccuccagacauacgugacccagcagcugaucagagccgccgagauuagagccucugccaaucuggccgccaucaagaugucugagugugugcugggccagagcaagagaguggacuuuugcggcaagggcuaccaccugaugagcuucccucagucugccccucacggcgugguguuucugcacgugacauaugugcccgcucaagagaagaauuucaccaccgcuccagccaucugccacgacggcaaagcccacuuuccuagagaaggcguguucguguccaacggcacccauugguucgugacacagcggaacuucuacgagccccagaucaucaccaccgacaacaccuucgugucuggcaacugcgacgucgugaucggcauugugaacaauaccguguacgacccucugcagcccgagcuggacagcuucaaagaggaacuggacaaguacuuuaagaaccacacaagccccgacguggaccugggcgauaucagcggaaucaaugccagcgucgugaacauccagaaagagaucgaccggcugaacgagguggccaagaaucugaacgagagccugaucgaccugcaagaacuggggaaguacgagcaguacaucaaguggcccugguacaucuggcugggcuuuaucgccggacugauugccaucgugauggucacaaucaugcuguguugcaugaccagcugcuguagcugccugaagggcuguuguagcuguggcagcugcugcaaguucgacgaggacgauucugagcccgugcugaagggcgugaaacugcacuacacaugaggacuagucccuguucccagagcccacuuuuuuuucuuuuuuugaaauaaaauagccugucuuucagaucuaaaaaaaaaaaaaaaaaaaaaaaaaaaaaaaaaaaaaaaaaaaaaaaaaaaaaaaaaaaaaaaaaaaaaaaaaaaaaaaaaaaaaaaaaaaaaaaaaaaa

SEQ ID NO: 25164 - RNA, 4167 nt, Artificial Sequence
  SARS-CoV-2/Wuhan/WIV05/2019__EPI_ISL_402128 spike protein mRNA gc mod (1-1273)(K986P_V987P_K986P_V987P_S13I_W152C_L452R_D614G)
aggagagggcgcuuggcuugcaaggacccugagcugcggcauugaagcacacccaacccaacucgacugaagucagccucacugaaccggaucugagaaucuucucucucugggcuugccagggcucuccgaaccuagcuagcauccucuucaauuccaacuagaaagcuuaccauguucguguuccuggugcugcugccucugguguccauccagugugugaaccugaccaccagaacacagcugccuccagccuacaccaacagcuuuaccagaggcguguacuaccccgacaagguguucagauccagcgugcugcacucuacccaggaccuguuccugccuuucuucagcaacgugaccugguuccacgccauccacguguccggcaccaauggcaccaagagauucgacaaccccgugcugcccuucaacgacgggguguacuuugccagcaccgagaaguccaacaucaucagaggcuggaucuucggcaccacacuggacagcaagacccagagccugcugaucgugaacaacgccaccaacguggucaucaaagugugcgaguuccaguucugcaacgaccccuuccugggcgucuacuaccacaagaacaacaagagcugcauggaaagcgaguuccggguguacagcagcgccaacaacugcaccuucgaguacgugucccagccuuuccugauggaccuggaaggcaagcagggcaacuucaagaaccugcgcgaguucguguuuaagaacaucgacggcuacuucaagaucuacagcaagcacaccccuaucaaccucgugcgggaucugccucagggcuucucugcucuggaaccccugguggaucugcccaucggcaucaacaucacccgguuucagacacugcuggcccugcacagaagcuaccugacaccuggcgauagcagcagcggauggacagcuggugccgccgcuuacuaugugggcuaccugcagccuagaaccuuccugcugaaguacaacgagaacggcaccaucaccgacgccguggauugugcucuggauccucugagcgagacaaagugcacccugaaguccuucaccguggaaaagggcaucuaccagaccagcaacuuccgggugcagcccaccgaauccaucgugcgguuccccaauaucaccaaucugugccccuucggcgagguguucaaugccaccagauucgccucuguguacgccuggaaccggaagcggaucagcaauugcguggccgacuacuccgugcuguacaacuccgccagcuucagcaccuucaagugcuacggcguguccccuaccaagcugaacgaccugugcuucacaaacguguacgccgacagcuucgugauccggggagaugaagugcggcagauugccccuggacagacaggcaagaucgccgacuacaacuacaagcugcccgacgacuucaccggcugugugauugccuggaacagcaacaaccuggacuccaaagucggcggcaacuacaauuaccgcuaccggcuguuccggaaguccaaucugaagcccuucgagcgggacaucuccaccgagaucuaucaggccggcagcaccccuuguaacggcguggaaggcuucaacugcuacuucccacugcaguccuacggcuuucagcccacaaauggcgugggcuaucagcccuacagagugguggugcugagcuucgaacugcugcaugccccugccacagugugcggcccuaagaaaagcaccaaucucgugaagaacaaaugcgugaacuucaacuucaacggccugaccggcaccggcgugcugacagagagcaacaagaaguuccugccauuccagcaguuuggccgggauaucgccgauaccacagacgccguuagagauccccagacacuggaaauccuggacaucaccccuugcagcuucggcggagugucugugaucaccccuggcaccaacaccagcaaucagguggcagugcuguaccagggcgugaacuguaccgaagugcccguggccauucacgccgaucagcugacaccuacauggcggguguacuccaccggcagcaauguguuucagaccagagccggcugucugaucggagccgagcacgugaacaauagcuacgagugcgacauccccaucggcgcuggaaucugcgccagcuaccagacacagacaaacagcccucggagagccagaagcguggccagccagagcaucauugccuacacaaugucucugggcgccgagaacagcguggccuacuccaacaacucuaucgcuauccccaccaacuucaccaucagcgugaccacagagauccugccuguguccaugaccaagaccagcguggacugcaccauguacaucugcggcgauuccaccgagugcuccaaccugcugcugcaguacggcagcuucugcacccagcugaauagagcccugacagggaucgccguggaacaggacaagaacacccaagagguguucgcccaagugaagcagaucuacaagaccccuccuaucaaggacuucggcggcuucaauuucagccagauucugcccgauccuagcaagcccagcaagcggagcuucaucgaggaccugcuguucaacaaagugacacuggccgacgccggcuucaucaagcaguauggcgauugucugggcgacauugccgccagggaucugauuugcgcccagaaguuuaacggacugacagugcugccuccucugcugaccgaugagaugaucgcccaguacacaucugcccugcuggccggcacaaucacaagcggcuggacauuuggagcaggcgccgcucugcagauccccuuugcuaugcagauggccuaccgguucaacggcaucggagugacccagaaugugcuguacgagaaccagaagcugaucgccaaccaguucaacagcgccaucggcaagauccaggacagccugagcagcacagcaagcgcccugggaaagcugcaggacguggucaaccagaaugcccaggcacugaacacccuggucaagcagcuguccuccaacuucggcgccaucagcucugugcugaacgauauccugagcagacuggacccuccugaggccgaggugcagaucgacagacugaucacaggcagacugcagagccuccagacauacgugacccagcagcugaucagagccgccgagauuagagccucugccaaucuggccgccaccaagaugucugagugugugcugggccagagcaagagaguggacuuuugcggcaagggcuaccaccugaugagcuucccucagucugccccucacggcgugguguuucugcacgugacauaugugcccgcucaagagaagaauuucaccaccgcuccagccaucugccacgacggcaaagcccacuuuccuagagaaggcguguucguguccaacggcacccauugguucgugacacagcggaacuucuacgagccccagaucaucaccaccgacaacaccuucgugucuggcaacugcgacgucgugaucggcauugugaacaauaccguguacgacccucugcagcccgagcuggacagcuucaaagaggaacuggacaaguacuuuaagaaccacacaagccccgacguggaccugggcgauaucagcggaaucaaugccagcgucgugaacauccagaaagagaucgaccggcugaacgagguggccaagaaucugaacgagagccugaucgaccugcaagaacuggggaaguacgagcaguacaucaaguggcccugguacaucuggcugggcuuuaucgccggacugauugccaucgugauggucacaaucaugcuguguugcaugaccagcugcuguagcugccugaagggcuguuguagcuguggcagcugcugcaaguucgacgaggacgauucugagcccgugcugaagggcgugaaacugcacuacacaugaggacuagucccuguucccagagcccacuuuuuuuucuuuuuuugaaauaaaauagccugucuuucagaucuaaaaaaaaaaaaaaaaaaaaaaaaaaaaaaaaaaaaaaaaaaaaaaaaaaaaaaaaaaaaaaaaaaaaaaaaaaaaaaaaaaaaaaaaaaaaaaaaaaaa

SEQ ID NO: 25165 - RNA, 1435 nt, Artificial Sequence
  SARS-CoV-2/Wuhan/WIV05/2019__EPI_ISL_402128 spike protein mRNA gc (1-15,334-528) Ferritin construct
aggagacccgugacccggaaguuguacggcuacgcgacuuucccucccacaaacccucgcgcccuuccuuuccuacuugggcccggcagaaagcuuaccauguucguguuccugguccuccugccccuggugagcucccagugcaaccugugccccuucggcgagguguucaacgccacccgguucgccagcgucuacgccuggaaccgcaagcggaucuccaacugcguggcggacuacagcgugcuguacaacuccgccagcuucuccacguucaagugcuacggcgucagccccaccaagcucaacgaccugugcuucaccaacguguacgccgacuccuucgugauccgcggggacgagguccggcagaucgcccccggccagaccgggaagaucgccgacuacaacuacaagcugccggacgacuucacgggcugcgugaucgcguggaacagcaacaaccucgacuccaaggucgggggcaacuacaacuaccuguaccgccuguuccgcaagagcaaccucaagcccuucgagcgggacaucuccaccgagaucuaccaggccggcagcacccccugcaacgggguggagggcuucaacugcuacuucccccugcaguccuacggguuccagccgaccaacggcgugggguaccagcccuaccggguggucgugcugagcuucgagcuccugcacgcccccgccacggugugcggccccaagggcggggguggaagcggcggggguggaagugacaucaucaagcuccugaacgagcaggucaacaaggagaugcaguccagcaaccuguacauguccaugagcuccuggugcuacacccacagccucgacggcgccgggcuguuccuguucgaccacgccgcggaggaguacgagcacgccaagaagcucaucaucuuccugaacgagaacaacgugcccgugcagcugaccuccaucagcgccccggagcacaaguucgagggccucacgcagaucuuccagaaggccuacgagcacgagcagcacaucuccgagagcaucaacaacaucguggaccacgccaucaaguccaaggaccacgcgaccuucaacuuccugcagugguacgucgccgagcagcacgaggaggaggugcuguucaaggacauccucgacaagaucgagcugaucgggaacgagaaccacggccuguaccucgccgaccaguacgugaaggggaucgccaagagccgcaaguccugaggacuaguguccaccugucccuccugggcugcuggauugucucguuuuccugccaaauaaacaggaucagcgcuuuacagaucuaaaaaaaaaaaaaaaaaaaaaaaaaaaaaaaaaaaaaaaaaaaaaaaaaaaaaaaaaaaaaaaaaaaaaaaaaaaaaaaaaaaaaaaaaaaaaaaaaaaa

SEQ ID NO: 25166 - RNA, 1033 nt, Artificial Sequence
  SARS-CoV-2/Wuhan/WIV05/2019__EPI_ISL_402128 spike protein mRNA gc (334-528) Foldon construct
aggagacccgugacccggaaguuguacggcuacgcgacuuucccucccacaaacccucgcgcccuuccuuuccuacuugggcccggcagaaagcuuaccaugcccaugggcagccugcagccgcucgccacccuguaccugcucgggaugcugguggccuccguccuggcgaaccugugccccuucggcgagguguucaacgccacccgguucgccagcgucuacgccuggaaccgcaagcggaucuccaacugcguggcggacuacagcgugcuguacaacuccgccagcuucuccacguucaagugcuacggcgucagccccaccaagcucaacgaccugugcuucaccaacguguacgccgacuccuucgugauccgcggggacgagguccggcagaucgcccccggccagaccgggaagaucgccgacuacaacuacaagcugccggacgacuucacgggcugcgugaucgcguggaacagcaacaaccucgacuccaaggucgggggcaacuacaacuaccuguaccgccuguuccgcaagagcaaccucaagcccuucgagcgggacaucuccaccgagaucuaccaggccggcagcacccccugcaacgggguggagggcuucaacugcuacuucccccugcaguccuacggguuccagccgaccaacggcgugggguaccagcccuaccggguggucgugcugagcuucgagcuccugcacgcccccgccacggugugcggccccaagggcagcggcggguacauccccgaggccccgcgcgacggccaggccuacgugcggaaggacggcgaguggguccugcugagcaccuuccucugaggacuaguguccaccugucccuccugggcugcuggauugucucguuuuccugccaaauaaacaggaucagcgcuuuacagaucuaaaaaaaaaaaaaaaaaaaaaaaaaaaaaaaaaaaaaaaaaaaaaaaaaaaaaaaaaaaaaaaaaaaaaaaaaaaaaaaaaaaaaaaaaaaaaaaaaaaa

SEQ ID NO: 25167 - RNA, 1411 nt, Artificial Sequence
  SARS-CoV-2/Wuhan/WIV05/2019__EPI_ISL_402128 spike protein mRNA gc (1-15,334-528) LumSynth construct
aggagacccgugacccggaaguuguacggcuacgcgacuuucccucccacaaacccucgcgcccuuccuuuccuacuugggcccggcagaaagcuuaccauguucguguuccugguccuccugccccuggugagcucccagugcaaccugugccccuucggcgagguguucaacgccacccgguucgccagcgucuacgccuggaaccgcaagcggaucuccaacugcguggcggacuacagcgugcuguacaacuccgccagcuucuccacguucaagugcuacggcgucagccccaccaagcucaacgaccugugcuucaccaacguguacgccgacuccuucgugauccgcggggacgagguccggcagaucgcccccggccagaccgggaagaucgccgacuacaacuacaagcugccggacgacuucacgggcugcgugaucgcguggaacagcaacaaccucgacuccaaggucgggggcaacuacaacuaccuguaccgccuguuccgcaagagcaaccucaagcccuucgagcgggacaucuccaccgagaucuaccaggccggcagcacccccugcaacgggguggagggcuucaacugcuacuucccccugcaguccuacggguuccagccgaccaacggcgugggguaccagcccuaccggguggucgugcugagcuucgagcuccugcacgcccccgccacggugugcggccccaagggcggcggcggcuccggaggcggagguagcgggggacagaucuacgagggcaagcugaccgccgaggggcuccgcuucggcaucguggccagccgguucaaccacgcgcuggucgaccgccugguggagggggccaucgacgccaucgugcggcacggcgggcgcgaggaggacaucacccucguccgggugcccggcuccugggagaucccgguggccgccggcgagcuggcccgcaaggaggacaucgacgcggucaucgccaucggggugcugauccggggcgccacgccccacuucgacuacaucgccagcgagguguccaaggggcucgcggaccugagccuggagcuccgcaagcccaucaccuucggcgucaucaccgccgacacccuggagcaggccaucgagcgggccgggacgaagcacggcaacaagggcugggaggccgcgcuguccgccaucgagauggccaaccucuucaagagccugcgcugaggacuaguguccaccugucccuccugggcugcuggauugucucguuuuccugccaaauaaacaggaucagcgcuuuacagaucuaaaaaaaaaaaaaaaaaaaaaaaaaaaaaaaaaaaaaaaaaaaaaaaaaaaaaaaaaaaaaaaaaaaaaaaaaaaaaaaaaaaaaaaaaaaaaaaaaaaa

SEQ ID NO: 25168 - RNA, 1372 nt, Artificial Sequence
  SARS-CoV-2/Wuhan/WIV05/2019__EPI_ISL_402128 spike protein mRNA gc (334-528) LumSynth construct
aggagacccgugacccggaaguuguacggcuacgcgacuuucccucccacaaacccucgcgcccuuccuuuccuacuugggcccggcagaaagcuuaccaugcagaucuacgagggcaagcugaccgccgaggggcuccgcuucggcaucguggccagccgguucaaccacgcgcuggucgaccgccugguggagggggccaucgacgccaucgugcggcacggcgggcgcgaggaggacaucacccucguccgggugcccggcuccugggagaucccgguggccgccggcgagcuggcccgcaaggaggacaucgacgcggucaucgccaucggggugcugauccggggcgccacgccccacuucgacuacaucgccagcgagguguccaaggggcucgcggaccugagccuggagcuccgcaagcccaucaccuucggcgucaucaccgccgacacccuggagcaggccaucgagcgggccgggacgaagcacggcaacaagggcugggaggccgcgcuguccgccaucgagauggccaaccucuucaagagccugcgcggcgggggcgggagcggcgggggcggcuccgggggcgggaaccugugccccuucggcgagguguucaacgccacccgguucgccagcgucuacgccuggaaccgcaagcggaucuccaacugcguggcggacuacagcgugcuguacaacuccgccagcuucuccacguucaagugcuacggcgucagccccaccaagcucaacgaccugugcuucaccaacguguacgccgacuccuucgugauccgcggggacgagguccggcagaucgcccccggccagaccgggaagaucgccgacuacaacuacaagcugccggacgacuucacgggcugcgugaucgcguggaacagcaacaaccucgacuccaaggucgggggcaacuacaacuaccuguaccgccuguuccgcaagagcaaccucaagcccuucgagcgggacaucuccaccgagaucuaccaggccggcagcacccccugcaacgggguggagggcuucaacugcuacuucccccugcaguccuacggguuccagccgaccaacggcgugggguaccagcccuaccggguggucgugcugagcuucgagcuccugcacgcccccgccacggugugcggccccaagugaggacuaguguccaccugucccuccugggcugcuggauugucucguuuuccugccaaauaaacaggaucagcgcuuuacagaucuaaaaaaaaaaaaaaaaaaaaaaaaaaaaaaaaaaaaaaaaaaaaaaaaaaaaaaaaaaaaaaaaaaaaaaaaaaaaaaaaaaaaaaaaaaaaaaaaaaaa

SEQ ID NO: 25169 - RNA, 4105 nt, Artificial Sequence
  SARS-CoV-2/Wuhan/WIV05/2019__EPI_ISL_402128 spike protein mRNA gc (1-1273)
aggagacccgugacccggaaguuguacggcuacgcgacuuucccucccacaaacccucgcgcccuuccuuuccuacuugggcccggcagaaagcuuaccauguucguguuccugguccuccugccccuggugagcucccagugcgugaaccucaccacccgcacgcagcugccgcccgccuacaccaacagcuucacccggggcgucuacuaccccgacaagguguuccgcuccagcgugcugcacuccacccaggaccucuuccugcccuucuucagcaacgucacgugguuccacgccauccacguguccgggaccaacggcaccaagcgguucgacaacccggugcugcccuucaacgacggggucuacuucgcgagcaccgagaaguccaacaucauccgcggcuggaucuucgggacgacccucgacagcaagacccagucccugcugaucgugaacaacgccaccaacguggucaucaaggugugcgaguuccaguucugcaacgaccccuuccucggcguguacuaccacaagaacaacaagagcuggauggaguccgaguuccgggucuacagcuccgccaacaacugcacguucgaguacgugagccagcccuuccugauggaccuggagggcaagcaggggaacuucaagaaccuccgcgaguucguguucaagaacaucgacggcuacuucaagaucuacuccaagcacaccccgaucaaccugguccgggaccugccccagggguucagcgcccucgagccccugguggaccugcccaucggcaucaacaucacccgcuuccagacccuccuggcccugcaccgguccuaccucacgccgggggacagcagcuccggcuggaccgcgggcgccgccgccuacuacgugggguaccugcagccccgcaccuuccugcucaaguacaacgagaacggcaccaucacggacgcggucgacugcgcccuggacccccugagcgagaccaagugcacccucaaguccuucaccguggagaaggggaucuaccagacgagcaacuuccgggugcagcccaccgaguccaucguccgcuucccgaacaucaccaaccugugccccuucggcgagguguucaacgccacccgguucgccagcgucuacgccuggaaccgcaagcggaucuccaacugcguggcggacuacagcgugcuguacaacuccgccagcuucuccacguucaagugcuacggcgucagccccaccaagcucaacgaccugugcuucaccaacguguacgccgacuccuucgugauccgcggggacgagguccggcagaucgcccccggccagaccgggaagaucgccgacuacaacuacaagcugccggacgacuucacgggcugcgugaucgcguggaacagcaacaaccucgacuccaaggucgggggcaacuacaacuaccuguaccgccuguuccgcaagagcaaccucaagcccuucgagcgggacaucuccaccgagaucuaccaggccggcagcacccccugcaacgggguggagggcuucaacugcuacuucccccugcaguccuacggguuccagccgaccaacggcgugggguaccagcccuaccggguggucgugcugagcuucgagcuccugcacgcccccgccacggugugcggccccaagaaguccaccaaccuggucaagaacaagugcgugaacuucaacuucaacggccucaccgggaccggcgugcugaccgagagcaacaagaaguuccugccguuccagcaguucgggcgcgacaucgccgacacgaccgacgcgguccgcgacccccagacccuggagauccucgacaucacccccugcagcuucggcgggguguccgugaucacgccgggcaccaacaccagcaaccaggucgccgugcuguaccaggacgugaacugcaccgagguccccguggccauccacgccgaccagcugacgcccaccuggcggguguacuccaccggcagcaacgucuuccagacccgcgccgggugccucaucggcgcggagcacgugaacaacuccuacgagugcgacauccccaucggggccggcaucugcgccagcuaccagacgcagaccaacuccccgcggcgcgcccggagcguggcgucccagagcaucaucgccuacaccaugucccugggcgccgagaacagcgucgccuacuccaacaacagcaucgccauccccaccaacuucacgaucuccgugaccaccgagauccugcccgugagcaugaccaagacgagcgucgacugcaccauguacaucugcggggacuccaccgagugcagcaaccuccugcugcaguacggcuccuucugcacccagcucaaccgcgcgcugacggggaucgccguggagcaggacaagaacacccaggagguguucgcccaggucaagcagaucuacaagacgcccccgaucaaggacuucggcggguucaacuucagccagauccugcccgaccccuccaagcccagcaagcgguccuucaucgaggaccuccuguucaacaaggugacccuggccgacgccggcuucaucaagcaguacggcgacugccucggggacaucgcggcccgcgaccugaucugcgcccagaaguucaacggccugaccgugcucccgccccugcugaccgacgagaugaucgcccaguacaccagcgcccuccuggcggggaccaucacguccggcuggaccuucggggccggcgccgcccugcagauccccuucgcgaugcagauggccuaccgguucaacggcaucggggucacccagaacgugcucuacgagaaccagaagcugaucgccaaccaguucaacagcgccaucggcaagauccaggacucccugagcuccaccgccagcgcgcucgggaagcugcaggacguggucaaccagaacgcccaggcccugaacacgcucgugaagcagcuguccagcaacuucggcgccaucuccagcgugcugaacgacauccucucccgccuggacaaggucgaggccgaggugcagaucgaccggcugaucaccgggcgccuccagagccugcagaccuacgugacccagcagcugauccgggcggccgagauccgcgccagcgccaaccucgccgcgaccaagauguccgagugcguccugggccagagcaagcggguggacuucugcggcaagggguaccaccugauguccuucccccagagcgccccgcacggcguggucuuccuccacgugacguacguccccgcccaggagaagaacuucaccaccgcccccgcgaucugccacgacgggaaggcccacuucccccgcgagggcguguucguguccaacgggacccacugguucgucacgcagcggaacuucuacgagccgcagaucaucaccaccgacaacaccuucgugagcggcaacugcgacguggucaucggcaucgugaacaacacgguguacgacccccugcagcccgagcuggacuccuucaaggaggagcucgacaaguacuucaagaaccacaccagccccgacgucgaccugggggacaucuccggcaucaacgccagcguggugaacauccagaaggagaucgaccgccugaacgaggucgccaagaaccucaacgagucccugaucgaccugcaggagcucgggaaguacgagcaguacaucaaguggccgugguacaucuggcugggcuucaucgccggccugaucgcgaucgugauggugaccaucaugcucugcugcaugaccagcugcugcuccugccugaaggggugcugcagcugcggcuccugcugcaaguucgacgaggacgacagcgagcccguccugaagggggugaagcuccacuacacgugaggacuaguguccaccugucccuccugggcugcuggauugucucguuuuccugccaaauaaacaggaucagcgcuuuacagaucuaaaaaaaaaaaaaaaaaaaaaaaaaaaaaaaaaaaaaaaaaaaaaaaaaaaaaaaaaaaaaaaaaaaaaaaaaaaaaaaaaaaaaaaaaaaaaaaaaaaa

SEQ ID NO: 25170 - RNA, 4105 nt, Artificial Sequence
  SARS-CoV-2/Wuhan/WIV05/2019__EPI_ISL_402128 spike protein mRNA gc (1-1273)(D614G)
aggagacccgugacccggaaguuguacggcuacgcgacuuucccucccacaaacccucgcgcccuuccuuuccuacuugggcccggcagaaagcuuaccauguucguguuccugguccuccugccccuggugagcucccagugcgugaaccucaccacccgcacgcagcugccgcccgccuacaccaacagcuucacccggggcgucuacuaccccgacaagguguuccgcuccagcgugcugcacuccacccaggaccucuuccugcccuucuucagcaacgucacgugguuccacgccauccacguguccgggaccaacggcaccaagcgguucgacaacccggugcugcccuucaacgacggggucuacuucgcgagcaccgagaaguccaacaucauccgcggcuggaucuucgggacgacccucgacagcaagacccagucccugcugaucgugaacaacgccaccaacguggucaucaaggugugcgaguuccaguucugcaacgaccccuuccucggcguguacuaccacaagaacaacaagagcuggauggaguccgaguuccgggucuacagcuccgccaacaacugcacguucgaguacgugagccagcccuuccugauggaccuggagggcaagcaggggaacuucaagaaccuccgcgaguucguguucaagaacaucgacggcuacuucaagaucuacuccaagcacaccccgaucaaccugguccgggaccugccccagggguucagcgcccucgagccccugguggaccugcccaucggcaucaacaucacccgcuuccagacccuccuggcccugcaccgguccuaccucacgccgggggacagcagcuccggcuggaccgcgggcgccgccgccuacuacgugggguaccugcagccccgcaccuuccugcucaaguacaacgagaacggcaccaucacggacgcggucgacugcgcccuggacccccugagcgagaccaagugcacccucaaguccuucaccguggagaaggggaucuaccagacgagcaacuuccgggugcagcccaccgaguccaucguccgcuucccgaacaucaccaaccugugccccuucggcgagguguucaacgccacccgguucgccagcgucuacgccuggaaccgcaagcggaucuccaacugcguggcggacuacagcgugcuguacaacuccgccagcuucuccacguucaagugcuacggcgucagccccaccaagcucaacgaccugugcuucaccaacguguacgccgacuccuucgugauccgcggggacgagguccggcagaucgcccccggccagaccgggaagaucgccgacuacaacuacaagcugccggacgacuucacgggcugcgugaucgcguggaacagcaacaaccucgacuccaaggucgggggcaacuacaacuaccuguaccgccuguuccgcaagagcaaccucaagcccuucgagcgggacaucuccaccgagaucuaccaggccggcagcacccccugcaacgggguggagggcuucaacugcuacuucccccugcaguccuacggguuccagccgaccaacggcgugggguaccagcccuaccggguggucgugcugagcuucgagcuccugcacgcccccgccacggugugcggccccaagaaguccaccaaccuggucaagaacaagugcgugaacuucaacuucaacggccucaccgggaccggcgugcugaccgagagcaacaagaaguuccugccguuccagcaguucgggcgcgacaucgccgacacgaccgacgcgguccgcgacccccagacccuggagauccucgacaucacccccugcagcuucggcgggguguccgugaucacgccgggcaccaacaccagcaaccaggucgccgugcuguaccagggcgugaacugcaccgagguccccguggccauccacgccgaccagcugacgcccaccuggcggguguacuccaccggcagcaacgucuuccagacccgcgccgggugccucaucggcgcggagcacgugaacaacuccuacgagugcgacauccccaucggggccggcaucugcgccagcuaccagacgcagaccaacuccccgcggcgcgcccggagcguggcgucccagagcaucaucgccuacaccaugucccugggcgccgagaacagcgucgccuacuccaacaacagcaucgccauccccaccaacuucacgaucuccgugaccaccgagauccugcccgugagcaugaccaagacgagcgucgacugcaccauguacaucugcggggacuccaccgagugcagcaaccuccugcugcaguacggcuccuucugcacccagcucaaccgcgcgcugacggggaucgccguggagcaggacaagaacacccaggagguguucgcccaggucaagcagaucuacaagacgcccccgaucaaggacuucggcggguucaacuucagccagauccugcccgaccccuccaagcccagcaagcgguccuucaucgaggaccuccuguucaacaaggugacccuggccgacgccggcuucaucaagcaguacggcgacugccucggggacaucgcggcccgcgaccugaucugcgcccagaaguucaacggccugaccgugcucccgccccugcugaccgacgagaugaucgcccaguacaccagcgcccuccuggcggggaccaucacguccggcuggaccuucggggccggcgccgcccugcagauccccuucgcgaugcagauggccuaccgguucaacggcaucggggucacccagaacgugcucuacgagaaccagaagcugaucgccaaccaguucaacagcgccaucggcaagauccaggacucccugagcuccaccgccagcgcgcucgggaagcugcaggacguggucaaccagaacgcccaggcccugaacacgcucgugaagcagcuguccagcaacuucggcgccaucuccagcgugcugaacgacauccucucccgccuggacaaggucgaggccgaggugcagaucgaccggcugaucaccgggcgccuccagagccugcagaccuacgugacccagcagcugauccgggcggccgagauccgcgccagcgccaaccucgccgcgaccaagauguccgagugcguccugggccagagcaagcggguggacuucugcggcaagggguaccaccugauguccuucccccagagcgccccgcacggcguggucuuccuccacgugacguacguccccgcccaggagaagaacuucaccaccgcccccgcgaucugccacgacgggaaggcccacuucccccgcgagggcguguucguguccaacgggacccacugguucgucacgcagcggaacuucuacgagccgcagaucaucaccaccgacaacaccuucgugagcggcaacugcgacguggucaucggcaucgugaacaacacgguguacgacccccugcagcccgagcuggacuccuucaaggaggagcucgacaaguacuucaagaaccacaccagccccgacgucgaccugggggacaucuccggcaucaacgccagcguggugaacauccagaaggagaucgaccgccugaacgaggucgccaagaaccucaacgagucccugaucgaccugcaggagcucgggaaguacgagcaguacaucaaguggccgugguacaucuggcugggcuucaucgccggccugaucgcgaucgugauggugaccaucaugcucugcugcaugaccagcugcugcuccugccugaaggggugcugcagcugcggcuccugcugcaaguucgacgaggacgacagcgagcccguccugaagggggugaagcuccacuacacgugaggacuaguguccaccugucccuccugggcugcuggauugucucguuuuccugccaaauaaacaggaucagcgcuuuacagaucuaaaaaaaaaaaaaaaaaaaaaaaaaaaaaaaaaaaaaaaaaaaaaaaaaaaaaaaaaaaaaaaaaaaaaaaaaaaaaaaaaaaaaaaaaaaaaaaaaaaa

SEQ ID NO: 25171 - RNA, 4105 nt, Artificial Sequence
  SARS-CoV-2/Wuhan/WIV05/2019__EPI_ISL_402128 spike protein mRNA gc (1-1273)(A222V_D614G)
aggagacccgugacccggaaguuguacggcuacgcgacuuucccucccacaaacccucgcgcccuuccuuuccuacuugggcccggcagaaagcuuaccauguucguguuccugguccuccugccccuggugagcucccagugcgugaaccucaccacccgcacgcagcugccgcccgccuacaccaacagcuucacccggggcgucuacuaccccgacaagguguuccgcuccagcgugcugcacuccacccaggaccucuuccugcccuucuucagcaacgucacgugguuccacgccauccacguguccgggaccaacggcaccaagcgguucgacaacccggugcugcccuucaacgacggggucuacuucgcgagcaccgagaaguccaacaucauccgcggcuggaucuucgggacgacccucgacagcaagacccagucccugcugaucgugaacaacgccaccaacguggucaucaaggugugcgaguuccaguucugcaacgaccccuuccucggcguguacuaccacaagaacaacaagagcuggauggaguccgaguuccgggucuacagcuccgccaacaacugcacguucgaguacgugagccagcccuuccugauggaccuggagggcaagcaggggaacuucaagaaccuccgcgaguucguguucaagaacaucgacggcuacuucaagaucuacuccaagcacaccccgaucaaccugguccgggaccugccccagggguucagcguccucgagccccugguggaccugcccaucggcaucaacaucacccgcuuccagacccuccuggcccugcaccgguccuaccucacgccgggggacagcagcuccggcuggaccgcgggcgccgccgccuacuacgugggguaccugcagccccgcaccuuccugcucaaguacaacgagaacggcaccaucacggacgcggucgacugcgcccuggacccccugagcgagaccaagugcacccucaaguccuucaccguggagaaggggaucuaccagacgagcaacuuccgggugcagcccaccgaguccaucguccgcuucccgaacaucaccaaccugugccccuucggcgagguguucaacgccacccgguucgccagcgucuacgccuggaaccgcaagcggaucuccaacugcguggcggacuacagcgugcuguacaacuccgccagcuucuccacguucaagugcuacggcgucagccccaccaagcucaacgaccugugcuucaccaacguguacgccgacuccuucgugauccgcggggacgagguccggcagaucgcccccggccagaccgggaagaucgccgacuacaacuacaagcugccggacgacuucacgggcugcgugaucgcguggaacagcaacaaccucgacuccaaggucgggggcaacuacaacuaccuguaccgccuguuccgcaagagcaaccucaagcccuucgagcgggacaucuccaccgagaucuaccaggccggcagcacccccugcaacgggguggagggcuucaacugcuacuucccccugcaguccuacggguuccagccgaccaacggcgugggguaccagcccuaccggguggucgugcugagcuucgagcuccugcacgcccccgccacggugugcggccccaagaaguccaccaaccuggucaagaacaagugcgugaacuucaacuucaacggccucaccgggaccggcgugcugaccgagagcaacaagaaguuccugccguuccagcaguucgggcgcgacaucgccgacacgaccgacgcgguccgcgacccccagacccuggagauccucgacaucacccccugcagcuucggcgggguguccgugaucacgccgggcaccaacaccagcaaccaggucgccgugcuguaccagggcgugaacugcaccgagguccccguggccauccacgccgaccagcugacgcccaccuggcggguguacuccaccggcagcaacgucuuccagacccgcgccgggugccucaucggcgcggagcacgugaacaacuccuacgagugcgacauccccaucggggccggcaucugcgccagcuaccagacgcagaccaacuccccgcggcgcgcccggagcguggcgucccagagcaucaucgccuacaccaugucccugggcgccgagaacagcgucgccuacuccaacaacagcaucgccauccccaccaacuucacgaucuccgugaccaccgagauccugcccgugagcaugaccaagacgagcgucgacugcaccauguacaucugcggggacuccaccgagugcagcaaccuccugcugcaguacggcuccuucugcacccagcucaaccgcgcgcugacggggaucgccguggagcaggacaagaacacccaggagguguucgcccaggucaagcagaucuacaagacgcccccgaucaaggacuucggcggguucaacuucagccagauccugcccgaccccuccaagcccagcaagcgguccuucaucgaggaccuccuguucaacaaggugacccuggccgacgccggcuucaucaagcaguacggcgacugccucggggacaucgcggcccgcgaccugaucugcgcccagaaguucaacggccugaccgugcucccgccccugcugaccgacgagaugaucgcccaguacaccagcgcccuccuggcggggaccaucacguccggcuggaccuucggggccggcgccgcccugcagauccccuucgcgaugcagauggccuaccgguucaacggcaucggggucacccagaacgugcucuacgagaaccagaagcugaucgccaaccaguucaacagcgccaucggcaagauccaggacucccugagcuccaccgccagcgcgcucgggaagcugcaggacguggucaaccagaacgcccaggcccugaacacgcucgugaagcagcuguccagcaacuucggcgccaucuccagcgugcugaacgacauccucucccgccuggacaaggucgaggccgaggugcagaucgaccggcugaucaccgggcgccuccagagccugcagaccuacgugacccagcagcugauccgggcggccgagauccgcgccagcgccaaccucgccgcgaccaagauguccgagugcguccugggccagagcaagcggguggacuucugcggcaagggguaccaccugauguccuucccccagagcgccccgcacggcguggucuuccuccacgugacguacguccccgcccaggagaagaacuucaccaccgcccccgcgaucugccacgacgggaaggcccacuucccccgcgagggcguguucguguccaacgggacccacugguucgucacgcagcggaacuucuacgagccgcagaucaucaccaccgacaacaccuucgugagcggcaacugcgacguggucaucggcaucgugaacaacacgguguacgacccccugcagcccgagcuggacuccuucaaggaggagcucgacaaguacuucaagaaccacaccagccccgacgucgaccugggggacaucuccggcaucaacgccagcguggugaacauccagaaggagaucgaccgccugaacgaggucgccaagaaccucaacgagucccugaucgaccugcaggagcucgggaaguacgagcaguacaucaaguggccgugguacaucuggcugggcuucaucgccggccugaucgcgaucgugauggugaccaucaugcucugcugcaugaccagcugcugcuccugccugaaggggugcugcagcugcggcuccugcugcaaguucgacgaggacgacagcgagcccguccugaagggggugaagcuccacuacacgugaggacuaguguccaccugucccuccugggcugcuggauugucucguuuuccugccaaauaaacaggaucagcgcuuuacagaucuaaaaaaaaaaaaaaaaaaaaaaaaaaaaaaaaaaaaaaaaaaaaaaaaaaaaaaaaaaaaaaaaaaaaaaaaaaaaaaaaaaaaaaaaaaaaaaaaaaaa

SEQ ID NO: 25172 - RNA, 4105 nt, Artificial Sequence
  SARS-CoV-2/Wuhan/WIV05/2019__EPI_ISL_402128 spike protein mRNA gc (1-1273)(N439K_D614G)
aggagacccgugacccggaaguuguacggcuacgcgacuuucccucccacaaacccucgcgcccuuccuuuccuacuugggcccggcagaaagcuuaccauguucguguuccugguccuccugccccuggugagcucccagugcgugaaccucaccacccgcacgcagcugccgcccgccuacaccaacagcuucacccggggcgucuacuaccccgacaagguguuccgcuccagcgugcugcacuccacccaggaccucuuccugcccuucuucagcaacgucacgugguuccacgccauccacguguccgggaccaacggcaccaagcgguucgacaacccggugcugcccuucaacgacggggucuacuucgcgagcaccgagaaguccaacaucauccgcggcuggaucuucgggacgacccucgacagcaagacccagucccugcugaucgugaacaacgccaccaacguggucaucaaggugugcgaguuccaguucugcaacgaccccuuccucggcguguacuaccacaagaacaacaagagcuggauggaguccgaguuccgggucuacagcuccgccaacaacugcacguucgaguacgugagccagcccuuccugauggaccuggagggcaagcaggggaacuucaagaaccuccgcgaguucguguucaagaacaucgacggcuacuucaagaucuacuccaagcacaccccgaucaaccugguccgggaccugccccagggguucagcgcccucgagccccugguggaccugcccaucggcaucaacaucacccgcuuccagacccuccuggcccugcaccgguccuaccucacgccgggggacagcagcuccggcuggaccgcgggcgccgccgccuacuacgugggguaccugcagccccgcaccuuccugcucaaguacaacgagaacggcaccaucacggacgcggucgacugcgcccuggacccccugagcgagaccaagugcacccucaaguccuucaccguggagaaggggaucuaccagacgagcaacuuccgggugcagcccaccgaguccaucguccgcuucccgaacaucaccaaccugugccccuucggcgagguguucaacgccacccgguucgccagcgucuacgccuggaaccgcaagcggaucuccaacugcguggcggacuacagcgugcuguacaacuccgccagcuucuccacguucaagugcuacggcgucagccccaccaagcucaacgaccugugcuucaccaacguguacgccgacuccuucgugauccgcggggacgagguccggcagaucgcccccggccagaccgggaagaucgccgacuacaacuacaagcugccggacgacuucacgggcugcgugaucgcguggaacagcaagaaccucgacuccaaggucgggggcaacuacaacuaccuguaccgccuguuccgcaagagcaaccucaagcccuucgagcgggacaucuccaccgagaucuaccaggccggcagcacccccugcaacgggguggagggcuucaacugcuacuucccccugcaguccuacggguuccagccgaccaacggcgugggguaccagcccuaccggguggucgugcugagcuucgagcuccugcacgcccccgccacggugugcggccccaagaaguccaccaaccuggucaagaacaagugcgugaacuucaacuucaacggccucaccgggaccggcgugcugaccgagagcaacaagaaguuccugccguuccagcaguucgggcgcgacaucgccgacacgaccgacgcgguccgcgacccccagacccuggagauccucgacaucacccccugcagcuucggcgggguguccgugaucacgccgggcaccaacaccagcaaccaggucgccgugcuguaccagggcgugaacugcaccgagguccccguggccauccacgccgaccagcugacgcccaccuggcggguguacuccaccggcagcaacgucuuccagacccgcgccgggugccucaucggcgcggagcacgugaacaacuccuacgagugcgacauccccaucggggccggcaucugcgccagcuaccagacgcagaccaacuccccgcggcgcgcccggagcguggcgucccagagcaucaucgccuacaccaugucccugggcgccgagaacagcgucgccuacuccaacaacagcaucgccauccccaccaacuucacgaucuccgugaccaccgagauccugcccgugagcaugaccaagacgagcgucgacugcaccauguacaucugcggggacuccaccgagugcagcaaccuccugcugcaguacggcuccuucugcacccagcucaaccgcgcgcugacggggaucgccguggagcaggacaagaacacccaggagguguucgcccaggucaagcagaucuacaagacgcccccgaucaaggacuucggcggguucaacuucagccagauccugcccgaccccuccaagcccagcaagcgguccuucaucgaggaccuccuguucaacaaggugacccuggccgacgccggcuucaucaagcaguacggcgacugccucggggacaucgcggcccgcgaccugaucugcgcccagaaguucaacggccugaccgugcucccgccccugcugaccgacgagaugaucgcccaguacaccagcgcccuccuggcggggaccaucacguccggcuggaccuucggggccggcgccgcccugcagauccccuucgcgaugcagauggccuaccgguucaacggcaucggggucacccagaacgugcucuacgagaaccagaagcugaucgccaaccaguucaacagcgccaucggcaagauccaggacucccugagcuccaccgccagcgcgcucgggaagcugcaggacguggucaaccagaacgcccaggcccugaacacgcucgugaagcagcuguccagcaacuucggcgccaucuccagcgugcugaacgacauccucucccgccuggacaaggucgaggccgaggugcagaucgaccggcugaucaccgggcgccuccagagccugcagaccuacgugacccagcagcugauccgggcggccgagauccgcgccagcgccaaccucgccgcgaccaagauguccgagugcguccugggccagagcaagcggguggacuucugcggcaagggguaccaccugauguccuucccccagagcgccccgcacggcguggucuuccuccacgugacguacguccccgcccaggagaagaacuucaccaccgcccccgcgaucugccacgacgggaaggcccacuucccccgcgagggcguguucguguccaacgggacccacugguucgucacgcagcggaacuucuacgagccgcagaucaucaccaccgacaacaccuucgugagcggcaacugcgacguggucaucggcaucgugaacaacacgguguacgacccccugcagcccgagcuggacuccuucaaggaggagcucgacaaguacuucaagaaccacaccagccccgacgucgaccugggggacaucuccggcaucaacgccagcguggugaacauccagaaggagaucgaccgccugaacgaggucgccaagaaccucaacgagucccugaucgaccugcaggagcucgggaaguacgagcaguacaucaaguggccgugguacaucuggcugggcuucaucgccggccugaucgcgaucgugauggugaccaucaugcucugcugcaugaccagcugcugcuccugccugaaggggugcugcagcugcggcuccugcugcaaguucgacgaggacgacagcgagcccguccugaagggggugaagcuccacuacacgugaggacuaguguccaccugucccuccugggcugcuggauugucucguuuuccugccaaauaaacaggaucagcgcuuuacagaucuaaaaaaaaaaaaaaaaaaaaaaaaaaaaaaaaaaaaaaaaaaaaaaaaaaaaaaaaaaaaaaaaaaaaaaaaaaaaaaaaaaaaaaaaaaaaaaaaaaaa

SEQ ID NO: 25173 - RNA, 4105 nt, Artificial Sequence
  SARS-CoV-2/Wuhan/WIV05/2019__EPI_ISL_402128 spike protein mRNA gc (1-1273)(S477N_D614G)
aggagacccgugacccggaaguuguacggcuacgcgacuuucccucccacaaacccucgcgcccuuccuuuccuacuugggcccggcagaaagcuuaccauguucguguuccugguccuccugccccuggugagcucccagugcgugaaccucaccacccgcacgcagcugccgcccgccuacaccaacagcuucacccggggcgucuacuaccccgacaagguguuccgcuccagcgugcugcacuccacccaggaccucuuccugcccuucuucagcaacgucacgugguuccacgccauccacguguccgggaccaacggcaccaagcgguucgacaacccggugcugcccuucaacgacggggucuacuucgcgagcaccgagaaguccaacaucauccgcggcuggaucuucgggacgacccucgacagcaagacccagucccugcugaucgugaacaacgccaccaacguggucaucaaggugugcgaguuccaguucugcaacgaccccuuccucggcguguacuaccacaagaacaacaagagcuggauggaguccgaguuccgggucuacagcuccgccaacaacugcacguucgaguacgugagccagcccuuccugauggaccuggagggcaagcaggggaacuucaagaaccuccgcgaguucguguucaagaacaucgacggcuacuucaagaucuacuccaagcacaccccgaucaaccugguccgggaccugccccagggguucagcgcccucgagccccugguggaccugcccaucggcaucaacaucacccgcuuccagacccuccuggcccugcaccgguccuaccucacgccgggggacagcagcuccggcuggaccgcgggcgccgccgccuacuacgugggguaccugcagccccgcaccuuccugcucaaguacaacgagaacggcaccaucacggacgcggucgacugcgcccuggacccccugagcgagaccaagugcacccucaaguccuucaccguggagaaggggaucuaccagacgagcaacuuccgggugcagcccaccgaguccaucguccgcuucccgaacaucaccaaccugugccccuucggcgagguguucaacgccacccgguucgccagcgucuacgccuggaaccgcaagcggaucuccaacugcguggcggacuacagcgugcuguacaacuccgccagcuucuccacguucaagugcuacggcgucagccccaccaagcucaacgaccugugcuucaccaacguguacgccgacuccuucgugauccgcggggacgagguccggcagaucgcccccggccagaccgggaagaucgccgacuacaacuacaagcugccggacgacuucacgggcugcgugaucgcguggaacagcaacaaccucgacuccaaggucgggggcaacuacaacuaccuguaccgccuguuccgcaagagcaaccucaagcccuucgagcgggacaucuccaccgagaucuaccaggccggcaacacccccugcaacgggguggagggcuucaacugcuacuucccccugcaguccuacggguuccagccgaccaacggcgugggguaccagcccuaccggguggucgugcugagcuucgagcuccugcacgcccccgccacggugugcggccccaagaaguccaccaaccuggucaagaacaagugcgugaacuucaacuucaacggccucaccgggaccggcgugcugaccgagagcaacaagaaguuccugccguuccagcaguucgggcgcgacaucgccgacacgaccgacgcgguccgcgacccccagacccuggagauccucgacaucacccccugcagcuucggcgggguguccgugaucacgccgggcaccaacaccagcaaccaggucgccgugcuguaccagggcgugaacugcaccgagguccccguggccauccacgccgaccagcugacgcccaccuggcggguguacuccaccggcagcaacgucuuccagacccgcgccgggugccucaucggcgcggagcacgugaacaacuccuacgagugcgacauccccaucggggccggcaucugcgccagcuaccagacgcagaccaacuccccgcggcgcgcccggagcguggcgucccagagcaucaucgccuacaccaugucccugggcgccgagaacagcgucgccuacuccaacaacagcaucgccauccccaccaacuucacgaucuccgugaccaccgagauccugcccgugagcaugaccaagacgagcgucgacugcaccauguacaucugcggggacuccaccgagugcagcaaccuccugcugcaguacggcuccuucugcacccagcucaaccgcgcgcugacggggaucgccguggagcaggacaagaacacccaggagguguucgcccaggucaagcagaucuacaagacgcccccgaucaaggacuucggcggguucaacuucagccagauccugcccgaccccuccaagcccagcaagcgguccuucaucgaggaccuccuguucaacaaggugacccuggccgacgccggcuucaucaagcaguacggcgacugccucggggacaucgcggcccgcgaccugaucugcgcccagaaguucaacggccugaccgugcucccgccccugcugaccgacgagaugaucgcccaguacaccagcgcccuccuggcggggaccaucacguccggcuggaccuucggggccggcgccgcccugcagauccccuucgcgaugcagauggccuaccgguucaacggcaucggggucacccagaacgugcucuacgagaaccagaagcugaucgccaaccaguucaacagcgccaucggcaagauccaggacucccugagcuccaccgccagcgcgcucgggaagcugcaggacguggucaaccagaacgcccaggcccugaacacgcucgugaagcagcuguccagcaacuucggcgccaucuccagcgugcugaacgacauccucucccgccuggacaaggucgaggccgaggugcagaucgaccggcugaucaccgggcgccuccagagccugcagaccuacgugacccagcagcugauccgggcggccgagauccgcgccagcgccaaccucgccgcgaccaagauguccgagugcguccugggccagagcaagcggguggacuucugcggcaagggguaccaccugauguccuucccccagagcgccccgcacggcguggucuuccuccacgugacguacguccccgcccaggagaagaacuucaccaccgcccccgcgaucugccacgacgggaaggcccacuucccccgcgagggcguguucguguccaacgggacccacugguucgucacgcagcggaacuucuacgagccgcagaucaucaccaccgacaacaccuucgugagcggcaacugcgacguggucaucggcaucgugaacaacacgguguacgacccccugcagcccgagcuggacuccuucaaggaggagcucgacaaguacuucaagaaccacaccagccccgacgucgaccugggggacaucuccggcaucaacgccagcguggugaacauccagaaggagaucgaccgccugaacgaggucgccaagaaccucaacgagucccugaucgaccugcaggagcucgggaaguacgagcaguacaucaaguggccgugguacaucuggcugggcuucaucgccggccugaucgcgaucgugauggugaccaucaugcucugcugcaugaccagcugcugcuccugccugaaggggugcugcagcugcggcuccugcugcaaguucgacgaggacgacagcgagcccguccugaagggggugaagcuccacuacacgugaggacuaguguccaccugucccuccugggcugcuggauugucucguuuuccugccaaauaaacaggaucagcgcuuuacagaucuaaaaaaaaaaaaaaaaaaaaaaaaaaaaaaaaaaaaaaaaaaaaaaaaaaaaaaaaaaaaaaaaaaaaaaaaaaaaaaaaaaaaaaaaaaaaaaaaaaaa

SEQ ID NO: 25174 - RNA, 4105 nt, Artificial Sequence
  SARS-CoV-2/Wuhan/WIV05/2019__EPI_ISL_402128 spike protein mRNA gc (1-1273)(N501Y_D614G)
aggagacccgugacccggaaguuguacggcuacgcgacuuucccucccacaaacccucgcgcccuuccuuuccuacuugggcccggcagaaagcuuaccauguucguguuccugguccuccugccccuggugagcucccagugcgugaaccucaccacccgcacgcagcugccgcccgccuacaccaacagcuucacccggggcgucuacuaccccgacaagguguuccgcuccagcgugcugcacuccacccaggaccucuuccugcccuucuucagcaacgucacgugguuccacgccauccacguguccgggaccaacggcaccaagcgguucgacaacccggugcugcccuucaacgacggggucuacuucgcgagcaccgagaaguccaacaucauccgcggcuggaucuucgggacgacccucgacagcaagacccagucccugcugaucgugaacaacgccaccaacguggucaucaaggugugcgaguuccaguucugcaacgaccccuuccucggcguguacuaccacaagaacaacaagagcuggauggaguccgaguuccgggucuacagcuccgccaacaacugcacguucgaguacgugagccagcccuuccugauggaccuggagggcaagcaggggaacuucaagaaccuccgcgaguucguguucaagaacaucgacggcuacuucaagaucuacuccaagcacaccccgaucaaccugguccgggaccugccccagggguucagcgcccucgagccccugguggaccugcccaucggcaucaacaucacccgcuuccagacccuccuggcccugcaccgguccuaccucacgccgggggacagcagcuccggcuggaccgcgggcgccgccgccuacuacgugggguaccugcagccccgcaccuuccugcucaaguacaacgagaacggcaccaucacggacgcggucgacugcgcccuggacccccugagcgagaccaagugcacccucaaguccuucaccguggagaaggggaucuaccagacgagcaacuuccgggugcagcccaccgaguccaucguccgcuucccgaacaucaccaaccugugccccuucggcgagguguucaacgccacccgguucgccagcgucuacgccuggaaccgcaagcggaucuccaacugcguggcggacuacagcgugcuguacaacuccgccagcuucuccacguucaagugcuacggcgucagccccaccaagcucaacgaccugugcuucaccaacguguacgccgacuccuucgugauccgcggggacgagguccggcagaucgcccccggccagaccgggaagaucgccgacuacaacuacaagcugccggacgacuucacgggcugcgugaucgcguggaacagcaacaaccucgacuccaaggucgggggcaacuacaacuaccuguaccgccuguuccgcaagagcaaccucaagcccuucgagcgggacaucuccaccgagaucuaccaggccggcagcacccccugcaacgggguggagggcuucaacugcuacuucccccugcaguccuacggguuccagccgaccuacggcgugggguaccagcccuaccggguggucgugcugagcuucgagcuccugcacgcccccgccacggugugcggccccaagaaguccaccaaccuggucaagaacaagugcgugaacuucaacuucaacggccucaccgggaccggcgugcugaccgagagcaacaagaaguuccugccguuccagcaguucgggcgcgacaucgccgacacgaccgacgcgguccgcgacccccagacccuggagauccucgacaucacccccugcagcuucggcgggguguccgugaucacgccgggcaccaacaccagcaaccaggucgccgugcuguaccagggcgugaacugcaccgagguccccguggccauccacgccgaccagcugacgcccaccuggcggguguacuccaccggcagcaacgucuuccagacccgcgccgggugccucaucggcgcggagcacgugaacaacuccuacgagugcgacauccccaucggggccggcaucugcgccagcuaccagacgcagaccaacuccccgcggcgcgcccggagcguggcgucccagagcaucaucgccuacaccaugucccugggcgccgagaacagcgucgccuacuccaacaacagcaucgccauccccaccaacuucacgaucuccgugaccaccgagauccugcccgugagcaugaccaagacgagcgucgacugcaccauguacaucugcggggacuccaccgagugcagcaaccuccugcugcaguacggcuccuucugcacccagcucaaccgcgcgcugacggggaucgccguggagcaggacaagaacacccaggagguguucgcccaggucaagcagaucuacaagacgcccccgaucaaggacuucggcggguucaacuucagccagauccugcccgaccccuccaagcccagcaagcgguccuucaucgaggaccuccuguucaacaaggugacccuggccgacgccggcuucaucaagcaguacggcgacugccucggggacaucgcggcccgcgaccugaucugcgcccagaaguucaacggccugaccgugcucccgccccugcugaccgacgagaugaucgcccaguacaccagcgcccuccuggcggggaccaucacguccggcuggaccuucggggccggcgccgcccugcagauccccuucgcgaugcagauggccuaccgguucaacggcaucggggucacccagaacgugcucuacgagaaccagaagcugaucgccaaccaguucaacagcgccaucggcaagauccaggacucccugagcuccaccgccagcgcgcucgggaagcugcaggacguggucaaccagaacgcccaggcccugaacacgcucgugaagcagcuguccagcaacuucggcgccaucuccagcgugcugaacgacauccucucccgccuggacaaggucgaggccgaggugcagaucgaccggcugaucaccgggcgccuccagagccugcagaccuacgugacccagcagcugauccgggcggccgagauccgcgccagcgccaaccucgccgcgaccaagauguccgagugcguccugggccagagcaagcggguggacuucugcggcaagggguaccaccugauguccuucccccagagcgccccgcacggcguggucuuccuccacgugacguacguccccgcccaggagaagaacuucaccaccgcccccgcgaucugccacgacgggaaggcccacuucccccgcgagggcguguucguguccaacgggacccacugguucgucacgcagcggaacuucuacgagccgcagaucaucaccaccgacaacaccuucgugagcggcaacugcgacguggucaucggcaucgugaacaacacgguguacgacccccugcagcccgagcuggacuccuucaaggaggagcucgacaaguacuucaagaaccacaccagccccgacgucgaccugggggacaucuccggcaucaacgccagcguggugaacauccagaaggagaucgaccgccugaacgaggucgccaagaaccucaacgagucccugaucgaccugcaggagcucgggaaguacgagcaguacaucaaguggccgugguacaucuggcugggcuucaucgccggccugaucgcgaucgugauggugaccaucaugcucugcugcaugaccagcugcugcuccugccugaaggggugcugcagcugcggcuccugcugcaaguucgacgaggacgacagcgagcccguccugaagggggugaagcuccacuacacgugaggacuaguguccaccugucccuccugggcugcuggauugucucguuuuccugccaaauaaacaggaucagcgcuuuacagaucuaaaaaaaaaaaaaaaaaaaaaaaaaaaaaaaaaaaaaaaaaaaaaaaaaaaaaaaaaaaaaaaaaaaaaaaaaaaaaaaaaaaaaaaaaaaaaaaaaaaa

SEQ ID NO: 25175 - RNA, 4099 nt, Artificial Sequence
  SARS-CoV-2/Wuhan/WIV05/2019__EPI_ISL_402128 spike protein mRNA gc (1-1273)(H69del_V70del_D614G)
aggagacccgugacccggaaguuguacggcuacgcgacuuucccucccacaaacccucgcgcccuuccuuuccuacuugggcccggcagaaagcuuaccauguucguguuccugguccuccugccccuggugagcucccagugcgugaaccucaccacccgcacgcagcugccgcccgccuacaccaacagcuucacccggggcgucuacuaccccgacaagguguuccgcuccagcgugcugcacuccacccaggaccucuuccugcccuucuucagcaacgucacgugguuccacgccaucuccgggaccaacggcaccaagcgguucgacaacccggugcugcccuucaacgacggggucuacuucgcgagcaccgagaaguccaacaucauccgcggcuggaucuucgggacgacccucgacagcaagacccagucccugcugaucgugaacaacgccaccaacguggucaucaaggugugcgaguuccaguucugcaacgaccccuuccucggcguguacuaccacaagaacaacaagagcuggauggaguccgaguuccgggucuacagcuccgccaacaacugcacguucgaguacgugagccagcccuuccugauggaccuggagggcaagcaggggaacuucaagaaccuccgcgaguucguguucaagaacaucgacggcuacuucaagaucuacuccaagcacaccccgaucaaccugguccgggaccugccccagggguucagcgcccucgagccccugguggaccugcccaucggcaucaacaucacccgcuuccagacccuccuggcccugcaccgguccuaccucacgccgggggacagcagcuccggcuggaccgcgggcgccgccgccuacuacgugggguaccugcagccccgcaccuuccugcucaaguacaacgagaacggcaccaucacggacgcggucgacugcgcccuggacccccugagcgagaccaagugcacccucaaguccuucaccguggagaaggggaucuaccagacgagcaacuuccgggugcagcccaccgaguccaucguccgcuucccgaacaucaccaaccugugccccuucggcgagguguucaacgccacccgguucgccagcgucuacgccuggaaccgcaagcggaucuccaacugcguggcggacuacagcgugcuguacaacuccgccagcuucuccacguucaagugcuacggcgucagccccaccaagcucaacgaccugugcuucaccaacguguacgccgacuccuucgugauccgcggggacgagguccggcagaucgcccccggccagaccgggaagaucgccgacuacaacuacaagcugccggacgacuucacgggcugcgugaucgcguggaacagcaacaaccucgacuccaaggucgggggcaacuacaacuaccuguaccgccuguuccgcaagagcaaccucaagcccuucgagcgggacaucuccaccgagaucuaccaggccggcagcacccccugcaacgggguggagggcuucaacugcuacuucccccugcaguccuacggguuccagccgaccaacggcgugggguaccagcccuaccggguggucgugcugagcuucgagcuccugcacgcccccgccacggugugcggccccaagaaguccaccaaccuggucaagaacaagugcgugaacuucaacuucaacggccucaccgggaccggcgugcugaccgagagcaacaagaaguuccugccguuccagcaguucgggcgcgacaucgccgacacgaccgacgcgguccgcgacccccagacccuggagauccucgacaucacccccugcagcuucggcgggguguccgugaucacgccgggcaccaacaccagcaaccaggucgccgugcuguaccagggcgugaacugcaccgagguccccguggccauccacgccgaccagcugacgcccaccuggcggguguacuccaccggcagcaacgucuuccagacccgcgccgggugccucaucggcgcggagcacgugaacaacuccuacgagugcgacauccccaucggggccggcaucugcgccagcuaccagacgcagaccaacuccccgcggcgcgcccggagcguggcgucccagagcaucaucgccuacaccaugucccugggcgccgagaacagcgucgccuacuccaacaacagcaucgccauccccaccaacuucacgaucuccgugaccaccgagauccugcccgugagcaugaccaagacgagcgucgacugcaccauguacaucugcggggacuccaccgagugcagcaaccuccugcugcaguacggcuccuucugcacccagcucaaccgcgcgcugacggggaucgccguggagcaggacaagaacacccaggagguguucgcccaggucaagcagaucuacaagacgcccccgaucaaggacuucggcggguucaacuucagccagauccugcccgaccccuccaagcccagcaagcgguccuucaucgaggaccuccuguucaacaaggugacccuggccgacgccggcuucaucaagcaguacggcgacugccucggggacaucgcggcccgcgaccugaucugcgcccagaaguucaacggccugaccgugcucccgccccugcugaccgacgagaugaucgcccaguacaccagcgcccuccuggcggggaccaucacguccggcuggaccuucggggccggcgccgcccugcagauccccuucgcgaugcagauggccuaccgguucaacggcaucggggucacccagaacgugcucuacgagaaccagaagcugaucgccaaccaguucaacagcgccaucggcaagauccaggacucccugagcuccaccgccagcgcgcucgggaagcugcaggacguggucaaccagaacgcccaggcccugaacacgcucgugaagcagcuguccagcaacuucggcgccaucuccagcgugcugaacgacauccucucccgccuggacaaggucgaggccgaggugcagaucgaccggcugaucaccgggcgccuccagagccugcagaccuacgugacccagcagcugauccgggcggccgagauccgcgccagcgccaaccucgccgcgaccaagauguccgagugcguccugggccagagcaagcggguggacuucugcggcaagggguaccaccugauguccuucccccagagcgccccgcacggcguggucuuccuccacgugacguacguccccgcccaggagaagaacuucaccaccgcccccgcgaucugccacgacgggaaggcccacuucccccgcgagggcguguucguguccaacgggacccacugguucgucacgcagcggaacuucuacgagccgcagaucaucaccaccgacaacaccuucgugagcggcaacugcgacguggucaucggcaucgugaacaacacgguguacgacccccugcagcccgagcuggacuccuucaaggaggagcucgacaaguacuucaagaaccacaccagccccgacgucgaccugggggacaucuccggcaucaacgccagcguggugaacauccagaaggagaucgaccgccugaacgaggucgccaagaaccucaacgagucccugaucgaccugcaggagcucgggaaguacgagcaguacaucaaguggccgugguacaucuggcugggcuucaucgccggccugaucgcgaucgugauggugaccaucaugcucugcugcaugaccagcugcugcuccugccugaaggggugcugcagcugcggcuccugcugcaaguucgacgaggacgacagcgagcccguccugaagggggugaagcuccacuacacgugaggacuaguguccaccugucccuccugggcugcuggauugucucguuuuccugccaaauaaacaggaucagcgcuuuacagaucuaaaaaaaaaaaaaaaaaaaaaaaaaaaaaaaaaaaaaaaaaaaaaaaaaaaaaaaaaaaaaaaaaaaaaaaaaaaaaaaaaaaaaaaaaaaaaaaaaaaa

SEQ ID NO: 25176 - RNA, 4105 nt, Artificial Sequence
  SARS-CoV-2/Wuhan/WIV05/2019__EPI_ISL_402128 spike protein mRNA gc (1-1273)(Y453F_D614G)
aggagacccgugacccggaaguuguacggcuacgcgacuuucccucccacaaacccucgcgcccuuccuuuccuacuugggcccggcagaaagcuuaccauguucguguuccugguccuccugccccuggugagcucccagugcgugaaccucaccacccgcacgcagcugccgcccgccuacaccaacagcuucacccggggcgucuacuaccccgacaagguguuccgcuccagcgugcugcacuccacccaggaccucuuccugcccuucuucagcaacgucacgugguuccacgccauccacguguccgggaccaacggcaccaagcgguucgacaacccggugcugcccuucaacgacggggucuacuucgcgagcaccgagaaguccaacaucauccgcggcuggaucuucgggacgacccucgacagcaagacccagucccugcugaucgugaacaacgccaccaacguggucaucaaggugugcgaguuccaguucugcaacgaccccuuccucggcguguacuaccacaagaacaacaagagcuggauggaguccgaguuccgggucuacagcuccgccaacaacugcacguucgaguacgugagccagcccuuccugauggaccuggagggcaagcaggggaacuucaagaaccuccgcgaguucguguucaagaacaucgacggcuacuucaagaucuacuccaagcacaccccgaucaaccugguccgggaccugccccagggguucagcgcccucgagccccugguggaccugcccaucggcaucaacaucacccgcuuccagacccuccuggcccugcaccgguccuaccucacgccgggggacagcagcuccggcuggaccgcgggcgccgccgccuacuacgugggguaccugcagccccgcaccuuccugcucaaguacaacgagaacggcaccaucacggacgcggucgacugcgcccuggacccccugagcgagaccaagugcacccucaaguccuucaccguggagaaggggaucuaccagacgagcaacuuccgggugcagcccaccgaguccaucguccgcuucccgaacaucaccaaccugugccccuucggcgagguguucaacgccacccgguucgccagcgucuacgccuggaaccgcaagcggaucuccaacugcguggcggacuacagcgugcuguacaacuccgccagcuucuccacguucaagugcuacggcgucagccccaccaagcucaacgaccugugcuucaccaacguguacgccgacuccuucgugauccgcggggacgagguccggcagaucgcccccggccagaccgggaagaucgccgacuacaacuacaagcugccggacgacuucacgggcugcgugaucgcguggaacagcaacaaccucgacuccaaggucgggggcaacuacaacuaccuguuccgccuguuccgcaagagcaaccucaagcccuucgagcgggacaucuccaccgagaucuaccaggccggcagcacccccugcaacgggguggagggcuucaacugcuacuucccccugcaguccuacggguuccagccgaccaacggcgugggguaccagcccuaccggguggucgugcugagcuucgagcuccugcacgcccccgccacggugugcggccccaagaaguccaccaaccuggucaagaacaagugcgugaacuucaacuucaacggccucaccgggaccggcgugcugaccgagagcaacaagaaguuccugccguuccagcaguucgggcgcgacaucgccgacacgaccgacgcgguccgcgacccccagacccuggagauccucgacaucacccccugcagcuucggcgggguguccgugaucacgccgggcaccaacaccagcaaccaggucgccgugcuguaccagggcgugaacugcaccgagguccccguggccauccacgccgaccagcugacgcccaccuggcggguguacuccaccggcagcaacgucuuccagacccgcgccgggugccucaucggcgcggagcacgugaacaacuccuacgagugcgacauccccaucggggccggcaucugcgccagcuaccagacgcagaccaacuccccgcggcgcgcccggagcguggcgucccagagcaucaucgccuacaccaugucccugggcgccgagaacagcgucgccuacuccaacaacagcaucgccauccccaccaacuucacgaucuccgugaccaccgagauccugcccgugagcaugaccaagacgagcgucgacugcaccauguacaucugcggggacuccaccgagugcagcaaccuccugcugcaguacggcuccuucugcacccagcucaaccgcgcgcugacggggaucgccguggagcaggacaagaacacccaggagguguucgcccaggucaagcagaucuacaagacgcccccgaucaaggacuucggcggguucaacuucagccagauccugcccgaccccuccaagcccagcaagcgguccuucaucgaggaccuccuguucaacaaggugacccuggccgacgccggcuucaucaagcaguacggcgacugccucggggacaucgcggcccgcgaccugaucugcgcccagaaguucaacggccugaccgugcucccgccccugcugaccgacgagaugaucgcccaguacaccagcgcccuccuggcggggaccaucacguccggcuggaccuucggggccggcgccgcccugcagauccccuucgcgaugcagauggccuaccgguucaacggcaucggggucacccagaacgugcucuacgagaaccagaagcugaucgccaaccaguucaacagcgccaucggcaagauccaggacucccugagcuccaccgccagcgcgcucgggaagcugcaggacguggucaaccagaacgcccaggcccugaacacgcucgugaagcagcuguccagcaacuucggcgccaucuccagcgugcugaacgacauccucucccgccuggacaaggucgaggccgaggugcagaucgaccggcugaucaccgggcgccuccagagccugcagaccuacgugacccagcagcugauccgggcggccgagauccgcgccagcgccaaccucgccgcgaccaagauguccgagugcguccugggccagagcaagcggguggacuucugcggcaagggguaccaccugauguccuucccccagagcgccccgcacggcguggucuuccuccacgugacguacguccccgcccaggagaagaacuucaccaccgcccccgcgaucugccacgacgggaaggcccacuucccccgcgagggcguguucguguccaacgggacccacugguucgucacgcagcggaacuucuacgagccgcagaucaucaccaccgacaacaccuucgugagcggcaacugcgacguggucaucggcaucgugaacaacacgguguacgacccccugcagcccgagcuggacuccuucaaggaggagcucgacaaguacuucaagaaccacaccagccccgacgucgaccugggggacaucuccggcaucaacgccagcguggugaacauccagaaggagaucgaccgccugaacgaggucgccaagaaccucaacgagucccugaucgaccugcaggagcucgggaaguacgagcaguacaucaaguggccgugguacaucuggcugggcuucaucgccggccugaucgcgaucgugauggugaccaucaugcucugcugcaugaccagcugcugcuccugccugaaggggugcugcagcugcggcuccugcugcaaguucgacgaggacgacagcgagcccguccugaagggggugaagcuccacuacacgugaggacuaguguccaccugucccuccugggcugcuggauugucucguuuuccugccaaauaaacaggaucagcgcuuuacagaucuaaaaaaaaaaaaaaaaaaaaaaaaaaaaaaaaaaaaaaaaaaaaaaaaaaaaaaaaaaaaaaaaaaaaaaaaaaaaaaaaaaaaaaaaaaaaaaaaaaaa

SEQ ID NO: 25177 - RNA, 4105 nt, Artificial Sequence
  SARS-CoV-2/Wuhan/WIV05/2019__EPI_ISL_402128 spike protein mRNA gc (1-1273)(D614G_I692V)
aggagacccgugacccggaaguuguacggcuacgcgacuuucccucccacaaacccucgcgcccuuccuuuccuacuugggcccggcagaaagcuuaccauguucguguuccugguccuccugccccuggugagcucccagugcgugaaccucaccacccgcacgcagcugccgcccgccuacaccaacagcuucacccggggcgucuacuaccccgacaagguguuccgcuccagcgugcugcacuccacccaggaccucuuccugcccuucuucagcaacgucacgugguuccacgccauccacguguccgggaccaacggcaccaagcgguucgacaacccggugcugcccuucaacgacggggucuacuucgcgagcaccgagaaguccaacaucauccgcggcuggaucuucgggacgacccucgacagcaagacccagucccugcugaucgugaacaacgccaccaacguggucaucaaggugugcgaguuccaguucugcaacgaccccuuccucggcguguacuaccacaagaacaacaagagcuggauggaguccgaguuccgggucuacagcuccgccaacaacugcacguucgaguacgugagccagcccuuccugauggaccuggagggcaagcaggggaacuucaagaaccuccgcgaguucguguucaagaacaucgacggcuacuucaagaucuacuccaagcacaccccgaucaaccugguccgggaccugccccagggguucagcgcccucgagccccugguggaccugcccaucggcaucaacaucacccgcuuccagacccuccuggcccugcaccgguccuaccucacgccgggggacagcagcuccggcuggaccgcgggcgccgccgccuacuacgugggguaccugcagccccgcaccuuccugcucaaguacaacgagaacggcaccaucacggacgcggucgacugcgcccuggacccccugagcgagaccaagugcacccucaaguccuucaccguggagaaggggaucuaccagacgagcaacuuccgggugcagcccaccgaguccaucguccgcuucccgaacaucaccaaccugugccccuucggcgagguguucaacgccacccgguucgccagcgucuacgccuggaaccgcaagcggaucuccaacugcguggcggacuacagcgugcuguacaacuccgccagcuucuccacguucaagugcuacggcgucagccccaccaagcucaacgaccugugcuucaccaacguguacgccgacuccuucgugauccgcggggacgagguccggcagaucgcccccggccagaccgggaagaucgccgacuacaacuacaagcugccggacgacuucacgggcugcgugaucgcguggaacagcaacaaccucgacuccaaggucgggggcaacuacaacuaccuguaccgccuguuccgcaagagcaaccucaagcccuucgagcgggacaucuccaccgagaucuaccaggccggcagcacccccugcaacgggguggagggcuucaacugcuacuucccccugcaguccuacggguuccagccgaccaacggcgugggguaccagcccuaccggguggucgugcugagcuucgagcuccugcacgcccccgccacggugugcggccccaagaaguccaccaaccuggucaagaacaagugcgugaacuucaacuucaacggccucaccgggaccggcgugcugaccgagagcaacaagaaguuccugccguuccagcaguucgggcgcgacaucgccgacacgaccgacgcgguccgcgacccccagacccuggagauccucgacaucacccccugcagcuucggcgggguguccgugaucacgccgggcaccaacaccagcaaccaggucgccgugcuguaccagggcgugaacugcaccgagguccccguggccauccacgccgaccagcugacgcccaccuggcggguguacuccaccggcagcaacgucuuccagacccgcgccgggugccucaucggcgcggagcacgugaacaacuccuacgagugcgacauccccaucggggccggcaucugcgccagcuaccagacgcagaccaacuccccgcggcgcgcccggagcguggcgucccagagcgucaucgccuacaccaugucccugggcgccgagaacagcgucgccuacuccaacaacagcaucgccauccccaccaacuucacgaucuccgugaccaccgagauccugcccgugagcaugaccaagacgagcgucgacugcaccauguacaucugcggggacuccaccgagugcagcaaccuccugcugcaguacggcuccuucugcacccagcucaaccgcgcgcugacggggaucgccguggagcaggacaagaacacccaggagguguucgcccaggucaagcagaucuacaagacgcccccgaucaaggacuucggcggguucaacuucagccagauccugcccgaccccuccaagcccagcaagcgguccuucaucgaggaccuccuguucaacaaggugacccuggccgacgccggcuucaucaagcaguacggcgacugccucggggacaucgcggcccgcgaccugaucugcgcccagaaguucaacggccugaccgugcucccgccccugcugaccgacgagaugaucgcccaguacaccagcgcccuccuggcggggaccaucacguccggcuggaccuucggggccggcgccgcccugcagauccccuucgcgaugcagauggccuaccgguucaacggcaucggggucacccagaacgugcucuacgagaaccagaagcugaucgccaaccaguucaacagcgccaucggcaagauccaggacucccugagcuccaccgccagcgcgcucgggaagcugcaggacguggucaaccagaacgcccaggcccugaacacgcucgugaagcagcuguccagcaacuucggcgccaucuccagcgugcugaacgacauccucucccgccuggacaaggucgaggccgaggugcagaucgaccggcugaucaccgggcgccuccagagccugcagaccuacgugacccagcagcugauccgggcggccgagauccgcgccagcgccaaccucgccgcgaccaagauguccgagugcguccugggccagagcaagcggguggacuucugcggcaagggguaccaccugauguccuucccccagagcgccccgcacggcguggucuuccuccacgugacguacguccccgcccaggagaagaacuucaccaccgcccccgcgaucugccacgacgggaaggcccacuucccccgcgagggcguguucguguccaacgggacccacugguucgucacgcagcggaacuucuacgagccgcagaucaucaccaccgacaacaccuucgugagcggcaacugcgacguggucaucggcaucgugaacaacacgguguacgacccccugcagcccgagcuggacuccuucaaggaggagcucgacaaguacuucaagaaccacaccagccccgacgucgaccugggggacaucuccggcaucaacgccagcguggugaacauccagaaggagaucgaccgccugaacgaggucgccaagaaccucaacgagucccugaucgaccugcaggagcucgggaaguacgagcaguacaucaaguggccgugguacaucuggcugggcuucaucgccggccugaucgcgaucgugauggugaccaucaugcucugcugcaugaccagcugcugcuccugccugaaggggugcugcagcugcggcuccugcugcaaguucgacgaggacgacagcgagcccguccugaagggggugaagcuccacuacacgugaggacuaguguccaccugucccuccugggcugcuggauugucucguuuuccugccaaauaaacaggaucagcgcuuuacagaucuaaaaaaaaaaaaaaaaaaaaaaaaaaaaaaaaaaaaaaaaaaaaaaaaaaaaaaaaaaaaaaaaaaaaaaaaaaaaaaaaaaaaaaaaaaaaaaaaaaaa

SEQ ID NO: 25178 - RNA, 4105 nt, Artificial Sequence
  SARS-CoV-2/Wuhan/WIV05/2019__EPI_ISL_402128 spike protein mRNA gc (1-1273)(D614G_M1229I)
aggagacccgugacccggaaguuguacggcuacgcgacuuucccucccacaaacccucgcgcccuuccuuuccuacuugggcccggcagaaagcuuaccauguucguguuccugguccuccugccccuggugagcucccagugcgugaaccucaccacccgcacgcagcugccgcccgccuacaccaacagcuucacccggggcgucuacuaccccgacaagguguuccgcuccagcgugcugcacuccacccaggaccucuuccugcccuucuucagcaacgucacgugguuccacgccauccacguguccgggaccaacggcaccaagcgguucgacaacccggugcugcccuucaacgacggggucuacuucgcgagcaccgagaaguccaacaucauccgcggcuggaucuucgggacgacccucgacagcaagacccagucccugcugaucgugaacaacgccaccaacguggucaucaaggugugcgaguuccaguucugcaacgaccccuuccucggcguguacuaccacaagaacaacaagagcuggauggaguccgaguuccgggucuacagcuccgccaacaacugcacguucgaguacgugagccagcccuuccugauggaccuggagggcaagcaggggaacuucaagaaccuccgcgaguucguguucaagaacaucgacggcuacuucaagaucuacuccaagcacaccccgaucaaccugguccgggaccugccccagggguucagcgcccucgagccccugguggaccugcccaucggcaucaacaucacccgcuuccagacccuccuggcccugcaccgguccuaccucacgccgggggacagcagcuccggcuggaccgcgggcgccgccgccuacuacgugggguaccugcagccccgcaccuuccugcucaaguacaacgagaacggcaccaucacggacgcggucgacugcgcccuggacccccugagcgagaccaagugcacccucaaguccuucaccguggagaaggggaucuaccagacgagcaacuuccgggugcagcccaccgaguccaucguccgcuucccgaacaucaccaaccugugccccuucggcgagguguucaacgccacccgguucgccagcgucuacgccuggaaccgcaagcggaucuccaacugcguggcggacuacagcgugcuguacaacuccgccagcuucuccacguucaagugcuacggcgucagccccaccaagcucaacgaccugugcuucaccaacguguacgccgacuccuucgugauccgcggggacgagguccggcagaucgcccccggccagaccgggaagaucgccgacuacaacuacaagcugccggacgacuucacgggcugcgugaucgcguggaacagcaacaaccucgacuccaaggucgggggcaacuacaacuaccuguaccgccuguuccgcaagagcaaccucaagcccuucgagcgggacaucuccaccgagaucuaccaggccggcagcacccccugcaacgggguggagggcuucaacugcuacuucccccugcaguccuacggguuccagccgaccaacggcgugggguaccagcccuaccggguggucgugcugagcuucgagcuccugcacgcccccgccacggugugcggccccaagaaguccaccaaccuggucaagaacaagugcgugaacuucaacuucaacggccucaccgggaccggcgugcugaccgagagcaacaagaaguuccugccguuccagcaguucgggcgcgacaucgccgacacgaccgacgcgguccgcgacccccagacccuggagauccucgacaucacccccugcagcuucggcgggguguccgugaucacgccgggcaccaacaccagcaaccaggucgccgugcuguaccagggcgugaacugcaccgagguccccguggccauccacgccgaccagcugacgcccaccuggcggguguacuccaccggcagcaacgucuuccagacccgcgccgggugccucaucggcgcggagcacgugaacaacuccuacgagugcgacauccccaucggggccggcaucugcgccagcuaccagacgcagaccaacuccccgcggcgcgcccggagcguggcgucccagagcaucaucgccuacaccaugucccugggcgccgagaacagcgucgccuacuccaacaacagcaucgccauccccaccaacuucacgaucuccgugaccaccgagauccugcccgugagcaugaccaagacgagcgucgacugcaccauguacaucugcggggacuccaccgagugcagcaaccuccugcugcaguacggcuccuucugcacccagcucaaccgcgcgcugacggggaucgccguggagcaggacaagaacacccaggagguguucgcccaggucaagcagaucuacaagacgcccccgaucaaggacuucggcggguucaacuucagccagauccugcccgaccccuccaagcccagcaagcgguccuucaucgaggaccuccuguucaacaaggugacccuggccgacgccggcuucaucaagcaguacggcgacugccucggggacaucgcggcccgcgaccugaucugcgcccagaaguucaacggccugaccgugcucccgccccugcugaccgacgagaugaucgcccaguacaccagcgcccuccuggcggggaccaucacguccggcuggaccuucggggccggcgccgcccugcagauccccuucgcgaugcagauggccuaccgguucaacggcaucggggucacccagaacgugcucuacgagaaccagaagcugaucgccaaccaguucaacagcgccaucggcaagauccaggacucccugagcuccaccgccagcgcgcucgggaagcugcaggacguggucaaccagaacgcccaggcccugaacacgcucgugaagcagcuguccagcaacuucggcgccaucuccagcgugcugaacgacauccucucccgccuggacaaggucgaggccgaggugcagaucgaccggcugaucaccgggcgccuccagagccugcagaccuacgugacccagcagcugauccgggcggccgagauccgcgccagcgccaaccucgccgcgaccaagauguccgagugcguccugggccagagcaagcggguggacuucugcggcaagggguaccaccugauguccuucccccagagcgccccgcacggcguggucuuccuccacgugacguacguccccgcccaggagaagaacuucaccaccgcccccgcgaucugccacgacgggaaggcccacuucccccgcgagggcguguucguguccaacgggacccacugguucgucacgcagcggaacuucuacgagccgcagaucaucaccaccgacaacaccuucgugagcggcaacugcgacguggucaucggcaucgugaacaacacgguguacgacccccugcagcccgagcuggacuccuucaaggaggagcucgacaaguacuucaagaaccacaccagccccgacgucgaccugggggacaucuccggcaucaacgccagcguggugaacauccagaaggagaucgaccgccugaacgaggucgccaagaaccucaacgagucccugaucgaccugcaggagcucgggaaguacgagcaguacaucaaguggccgugguacaucuggcugggcuucaucgccggccugaucgcgaucgugaucgugaccaucaugcucugcugcaugaccagcugcugcuccugccugaaggggugcugcagcugcggcuccugcugcaaguucgacgaggacgacagcgagcccguccugaagggggugaagcuccacuacacgugaggacuaguguccaccugucccuccugggcugcuggauugucucguuuuccugccaaauaaacaggaucagcgcuuuacagaucuaaaaaaaaaaaaaaaaaaaaaaaaaaaaaaaaaaaaaaaaaaaaaaaaaaaaaaaaaaaaaaaaaaaaaaaaaaaaaaaaaaaaaaaaaaaaaaaaaaaa

SEQ ID NO: 25179 - RNA, 4099 nt, Artificial Sequence
  SARS-CoV-2/Wuhan/WIV05/2019__EPI_ISL_402128 spike protein mRNA gc (1-1273)(H69del_V70del_A222V_Y453F_S477N_D614G_I692V)
aggagacccgugacccggaaguuguacggcuacgcgacuuucccucccacaaacccucgcgcccuuccuuuccuacuugggcccggcagaaagcuuaccauguucguguuccugguccuccugccccuggugagcucccagugcgugaaccucaccacccgcacgcagcugccgcccgccuacaccaacagcuucacccggggcgucuacuaccccgacaagguguuccgcuccagcgugcugcacuccacccaggaccucuuccugcccuucuucagcaacgucacgugguuccacgccaucuccgggaccaacggcaccaagcgguucgacaacccggugcugcccuucaacgacggggucuacuucgcgagcaccgagaaguccaacaucauccgcggcuggaucuucgggacgacccucgacagcaagacccagucccugcugaucgugaacaacgccaccaacguggucaucaaggugugcgaguuccaguucugcaacgaccccuuccucggcguguacuaccacaagaacaacaagagcuggauggaguccgaguuccgggucuacagcuccgccaacaacugcacguucgaguacgugagccagcccuuccugauggaccuggagggcaagcaggggaacuucaagaaccuccgcgaguucguguucaagaacaucgacggcuacuucaagaucuacuccaagcacaccccgaucaaccugguccgggaccugccccagggguucagcguccucgagccccugguggaccugcccaucggcaucaacaucacccgcuuccagacccuccuggcccugcaccgguccuaccucacgccgggggacagcagcuccggcuggaccgcgggcgccgccgccuacuacgugggguaccugcagccccgcaccuuccugcucaaguacaacgagaacggcaccaucacggacgcggucgacugcgcccuggacccccugagcgagaccaagugcacccucaaguccuucaccguggagaaggggaucuaccagacgagcaacuuccgggugcagcccaccgaguccaucguccgcuucccgaacaucaccaaccugugccccuucggcgagguguucaacgccacccgguucgccagcgucuacgccuggaaccgcaagcggaucuccaacugcguggcggacuacagcgugcuguacaacuccgccagcuucuccacguucaagugcuacggcgucagccccaccaagcucaacgaccugugcuucaccaacguguacgccgacuccuucgugauccgcggggacgagguccggcagaucgcccccggccagaccgggaagaucgccgacuacaacuacaagcugccggacgacuucacgggcugcgugaucgcguggaacagcaacaaccucgacuccaaggucgggggcaacuacaacuaccuguuccgccuguuccgcaagagcaaccucaagcccuucgagcgggacaucuccaccgagaucuaccaggccggcaacacccccugcaacgggguggagggcuucaacugcuacuucccccugcaguccuacggguuccagccgaccaacggcgugggguaccagcccuaccggguggucgugcugagcuucgagcuccugcacgcccccgccacggugugcggccccaagaaguccaccaaccuggucaagaacaagugcgugaacuucaacuucaacggccucaccgggaccggcgugcugaccgagagcaacaagaaguuccugccguuccagcaguucgggcgcgacaucgccgacacgaccgacgcgguccgcgacccccagacccuggagauccucgacaucacccccugcagcuucggcgggguguccgugaucacgccgggcaccaacaccagcaaccaggucgccgugcuguaccagggcgugaacugcaccgagguccccguggccauccacgccgaccagcugacgcccaccuggcggguguacuccaccggcagcaacgucuuccagacccgcgccgggugccucaucggcgcggagcacgugaacaacuccuacgagugcgacauccccaucggggccggcaucugcgccagcuaccagacgcagaccaacuccccgcggcgcgcccggagcguggcgucccagagcgucaucgccuacaccaugucccugggcgccgagaacagcgucgccuacuccaacaacagcaucgccauccccaccaacuucacgaucuccgugaccaccgagauccugcccgugagcaugaccaagacgagcgucgacugcaccauguacaucugcggggacuccaccgagugcagcaaccuccugcugcaguacggcuccuucugcacccagcucaaccgcgcgcugacggggaucgccguggagcaggacaagaacacccaggagguguucgcccaggucaagcagaucuacaagacgcccccgaucaaggacuucggcggguucaacuucagccagauccugcccgaccccuccaagcccagcaagcgguccuucaucgaggaccuccuguucaacaaggugacccuggccgacgccggcuucaucaagcaguacggcgacugccucggggacaucgcggcccgcgaccugaucugcgcccagaaguucaacggccugaccgugcucccgccccugcugaccgacgagaugaucgcccaguacaccagcgcccuccuggcggggaccaucacguccggcuggaccuucggggccggcgccgcccugcagauccccuucgcgaugcagauggccuaccgguucaacggcaucggggucacccagaacgugcucuacgagaaccagaagcugaucgccaaccaguucaacagcgccaucggcaagauccaggacucccugagcuccaccgccagcgcgcucgggaagcugcaggacguggucaaccagaacgcccaggcccugaacacgcucgugaagcagcuguccagcaacuucggcgccaucuccagcgugcugaacgacauccucucccgccuggacaaggucgaggccgaggugcagaucgaccggcugaucaccgggcgccuccagagccugcagaccuacgugacccagcagcugauccgggcggccgagauccgcgccagcgccaaccucgccgcgaccaagauguccgagugcguccugggccagagcaagcggguggacuucugcggcaagggguaccaccugauguccuucccccagagcgccccgcacggcguggucuuccuccacgugacguacguccccgcccaggagaagaacuucaccaccgcccccgcgaucugccacgacgggaaggcccacuucccccgcgagggcguguucguguccaacgggacccacugguucgucacgcagcggaacuucuacgagccgcagaucaucaccaccgacaacaccuucgugagcggcaacugcgacguggucaucggcaucgugaacaacacgguguacgacccccugcagcccgagcuggacuccuucaaggaggagcucgacaaguacuucaagaaccacaccagccccgacgucgaccugggggacaucuccggcaucaacgccagcguggugaacauccagaaggagaucgaccgccugaacgaggucgccaagaaccucaacgagucccugaucgaccugcaggagcucgggaaguacgagcaguacaucaaguggccgugguacaucuggcugggcuucaucgccggccugaucgcgaucgugauggugaccaucaugcucugcugcaugaccagcugcugcuccugccugaaggggugcugcagcugcggcuccugcugcaaguucgacgaggacgacagcgagcccguccugaagggggugaagcuccacuacacgugaggacuaguguccaccugucccuccugggcugcuggauugucucguuuuccugccaaauaaacaggaucagcgcuuuacagaucuaaaaaaaaaaaaaaaaaaaaaaaaaaaaaaaaaaaaaaaaaaaaaaaaaaaaaaaaaaaaaaaaaaaaaaaaaaaaaaaaaaaaaaaaaaaaaaaaaaaa

SEQ ID NO: 25180 - RNA, 4099 nt, Artificial Sequence
  SARS-CoV-2/Wuhan/WIV05/2019__EPI_ISL_402128 spike protein mRNA gc (1-1273)(H69del_V70del_Y453F_D614G_I692V_M1229I)
aggagacccgugacccggaaguuguacggcuacgcgacuuucccucccacaaacccucgcgcccuuccuuuccuacuugggcccggcagaaagcuuaccauguucguguuccugguccuccugccccuggugagcucccagugcgugaaccucaccacccgcacgcagcugccgcccgccuacaccaacagcuucacccggggcgucuacuaccccgacaagguguuccgcuccagcgugcugcacuccacccaggaccucuuccugcccuucuucagcaacgucacgugguuccacgccaucuccgggaccaacggcaccaagcgguucgacaacccggugcugcccuucaacgacggggucuacuucgcgagcaccgagaaguccaacaucauccgcggcuggaucuucgggacgacccucgacagcaagacccagucccugcugaucgugaacaacgccaccaacguggucaucaaggugugcgaguuccaguucugcaacgaccccuuccucggcguguacuaccacaagaacaacaagagcuggauggaguccgaguuccgggucuacagcuccgccaacaacugcacguucgaguacgugagccagcccuuccugauggaccuggagggcaagcaggggaacuucaagaaccuccgcgaguucguguucaagaacaucgacggcuacuucaagaucuacuccaagcacaccccgaucaaccugguccgggaccugccccagggguucagcgcccucgagccccugguggaccugcccaucggcaucaacaucacccgcuuccagacccuccuggcccugcaccgguccuaccucacgccgggggacagcagcuccggcuggaccgcgggcgccgccgccuacuacgugggguaccugcagccccgcaccuuccugcucaaguacaacgagaacggcaccaucacggacgcggucgacugcgcccuggacccccugagcgagaccaagugcacccucaaguccuucaccguggagaaggggaucuaccagacgagcaacuuccgggugcagcccaccgaguccaucguccgcuucccgaacaucaccaaccugugccccuucggcgagguguucaacgccacccgguucgccagcgucuacgccuggaaccgcaagcggaucuccaacugcguggcggacuacagcgugcuguacaacuccgccagcuucuccacguucaagugcuacggcgucagccccaccaagcucaacgaccugugcuucaccaacguguacgccgacuccuucgugauccgcggggacgagguccggcagaucgcccccggccagaccgggaagaucgccgacuacaacuacaagcugccggacgacuucacgggcugcgugaucgcguggaacagcaacaaccucgacuccaaggucgggggcaacuacaacuaccuguuccgccuguuccgcaagagcaaccucaagcccuucgagcgggacaucuccaccgagaucuaccaggccggcagcacccccugcaacgggguggagggcuucaacugcuacuucccccugcaguccuacggguuccagccgaccaacggcgugggguaccagcccuaccggguggucgugcugagcuucgagcuccugcacgcccccgccacggugugcggccccaagaaguccaccaaccuggucaagaacaagugcgugaacuucaacuucaacggccucaccgggaccggcgugcugaccgagagcaacaagaaguuccugccguuccagcaguucgggcgcgacaucgccgacacgaccgacgcgguccgcgacccccagacccuggagauccucgacaucacccccugcagcuucggcgggguguccgugaucacgccgggcaccaacaccagcaaccaggucgccgugcuguaccagggcgugaacugcaccgagguccccguggccauccacgccgaccagcugacgcccaccuggcggguguacuccaccggcagcaacgucuuccagacccgcgccgggugccucaucggcgcggagcacgugaacaacuccuacgagugcgacauccccaucggggccggcaucugcgccagcuaccagacgcagaccaacuccccgcggcgcgcccggagcguggcgucccagagcgugaucgccuacaccaugucccugggcgccgagaacagcgucgccuacuccaacaacagcaucgccauccccaccaacuucacgaucuccgugaccaccgagauccugcccgugagcaugaccaagacgagcgucgacugcaccauguacaucugcggggacuccaccgagugcagcaaccuccugcugcaguacggcuccuucugcacccagcucaaccgcgcgcugacggggaucgccguggagcaggacaagaacacccaggagguguucgcccaggucaagcagaucuacaagacgcccccgaucaaggacuucggcggguucaacuucagccagauccugcccgaccccuccaagcccagcaagcgguccuucaucgaggaccuccuguucaacaaggugacccuggccgacgccggcuucaucaagcaguacggcgacugccucggggacaucgcggcccgcgaccugaucugcgcccagaaguucaacggccugaccgugcucccgccccugcugaccgacgagaugaucgcccaguacaccagcgcccuccuggcggggaccaucacguccggcuggaccuucggggccggcgccgcccugcagauccccuucgcgaugcagauggccuaccgguucaacggcaucggggucacccagaacgugcucuacgagaaccagaagcugaucgccaaccaguucaacagcgccaucggcaagauccaggacucccugagcuccaccgccagcgcgcucgggaagcugcaggacguggucaaccagaacgcccaggcccugaacacgcucgugaagcagcuguccagcaacuucggcgccaucuccagcgugcugaacgacauccucucccgccuggacaaggucgaggccgaggugcagaucgaccggcugaucaccgggcgccuccagagccugcagaccuacgugacccagcagcugauccgggcggccgagauccgcgccagcgccaaccucgccgcgaccaagauguccgagugcguccugggccagagcaagcggguggacuucugcggcaagggguaccaccugauguccuucccccagagcgccccgcacggcguggucuuccuccacgugacguacguccccgcccaggagaagaacuucaccaccgcccccgcgaucugccacgacgggaaggcccacuucccccgcgagggcguguucguguccaacgggacccacugguucgucacgcagcggaacuucuacgagccgcagaucaucaccaccgacaacaccuucgugagcggcaacugcgacguggucaucggcaucgugaacaacacgguguacgacccccugcagcccgagcuggacuccuucaaggaggagcucgacaaguacuucaagaaccacaccagccccgacgucgaccugggggacaucuccggcaucaacgccagcguggugaacauccagaaggagaucgaccgccugaacgaggucgccaagaaccucaacgagucccugaucgaccugcaggagcucgggaaguacgagcaguacaucaaguggccgugguacaucuggcugggcuucaucgccggccugaucgcgaucgugaucgugaccaucaugcucugcugcaugaccagcugcugcuccugccugaaggggugcugcagcugcggcuccugcugcaaguucgacgaggacgacagcgagcccguccugaagggggugaagcuccacuacacgugaggacuaguguccaccugucccuccugggcugcuggauugucucguuuuccugccaaauaaacaggaucagcgcuuuacagaucuaaaaaaaaaaaaaaaaaaaaaaaaaaaaaaaaaaaaaaaaaaaaaaaaaaaaaaaaaaaaaaaaaaaaaaaaaaaaaaaaaaaaaaaaaaaaaaaaaaaa

SEQ ID NO: 25181 - RNA, 4096 nt, Artificial Sequence
  SARS-CoV-2/Wuhan/WIV05/2019__EPI_ISL_402128 spike protein mRNA gc (1-1273)(H69del_V70del_Y144del_N501Y_A570D_D614G_P681H_T716I_S982 A_D1118H)
aggagacccgugacccggaaguuguacggcuacgcgacuuucccucccacaaacccucgcgcccuuccuuuccuacuugggcccggcagaaagcuuaccauguucguguuccugguccuccugccccuggugagcucccagugcgugaaccucaccacccgcacgcagcugccgcccgccuacaccaacagcuucacccggggcgucuacuaccccgacaagguguuccgcuccagcgugcugcacuccacccaggaccucuuccugcccuucuucagcaacgucacgugguuccacgccaucuccgggaccaacggcaccaagcgguucgacaacccggugcugcccuucaacgacggggucuacuucgcgagcaccgagaaguccaacaucauccgcggcuggaucuucgggacgacccucgacagcaagacccagucccugcugaucgugaacaacgccaccaacguggucaucaaggugugcgaguuccaguucugcaacgaccccuuccucggcguguaccacaagaacaacaagagcuggauggaguccgaguuccgggucuacagcuccgccaacaacugcacguucgaguacgugagccagcccuuccugauggaccuggagggcaagcaggggaacuucaagaaccuccgcgaguucguguucaagaacaucgacggcuacuucaagaucuacuccaagcacaccccgaucaaccugguccgggaccugccccagggguucagcgcccucgagccccugguggaccugcccaucggcaucaacaucacccgcuuccagacccuccuggcccugcaccgguccuaccucacgccgggggacagcagcuccggcuggaccgcgggcgccgccgccuacuacgugggguaccugcagccccgcaccuuccugcucaaguacaacgagaacggcaccaucacggacgcggucgacugcgcccuggacccccugagcgagaccaagugcacccucaaguccuucaccguggagaaggggaucuaccagacgagcaacuuccgggugcagcccaccgaguccaucguccgcuucccgaacaucaccaaccugugccccuucggcgagguguucaacgccacccgguucgccagcgucuacgccuggaaccgcaagcggaucuccaacugcguggcggacuacagcgugcuguacaacuccgccagcuucuccacguucaagugcuacggcgucagccccaccaagcucaacgaccugugcuucaccaacguguacgccgacuccuucgugauccgcggggacgagguccggcagaucgcccccggccagaccgggaagaucgccgacuacaacuacaagcugccggacgacuucacgggcugcgugaucgcguggaacagcaacaaccucgacuccaaggucgggggcaacuacaacuaccuguaccgccuguuccgcaagagcaaccucaagcccuucgagcgggacaucuccaccgagaucuaccaggccggcagcacccccugcaacgggguggagggcuucaacugcuacuucccccugcaguccuacggguuccagccgaccuacggcgugggguaccagcccuaccggguggucgugcugagcuucgagcuccugcacgcccccgccacggugugcggccccaagaaguccaccaaccuggucaagaacaagugcgugaacuucaacuucaacggccucaccgggaccggcgugcugaccgagagcaacaagaaguuccugccguuccagcaguucgggcgcgacaucgacgacacgaccgacgcgguccgcgacccccagacccuggagauccucgacaucacccccugcagcuucggcgggguguccgugaucacgccgggcaccaacaccagcaaccaggucgccgugcuguaccagggcgugaacugcaccgagguccccguggccauccacgccgaccagcugacgcccaccuggcggguguacuccaccggcagcaacgucuuccagacccgcgccgggugccucaucggcgcggagcacgugaacaacuccuacgagugcgacauccccaucggggccggcaucugcgccagcuaccagacgcagaccaacucccaccggcgcgcccggagcguggcgucccagagcaucaucgccuacaccaugucccugggcgccgagaacagcgucgccuacuccaacaacagcaucgccauccccaucaacuucacgaucuccgugaccaccgagauccugcccgugagcaugaccaagacgagcgucgacugcaccauguacaucugcggggacuccaccgagugcagcaaccuccugcugcaguacggcuccuucugcacccagcucaaccgcgcgcugacggggaucgccguggagcaggacaagaacacccaggagguguucgcccaggucaagcagaucuacaagacgcccccgaucaaggacuucggcggguucaacuucagccagauccugcccgaccccuccaagcccagcaagcgguccuucaucgaggaccuccuguucaacaaggugacccuggccgacgccggcuucaucaagcaguacggcgacugccucggggacaucgcggcccgcgaccugaucugcgcccagaaguucaacggccugaccgugcucccgccccugcugaccgacgagaugaucgcccaguacaccagcgcccuccuggcggggaccaucacguccggcuggaccuucggggccggcgccgcccugcagauccccuucgcgaugcagauggccuaccgguucaacggcaucggggucacccagaacgugcucuacgagaaccagaagcugaucgccaaccaguucaacagcgccaucggcaagauccaggacucccugagcuccaccgccagcgcgcucgggaagcugcaggacguggucaaccagaacgcccaggcccugaacacgcucgugaagcagcuguccagcaacuucggcgccaucuccagcgugcugaacgacauccucgcccgccuggacaaggucgaggccgaggugcagaucgaccggcugaucaccgggcgccuccagagccugcagaccuacgugacccagcagcugauccgggcggccgagauccgcgccagcgccaaccucgccgcgaccaagauguccgagugcguccugggccagagcaagcggguggacuucugcggcaagggguaccaccugauguccuucccccagagcgccccgcacggcguggucuuccuccacgugacguacguccccgcccaggagaagaacuucaccaccgcccccgcgaucugccacgacgggaaggcccacuucccccgcgagggcguguucguguccaacgggacccacugguucgucacgcagcggaacuucuacgagccgcagaucaucaccacccacaacaccuucgugagcggcaacugcgacguggucaucggcaucgugaacaacacgguguacgacccccugcagcccgagcuggacuccuucaaggaggagcucgacaaguacuucaagaaccacaccagccccgacgucgaccugggggacaucuccggcaucaacgccagcguggugaacauccagaaggagaucgaccgccugaacgaggucgccaagaaccucaacgagucccugaucgaccugcaggagcucgggaaguacgagcaguacaucaaguggccgugguacaucuggcugggcuucaucgccggccugaucgcgaucgugauggugaccaucaugcucugcugcaugaccagcugcugcuccugccugaaggggugcugcagcugcggcuccugcugcaaguucgacgaggacgacagcgagcccguccugaagggggugaagcuccacuacacgugaggacuaguguccaccugucccuccugggcugcuggauugucucguuuuccugccaaauaaacaggaucagcgcuuuacagaucuaaaaaaaaaaaaaaaaaaaaaaaaaaaaaaaaaaaaaaaaaaaaaaaaaaaaaaaaaaaaaaaaaaaaaaaaaaaaaaaaaaaaaaaaaaaaaaaaaaaa

SEQ ID NO: 25182 - RNA, 4105 nt, Artificial Sequence
  SARS-CoV-2/Wuhan/WIV05/2019__EPI_ISL_402128 spike protein mRNA gc (1-1273)(K417N_E484K_N501Y_D614G)
aggagacccgugacccggaaguuguacggcuacgcgacuuucccucccacaaacccucgcgcccuuccuuuccuacuugggcccggcagaaagcuuaccauguucguguuccugguccuccugccccuggugagcucccagugcgugaaccucaccacccgcacgcagcugccgcccgccuacaccaacagcuucacccggggcgucuacuaccccgacaagguguuccgcuccagcgugcugcacuccacccaggaccucuuccugcccuucuucagcaacgucacgugguuccacgccauccacguguccgggaccaacggcaccaagcgguucgacaacccggugcugcccuucaacgacggggucuacuucgcgagcaccgagaaguccaacaucauccgcggcuggaucuucgggacgacccucgacagcaagacccagucccugcugaucgugaacaacgccaccaacguggucaucaaggugugcgaguuccaguucugcaacgaccccuuccucggcguguacuaccacaagaacaacaagagcuggauggaguccgaguuccgggucuacagcuccgccaacaacugcacguucgaguacgugagccagcccuuccugauggaccuggagggcaagcaggggaacuucaagaaccuccgcgaguucguguucaagaacaucgacggcuacuucaagaucuacuccaagcacaccccgaucaaccugguccgggaccugccccagggguucagcgcccucgagccccugguggaccugcccaucggcaucaacaucacccgcuuccagacccuccuggcccugcaccgguccuaccucacgccgggggacagcagcuccggcuggaccgcgggcgccgccgccuacuacgugggguaccugcagccccgcaccuuccugcucaaguacaacgagaacggcaccaucacggacgcggucgacugcgcccuggacccccugagcgagaccaagugcacccucaaguccuucaccguggagaaggggaucuaccagacgagcaacuuccgggugcagcccaccgaguccaucguccgcuucccgaacaucaccaaccugugccccuucggcgagguguucaacgccacccgguucgccagcgucuacgccuggaaccgcaagcggaucuccaacugcguggcggacuacagcgugcuguacaacuccgccagcuucuccacguucaagugcuacggcgucagccccaccaagcucaacgaccugugcuucaccaacguguacgccgacuccuucgugauccgcggggacgagguccggcagaucgcccccggccagaccgggaacaucgccgacuacaacuacaagcugccggacgacuucacgggcugcgugaucgcguggaacagcaacaaccucgacuccaaggucgggggcaacuacaacuaccuguaccgccuguuccgcaagagcaaccucaagcccuucgagcgggacaucuccaccgagaucuaccaggccggcagcacccccugcaacggggugaagggcuucaacugcuacuucccccugcaguccuacggguuccagccgaccuacggcgugggguaccagcccuaccggguggucgugcugagcuucgagcuccugcacgcccccgccacggugugcggccccaagaaguccaccaaccuggucaagaacaagugcgugaacuucaacuucaacggccucaccgggaccggcgugcugaccgagagcaacaagaaguuccugccguuccagcaguucgggcgcgacaucgccgacacgaccgacgcgguccgcgacccccagacccuggagauccucgacaucacccccugcagcuucggcgggguguccgugaucacgccgggcaccaacaccagcaaccaggucgccgugcuguaccagggcgugaacugcaccgagguccccguggccauccacgccgaccagcugacgcccaccuggcggguguacuccaccggcagcaacgucuuccagacccgcgccgggugccucaucggcgcggagcacgugaacaacuccuacgagugcgacauccccaucggggccggcaucugcgccagcuaccagacgcagaccaacuccccgcggcgcgcccggagcguggcgucccagagcaucaucgccuacaccaugucccugggcgccgagaacagcgucgccuacuccaacaacagcaucgccauccccaccaacuucacgaucuccgugaccaccgagauccugcccgugagcaugaccaagacgagcgucgacugcaccauguacaucugcggggacuccaccgagugcagcaaccuccugcugcaguacggcuccuucugcacccagcucaaccgcgcgcugacggggaucgccguggagcaggacaagaacacccaggagguguucgcccaggucaagcagaucuacaagacgcccccgaucaaggacuucggcggguucaacuucagccagauccugcccgaccccuccaagcccagcaagcgguccuucaucgaggaccuccuguucaacaaggugacccuggccgacgccggcuucaucaagcaguacggcgacugccucggggacaucgcggcccgcgaccugaucugcgcccagaaguucaacggccugaccgugcucccgccccugcugaccgacgagaugaucgcccaguacaccagcgcccuccuggcggggaccaucacguccggcuggaccuucggggccggcgccgcccugcagauccccuucgcgaugcagauggccuaccgguucaacggcaucggggucacccagaacgugcucuacgagaaccagaagcugaucgccaaccaguucaacagcgccaucggcaagauccaggacucccugagcuccaccgccagcgcgcucgggaagcugcaggacguggucaaccagaacgcccaggcccugaacacgcucgugaagcagcuguccagcaacuucggcgccaucuccagcgugcugaacgacauccucucccgccuggacaaggucgaggccgaggugcagaucgaccggcugaucaccgggcgccuccagagccugcagaccuacgugacccagcagcugauccgggcggccgagauccgcgccagcgccaaccucgccgcgaccaagauguccgagugcguccugggccagagcaagcggguggacuucugcggcaagggguaccaccugauguccuucccccagagcgccccgcacggcguggucuuccuccacgugacguacguccccgcccaggagaagaacuucaccaccgcccccgcgaucugccacgacgggaaggcccacuucccccgcgagggcguguucguguccaacgggacccacugguucgucacgcagcggaacuucuacgagccgcagaucaucaccaccgacaacaccuucgugagcggcaacugcgacguggucaucggcaucgugaacaacacgguguacgacccccugcagcccgagcuggacuccuucaaggaggagcucgacaaguacuucaagaaccacaccagccccgacgucgaccugggggacaucuccggcaucaacgccagcguggugaacauccagaaggagaucgaccgccugaacgaggucgccaagaaccucaacgagucccugaucgaccugcaggagcucgggaaguacgagcaguacaucaaguggccgugguacaucuggcugggcuucaucgccggccugaucgcgaucgugauggugaccaucaugcucugcugcaugaccagcugcugcuccugccugaaggggugcugcagcugcggcuccugcugcaaguucgacgaggacgacagcgagcccguccugaagggggugaagcuccacuacacgugaggacuaguguccaccugucccuccugggcugcuggauugucucguuuuccugccaaauaaacaggaucagcgcuuuacagaucuaaaaaaaaaaaaaaaaaaaaaaaaaaaaaaaaaaaaaaaaaaaaaaaaaaaaaaaaaaaaaaaaaaaaaaaaaaaaaaaaaaaaaaaaaaaaaaaaaaaa

SEQ ID NO: 25183 - RNA, 4096 nt, Artificial Sequence
  SARS-CoV-2/Wuhan/WIV05/2019__EPI_ISL_402128 spike protein mRNA gc (1-1273)(L18F_D80A_D215G_L242del_A243del_L244del_R246I_K417N_E484 K_N501Y_D614G_A701V)
aggagacccgugacccggaaguuguacggcuacgcgacuuucccucccacaaacccucgcgcccuuccuuuccuacuugggcccggcagaaagcuuaccauguucguguuccugguccuccugccccuggugagcucccagugcgugaacuucaccacccgcacgcagcugccgcccgccuacaccaacagcuucacccggggcgucuacuaccccgacaagguguuccgcuccagcgugcugcacuccacccaggaccucuuccugcccuucuucagcaacgucacgugguuccacgccauccacguguccgggaccaacggcaccaagcgguucgccaacccggugcugcccuucaacgacggggucuacuucgcgagcaccgagaaguccaacaucauccgcggcuggaucuucgggacgacccucgacagcaagacccagucccugcugaucgugaacaacgccaccaacguggucaucaaggugugcgaguuccaguucugcaacgaccccuuccucggcguguacuaccacaagaacaacaagagcuggauggaguccgaguuccgggucuacagcuccgccaacaacugcacguucgaguacgugagccagcccuuccugauggaccuggagggcaagcaggggaacuucaagaaccuccgcgaguucguguucaagaacaucgacggcuacuucaagaucuacuccaagcacaccccgaucaaccugguccggggccugccccagggguucagcgcccucgagccccugguggaccugcccaucggcaucaacaucacccgcuuccagacccuccacaucuccuaccucacgccgggggacagcagcuccggcuggaccgcgggcgccgccgccuacuacgugggguaccugcagccccgcaccuuccugcucaaguacaacgagaacggcaccaucacggacgcggucgacugcgcccuggacccccugagcgagaccaagugcacccucaaguccuucaccguggagaaggggaucuaccagacgagcaacuuccgggugcagcccaccgaguccaucguccgcuucccgaacaucaccaaccugugccccuucggcgagguguucaacgccacccgguucgccagcgucuacgccuggaaccgcaagcggaucuccaacugcguggcggacuacagcgugcuguacaacuccgccagcuucuccacguucaagugcuacggcgucagccccaccaagcucaacgaccugugcuucaccaacguguacgccgacuccuucgugauccgcggggacgagguccggcagaucgcccccggccagaccgggaacaucgccgacuacaacuacaagcugccggacgacuucacgggcugcgugaucgcguggaacagcaacaaccucgacuccaaggucgggggcaacuacaacuaccuguaccgccuguuccgcaagagcaaccucaagcccuucgagcgggacaucuccaccgagaucuaccaggccggcagcacccccugcaacggggugaagggcuucaacugcuacuucccccugcaguccuacggguuccagccgaccuacggcgugggguaccagcccuaccggguggucgugcugagcuucgagcuccugcacgcccccgccacggugugcggccccaagaaguccaccaaccuggucaagaacaagugcgugaacuucaacuucaacggccucaccgggaccggcgugcugaccgagagcaacaagaaguuccugccguuccagcaguucgggcgcgacaucgccgacacgaccgacgcgguccgcgacccccagacccuggagauccucgacaucacccccugcagcuucggcgggguguccgugaucacgccgggcaccaacaccagcaaccaggucgccgugcuguaccagggcgugaacugcaccgagguccccguggccauccacgccgaccagcugacgcccaccuggcggguguacuccaccggcagcaacgucuuccagacccgcgccgggugccucaucggcgcggagcacgugaacaacuccuacgagugcgacauccccaucggggccggcaucugcgccagcuaccagacgcagaccaacuccccgcggcgcgcccggagcguggcgucccagagcaucaucgccuacaccaugucccugggcguggagaacagcgucgccuacuccaacaacagcaucgccauccccaccaacuucacgaucuccgugaccaccgagauccugcccgugagcaugaccaagacgagcgucgacugcaccauguacaucugcggggacuccaccgagugcagcaaccuccugcugcaguacggcuccuucugcacccagcucaaccgcgcgcugacggggaucgccguggagcaggacaagaacacccaggagguguucgcccaggucaagcagaucuacaagacgcccccgaucaaggacuucggcggguucaacuucagccagauccugcccgaccccuccaagcccagcaagcgguccuucaucgaggaccuccuguucaacaaggugacccuggccgacgccggcuucaucaagcaguacggcgacugccucggggacaucgcggcccgcgaccugaucugcgcccagaaguucaacggccugaccgugcucccgccccugcugaccgacgagaugaucgcccaguacaccagcgcccuccuggcggggaccaucacguccggcuggaccuucggggccggcgccgcccugcagauccccuucgcgaugcagauggccuaccgguucaacggcaucggggucacccagaacgugcucuacgagaaccagaagcugaucgccaaccaguucaacagcgccaucggcaagauccaggacucccugagcuccaccgccagcgcgcucgggaagcugcaggacguggucaaccagaacgcccaggcccugaacacgcucgugaagcagcuguccagcaacuucggcgccaucuccagcgugcugaacgacauccucucccgccuggacaaggucgaggccgaggugcagaucgaccggcugaucaccgggcgccuccagagccugcagaccuacgugacccagcagcugauccgggcggccgagauccgcgccagcgccaaccucgccgcgaccaagauguccgagugcguccugggccagagcaagcggguggacuucugcggcaagggguaccaccugauguccuucccccagagcgccccgcacggcguggucuuccuccacgugacguacguccccgcccaggagaagaacuucaccaccgcccccgcgaucugccacgacgggaaggcccacuucccccgcgagggcguguucguguccaacgggacccacugguucgucacgcagcggaacuucuacgagccgcagaucaucaccaccgacaacaccuucgugagcggcaacugcgacguggucaucggcaucgugaacaacacgguguacgacccccugcagcccgagcuggacuccuucaaggaggagcucgacaaguacuucaagaaccacaccagccccgacgucgaccugggggacaucuccggcaucaacgccagcguggugaacauccagaaggagaucgaccgccugaacgaggucgccaagaaccucaacgagucccugaucgaccugcaggagcucgggaaguacgagcaguacaucaaguggccgugguacaucuggcugggcuucaucgccggccugaucgcgaucgugauggugaccaucaugcucugcugcaugaccagcugcugcuccugccugaaggggugcugcagcugcggcuccugcugcaaguucgacgaggacgacagcgagcccguccugaagggggugaagcuccacuacacgugaggacuaguguccaccugucccuccugggcugcuggauugucucguuuuccugccaaauaaacaggaucagcgcuuuacagaucuaaaaaaaaaaaaaaaaaaaaaaaaaaaaaaaaaaaaaaaaaaaaaaaaaaaaaaaaaaaaaaaaaaaaaaaaaaaaaaaaaaaaaaaaaaaaaaaaaaaa

SEQ ID NO: 25184 - RNA, 4105 nt, Artificial Sequence
  SARS-CoV-2/Wuhan/WIV05/2019__EPI_ISL_402128 spike protein mRNA gc (1-1273)(E484K_D614G)
aggagacccgugacccggaaguuguacggcuacgcgacuuucccucccacaaacccucgcgcccuuccuuuccuacuugggcccggcagaaagcuuaccauguucguguuccugguccuccugccccuggugagcucccagugcgugaaccucaccacccgcacgcagcugccgcccgccuacaccaacagcuucacccggggcgucuacuaccccgacaagguguuccgcuccagcgugcugcacuccacccaggaccucuuccugcccuucuucagcaacgucacgugguuccacgccauccacguguccgggaccaacggcaccaagcgguucgacaacccggugcugcccuucaacgacggggucuacuucgcgagcaccgagaaguccaacaucauccgcggcuggaucuucgggacgacccucgacagcaagacccagucccugcugaucgugaacaacgccaccaacguggucaucaaggugugcgaguuccaguucugcaacgaccccuuccucggcguguacuaccacaagaacaacaagagcuggauggaguccgaguuccgggucuacagcuccgccaacaacugcacguucgaguacgugagccagcccuuccugauggaccuggagggcaagcaggggaacuucaagaaccuccgcgaguucguguucaagaacaucgacggcuacuucaagaucuacuccaagcacaccccgaucaaccugguccgggaccugccccagggguucagcgcccucgagccccugguggaccugcccaucggcaucaacaucacccgcuuccagacccuccuggcccugcaccgguccuaccucacgccgggggacagcagcuccggcuggaccgcgggcgccgccgccuacuacgugggguaccugcagccccgcaccuuccugcucaaguacaacgagaacggcaccaucacggacgcggucgacugcgcccuggacccccugagcgagaccaagugcacccucaaguccuucaccguggagaaggggaucuaccagacgagcaacuuccgggugcagcccaccgaguccaucguccgcuucccgaacaucaccaaccugugccccuucggcgagguguucaacgccacccgguucgccagcgucuacgccuggaaccgcaagcggaucuccaacugcguggcggacuacagcgugcuguacaacuccgccagcuucuccacguucaagugcuacggcgucagccccaccaagcucaacgaccugugcuucaccaacguguacgccgacuccuucgugauccgcggggacgagguccggcagaucgcccccggccagaccgggaagaucgccgacuacaacuacaagcugccggacgacuucacgggcugcgugaucgcguggaacagcaacaaccucgacuccaaggucgggggcaacuacaacuaccuguaccgccuguuccgcaagagcaaccucaagcccuucgagcgggacaucuccaccgagaucuaccaggccggcagcacccccugcaacggggugaagggcuucaacugcuacuucccccugcaguccuacggguuccagccgaccaacggcgugggguaccagcccuaccggguggucgugcugagcuucgagcuccugcacgcccccgccacggugugcggccccaagaaguccaccaaccuggucaagaacaagugcgugaacuucaacuucaacggccucaccgggaccggcgugcugaccgagagcaacaagaaguuccugccguuccagcaguucgggcgcgacaucgccgacacgaccgacgcgguccgcgacccccagacccuggagauccucgacaucacccccugcagcuucggcgggguguccgugaucacgccgggcaccaacaccagcaaccaggucgccgugcuguaccagggcgugaacugcaccgagguccccguggccauccacgccgaccagcugacgcccaccuggcggguguacuccaccggcagcaacgucuuccagacccgcgccgggugccucaucggcgcggagcacgugaacaacuccuacgagugcgacauccccaucggggccggcaucugcgccagcuaccagacgcagaccaacuccccgcggcgcgcccggagcguggcgucccagagcaucaucgccuacaccaugucccugggcgccgagaacagcgucgccuacuccaacaacagcaucgccauccccaccaacuucacgaucuccgugaccaccgagauccugcccgugagcaugaccaagacgagcgucgacugcaccauguacaucugcggggacuccaccgagugcagcaaccuccugcugcaguacggcuccuucugcacccagcucaaccgcgcgcugacggggaucgccguggagcaggacaagaacacccaggagguguucgcccaggucaagcagaucuacaagacgcccccgaucaaggacuucggcggguucaacuucagccagauccugcccgaccccuccaagcccagcaagcgguccuucaucgaggaccuccuguucaacaaggugacccuggccgacgccggcuucaucaagcaguacggcgacugccucggggacaucgcggcccgcgaccugaucugcgcccagaaguucaacggccugaccgugcucccgccccugcugaccgacgagaugaucgcccaguacaccagcgcccuccuggcggggaccaucacguccggcuggaccuucggggccggcgccgcccugcagauccccuucgcgaugcagauggccuaccgguucaacggcaucggggucacccagaacgugcucuacgagaaccagaagcugaucgccaaccaguucaacagcgccaucggcaagauccaggacucccugagcuccaccgccagcgcgcucgggaagcugcaggacguggucaaccagaacgcccaggcccugaacacgcucgugaagcagcuguccagcaacuucggcgccaucuccagcgugcugaacgacauccucucccgccuggacaaggucgaggccgaggugcagaucgaccggcugaucaccgggcgccuccagagccugcagaccuacgugacccagcagcugauccgggcggccgagauccgcgccagcgccaaccucgccgcgaccaagauguccgagugcguccugggccagagcaagcggguggacuucugcggcaagggguaccaccugauguccuucccccagagcgccccgcacggcguggucuuccuccacgugacguacguccccgcccaggagaagaacuucaccaccgcccccgcgaucugccacgacgggaaggcccacuucccccgcgagggcguguucguguccaacgggacccacugguucgucacgcagcggaacuucuacgagccgcagaucaucaccaccgacaacaccuucgugagcggcaacugcgacguggucaucggcaucgugaacaacacgguguacgacccccugcagcccgagcuggacuccuucaaggaggagcucgacaaguacuucaagaaccacaccagccccgacgucgaccugggggacaucuccggcaucaacgccagcguggugaacauccagaaggagaucgaccgccugaacgaggucgccaagaaccucaacgagucccugaucgaccugcaggagcucgggaaguacgagcaguacaucaaguggccgugguacaucuggcugggcuucaucgccggccugaucgcgaucgugauggugaccaucaugcucugcugcaugaccagcugcugcuccugccugaaggggugcugcagcugcggcuccugcugcaaguucgacgaggacgacagcgagcccguccugaagggggugaagcuccacuacacgugaggacuaguguccaccugucccuccugggcugcuggauugucucguuuuccugccaaauaaacaggaucagcgcuuuacagaucuaaaaaaaaaaaaaaaaaaaaaaaaaaaaaaaaaaaaaaaaaaaaaaaaaaaaaaaaaaaaaaaaaaaaaaaaaaaaaaaaaaaaaaaaaaaaaaaaaaaa

SEQ ID NO: 25185 - RNA, 4105 nt, Artificial Sequence
  SARS-CoV-2/Wuhan/WIV05/2019__EPI_ISL_402128 spike protein mRNA gc (1-1273)(L18F_T20N_P26S_D138Y_R190S_K417T_E484K_N501Y_D614G_H655Y _T1027I)
aggagacccgugacccggaaguuguacggcuacgcgacuuucccucccacaaacccucgcgcccuuccuuuccuacuugggcccggcagaaagcuuaccauguucguguuccugguccuccugccccuggugagcucccagugcgugaacuucaccaaccgcacgcagcugccgagcgccuacaccaacagcuucacccggggcgucuacuaccccgacaagguguuccgcuccagcgugcugcacuccacccaggaccucuuccugcccuucuucagcaacgucacgugguuccacgccauccacguguccgggaccaacggcaccaagcgguucgacaacccggugcugcccuucaacgacggggucuacuucgcgagcaccgagaaguccaacaucauccgcggcuggaucuucgggacgacccucgacagcaagacccagucccugcugaucgugaacaacgccaccaacguggucaucaaggugugcgaguuccaguucugcaacuaccccuuccucggcguguacuaccacaagaacaacaagagcuggauggaguccgaguuccgggucuacagcuccgccaacaacugcacguucgaguacgugagccagcccuuccugauggaccuggagggcaagcaggggaacuucaagaaccucagcgaguucguguucaagaacaucgacggcuacuucaagaucuacuccaagcacaccccgaucaaccugguccgggaccugccccagggguucagcgcccucgagccccugguggaccugcccaucggcaucaacaucacccgcuuccagacccuccuggcccugcaccgguccuaccucacgccgggggacagcagcuccggcuggaccgcgggcgccgccgccuacuacgugggguaccugcagccccgcaccuuccugcucaaguacaacgagaacggcaccaucacggacgcggucgacugcgcccuggacccccugagcgagaccaagugcacccucaaguccuucaccguggagaaggggaucuaccagacgagcaacuuccgggugcagcccaccgaguccaucguccgcuucccgaacaucaccaaccugugccccuucggcgagguguucaacgccacccgguucgccagcgucuacgccuggaaccgcaagcggaucuccaacugcguggcggacuacagcgugcuguacaacuccgccagcuucuccacguucaagugcuacggcgucagccccaccaagcucaacgaccugugcuucaccaacguguacgccgacuccuucgugauccgcggggacgagguccggcagaucgcccccggccagaccgggaccaucgccgacuacaacuacaagcugccggacgacuucacgggcugcgugaucgcguggaacagcaacaaccucgacuccaaggucgggggcaacuacaacuaccuguaccgccuguuccgcaagagcaaccucaagcccuucgagcgggacaucuccaccgagaucuaccaggccggcagcacccccugcaacggggugaagggcuucaacugcuacuucccccugcaguccuacggguuccagccgaccuacggcgugggguaccagcccuaccggguggucgugcugagcuucgagcuccugcacgcccccgccacggugugcggccccaagaaguccaccaaccuggucaagaacaagugcgugaacuucaacuucaacggccucaccgggaccggcgugcugaccgagagcaacaagaaguuccugccguuccagcaguucgggcgcgacaucgccgacacgaccgacgcgguccgcgacccccagacccuggagauccucgacaucacccccugcagcuucggcgggguguccgugaucacgccgggcaccaacaccagcaaccaggucgccgugcuguaccagggcgugaacugcaccgagguccccguggccauccacgccgaccagcugacgcccaccuggcggguguacuccaccggcagcaacgucuuccagacccgcgccgggugccucaucggcgcggaguacgugaacaacuccuacgagugcgacauccccaucggggccggcaucugcgccagcuaccagacgcagaccaacuccccgcggcgcgcccggagcguggcgucccagagcaucaucgccuacaccaugucccugggcgccgagaacagcgucgccuacuccaacaacagcaucgccauccccaccaacuucacgaucuccgugaccaccgagauccugcccgugagcaugaccaagacgagcgucgacugcaccauguacaucugcggggacuccaccgagugcagcaaccuccugcugcaguacggcuccuucugcacccagcucaaccgcgcgcugacggggaucgccguggagcaggacaagaacacccaggagguguucgcccaggucaagcagaucuacaagacgcccccgaucaaggacuucggcggguucaacuucagccagauccugcccgaccccuccaagcccagcaagcgguccuucaucgaggaccuccuguucaacaaggugacccuggccgacgccggcuucaucaagcaguacggcgacugccucggggacaucgcggcccgcgaccugaucugcgcccagaaguucaacggccugaccgugcucccgccccugcugaccgacgagaugaucgcccaguacaccagcgcccuccuggcggggaccaucacguccggcuggaccuucggggccggcgccgcccugcagauccccuucgcgaugcagauggccuaccgguucaacggcaucggggucacccagaacgugcucuacgagaaccagaagcugaucgccaaccaguucaacagcgccaucggcaagauccaggacucccugagcuccaccgccagcgcgcucgggaagcugcaggacguggucaaccagaacgcccaggcccugaacacgcucgugaagcagcuguccagcaacuucggcgccaucuccagcgugcugaacgacauccucucccgccuggacaaggucgaggccgaggugcagaucgaccggcugaucaccgggcgccuccagagccugcagaccuacgugacccagcagcugauccgggcggccgagauccgcgccagcgccaaccucgccgcgaucaagauguccgagugcguccugggccagagcaagcggguggacuucugcggcaagggguaccaccugauguccuucccccagagcgccccgcacggcguggucuuccuccacgugacguacguccccgcccaggagaagaacuucaccaccgcccccgcgaucugccacgacgggaaggcccacuucccccgcgagggcguguucguguccaacgggacccacugguucgucacgcagcggaacuucuacgagccgcagaucaucaccaccgacaacaccuucgugagcggcaacugcgacguggucaucggcaucgugaacaacacgguguacgacccccugcagcccgagcuggacuccuucaaggaggagcucgacaaguacuucaagaaccacaccagccccgacgucgaccugggggacaucuccggcaucaacgccagcguggugaacauccagaaggagaucgaccgccugaacgaggucgccaagaaccucaacgagucccugaucgaccugcaggagcucgggaaguacgagcaguacaucaaguggccgugguacaucuggcugggcuucaucgccggccugaucgcgaucgugauggugaccaucaugcucugcugcaugaccagcugcugcuccugccugaaggggugcugcagcugcggcuccugcugcaaguucgacgaggacgacagcgagcccguccugaagggggugaagcuccacuacacgugaggacuaguguccaccugucccuccugggcugcuggauugucucguuuuccugccaaauaaacaggaucagcgcuuuacagaucuaaaaaaaaaaaaaaaaaaaaaaaaaaaaaaaaaaaaaaaaaaaaaaaaaaaaaaaaaaaaaaaaaaaaaaaaaaaaaaaaaaaaaaaaaaaaaaaaaaaa

SEQ ID NO: 25186 - RNA, 4105 nt, Artificial Sequence
  SARS-CoV-2/Wuhan/WIV05/2019__EPI_ISL_402128 spike protein mRNA gc (1-1273)(S13I_W152C_L452R_D614G)
aggagacccgugacccggaaguuguacggcuacgcgacuuucccucccacaaacccucgcgcccuuccuuuccuacuugggcccggcagaaagcuuaccauguucguguuccugguccuccugccccuggugagcauccagugcgugaaccucaccacccgcacgcagcugccgcccgccuacaccaacagcuucacccggggcgucuacuaccccgacaagguguuccgcuccagcgugcugcacuccacccaggaccucuuccugcccuucuucagcaacgucacgugguuccacgccauccacguguccgggaccaacggcaccaagcgguucgacaacccggugcugcccuucaacgacggggucuacuucgcgagcaccgagaaguccaacaucauccgcggcuggaucuucgggacgacccucgacagcaagacccagucccugcugaucgugaacaacgccaccaacguggucaucaaggugugcgaguuccaguucugcaacgaccccuuccucggcguguacuaccacaagaacaacaagagcugcauggaguccgaguuccgggucuacagcuccgccaacaacugcacguucgaguacgugagccagcccuuccugauggaccuggagggcaagcaggggaacuucaagaaccuccgcgaguucguguucaagaacaucgacggcuacuucaagaucuacuccaagcacaccccgaucaaccugguccgggaccugccccagggguucagcgcccucgagccccugguggaccugcccaucggcaucaacaucacccgcuuccagacccuccuggcccugcaccgguccuaccucacgccgggggacagcagcuccggcuggaccgcgggcgccgccgccuacuacgugggguaccugcagccccgcaccuuccugcucaaguacaacgagaacggcaccaucacggacgcggucgacugcgcccuggacccccugagcgagaccaagugcacccucaaguccuucaccguggagaaggggaucuaccagacgagcaacuuccgggugcagcccaccgaguccaucguccgcuucccgaacaucaccaaccugugccccuucggcgagguguucaacgccacccgguucgccagcgucuacgccuggaaccgcaagcggaucuccaacugcguggcggacuacagcgugcuguacaacuccgccagcuucuccacguucaagugcuacggcgucagccccaccaagcucaacgaccugugcuucaccaacguguacgccgacuccuucgugauccgcggggacgagguccggcagaucgcccccggccagaccgggaagaucgccgacuacaacuacaagcugccggacgacuucacgggcugcgugaucgcguggaacagcaacaaccucgacuccaaggucgggggcaacuacaacuaccgcuaccgccuguuccgcaagagcaaccucaagcccuucgagcgggacaucuccaccgagaucuaccaggccggcagcacccccugcaacgggguggagggcuucaacugcuacuucccccugcaguccuacggguuccagccgaccaacggcgugggguaccagcccuaccggguggucgugcugagcuucgagcuccugcacgcccccgccacggugugcggccccaagaaguccaccaaccuggucaagaacaagugcgugaacuucaacuucaacggccucaccgggaccggcgugcugaccgagagcaacaagaaguuccugccguuccagcaguucgggcgcgacaucgccgacacgaccgacgcgguccgcgacccccagacccuggagauccucgacaucacccccugcagcuucggcgggguguccgugaucacgccgggcaccaacaccagcaaccaggucgccgugcuguaccagggcgugaacugcaccgagguccccguggccauccacgccgaccagcugacgcccaccuggcggguguacuccaccggcagcaacgucuuccagacccgcgccgggugccucaucggcgcggagcacgugaacaacuccuacgagugcgacauccccaucggggccggcaucugcgccagcuaccagacgcagaccaacuccccgcggcgcgcccggagcguggcgucccagagcaucaucgccuacaccaugucccugggcgccgagaacagcgucgccuacuccaacaacagcaucgccauccccaccaacuucacgaucuccgugaccaccgagauccugcccgugagcaugaccaagacgagcgucgacugcaccauguacaucugcggggacuccaccgagugcagcaaccuccugcugcaguacggcuccuucugcacccagcucaaccgcgcgcugacggggaucgccguggagcaggacaagaacacccaggagguguucgcccaggucaagcagaucuacaagacgcccccgaucaaggacuucggcggguucaacuucagccagauccugcccgaccccuccaagcccagcaagcgguccuucaucgaggaccuccuguucaacaaggugacccuggccgacgccggcuucaucaagcaguacggcgacugccucggggacaucgcggcccgcgaccugaucugcgcccagaaguucaacggccugaccgugcucccgccccugcugaccgacgagaugaucgcccaguacaccagcgcccuccuggcggggaccaucacguccggcuggaccuucggggccggcgccgcccugcagauccccuucgcgaugcagauggccuaccgguucaacggcaucggggucacccagaacgugcucuacgagaaccagaagcugaucgccaaccaguucaacagcgccaucggcaagauccaggacucccugagcuccaccgccagcgcgcucgggaagcugcaggacguggucaaccagaacgcccaggcccugaacacgcucgugaagcagcuguccagcaacuucggcgccaucuccagcgugcugaacgacauccucucccgccuggacaaggucgaggccgaggugcagaucgaccggcugaucaccgggcgccuccagagccugcagaccuacgugacccagcagcugauccgggcggccgagauccgcgccagcgccaaccucgccgcgaccaagauguccgagugcguccugggccagagcaagcggguggacuucugcggcaagggguaccaccugauguccuucccccagagcgccccgcacggcguggucuuccuccacgugacguacguccccgcccaggagaagaacuucaccaccgcccccgcgaucugccacgacgggaaggcccacuucccccgcgagggcguguucguguccaacgggacccacugguucgucacgcagcggaacuucuacgagccgcagaucaucaccaccgacaacaccuucgugagcggcaacugcgacguggucaucggcaucgugaacaacacgguguacgacccccugcagcccgagcuggacuccuucaaggaggagcucgacaaguacuucaagaaccacaccagccccgacgucgaccugggggacaucuccggcaucaacgccagcguggugaacauccagaaggagaucgaccgccugaacgaggucgccaagaaccucaacgagucccugaucgaccugcaggagcucgggaaguacgagcaguacaucaaguggccgugguacaucuggcugggcuucaucgccggccugaucgcgaucgugauggugaccaucaugcucugcugcaugaccagcugcugcuccugccugaaggggugcugcagcugcggcuccugcugcaaguucgacgaggacgacagcgagcccguccugaagggggugaagcuccacuacacgugaggacuaguguccaccugucccuccugggcugcuggauugucucguuuuccugccaaauaaacaggaucagcgcuuuacagaucuaaaaaaaaaaaaaaaaaaaaaaaaaaaaaaaaaaaaaaaaaaaaaaaaaaaaaaaaaaaaaaaaaaaaaaaaaaaaaaaaaaaaaaaaaaaaaaaaaaaa

SEQ ID NO: 25187 - RNA, 4105 nt, Artificial Sequence; identical to SEQ ID NO: 25169
  SARS-CoV-2/Wuhan/WIV05/2019__EPI_ISL_402128 spike protein mRNA gc (1-1273)

SEQ ID NO: 25188 - RNA, 4105 nt, Artificial Sequence
  SARS-CoV-2/Wuhan/WIV05/2019__EPI_ISL_402128 spike protein mRNA gc (1-1273)(D614G)
aggagacccgugacccggaaguuguacggcuacgcgacuuucccucccacaaacccucgcgcccuuccuuuccuacuugggcccggcagaaagcuuaccauguucguguuccugguccuccugccccuggugagcucccagugcgugaaccucaccacccgcacgcagcugccgcccgccuacaccaacagcuucacccggggcgucuacuaccccgacaagguguuccgcuccagcgugcugcacuccacccaggaccucuuccugcccuucuucagcaacgucacgugguuccacgccauccacguguccgggaccaacggcaccaagcgguucgacaacccggugcugcccuucaacgacggggucuacuucgcgagcaccgagaaguccaacaucauccgcggcuggaucuucgggacgacccucgacagcaagacccagucccugcugaucgugaacaacgccaccaacguggucaucaaggugugcgaguuccaguucugcaacgaccccuuccucggcguguacuaccacaagaacaacaagagcuggauggaguccgaguuccgggucuacagcuccgccaacaacugcacguucgaguacgugagccagcccuuccugauggaccuggagggcaagcaggggaacuucaagaaccuccgcgaguucguguucaagaacaucgacggcuacuucaagaucuacuccaagcacaccccgaucaaccugguccgggaccugccccagggguucagcgcccucgagccccugguggaccugcccaucggcaucaacaucacccgcuuccagacccuccuggcccugcaccgguccuaccucacgccgggggacagcagcuccggcuggaccgcgggcgccgccgccuacuacgugggguaccugcagccccgcaccuuccugcucaaguacaacgagaacggcaccaucacggacgcggucgacugcgcccuggacccccugagcgagaccaagugcacccucaaguccuucaccguggagaaggggaucuaccagacgagcaacuuccgggugcagcccaccgaguccaucguccgcuucccgaacaucaccaaccugugccccuucggcgagguguucaacgccacccgguucgccagcgucuacgccuggaaccgcaagcggaucuccaacugcguggcggacuacagcgugcuguacaacuccgccagcuucuccacguucaagugcuacggcgucagccccaccaagcucaacgaccugugcuucaccaacguguacgccgacuccuucgugauccgcggggacgagguccggcagaucgcccccggccagaccgggaagaucgccgacuacaacuacaagcugccggacgacuucacgggcugcgugaucgcguggaacagcaacaaccucgacuccaaggucgggggcaacuacaacuaccuguaccgccuguuccgcaagagcaaccucaagcccuucgagcgggacaucuccaccgagaucuaccaggccggcagcacccccugcaacgggguggagggcuucaacugcuacuucccccugcaguccuacggguuccagccgaccaacggcgugggguaccagcccuaccggguggucgugcugagcuucgagcuccugcacgcccccgccacggugugcggccccaagaaguccaccaaccuggucaagaacaagugcgugaacuucaacuucaacggccucaccgggaccggcgugcugaccgagagcaacaagaaguuccugccguuccagcaguucgggcgcgacaucgccgacacgaccgacgcgguccgcgacccccagacccuggagauccucgacaucacccccugcagcuucggcgggguguccgugaucacgccgggcaccaacaccagcaaccaggucgccgugcuguaccagggcgugaacugcaccgagguccccguggccauccacgccgaccagcugacgcccaccuggcggguguacuccaccgggagcaacgucuuccagacccgcgccggcugccucaucggggcggagcacgugaacaacuccuacgagugcgacauccccaucggcgccggcaucugcgccagcuaccagacgcagaccaacuccccgcggcgcgcccggagcguggcgucccagagcaucaucgccuacaccaugucccugggggccgagaacagcgucgccuacuccaacaacagcaucgccauccccaccaacuucacgaucuccgugaccaccgagauccugcccgugagcaugaccaagacgagcgucgacugcaccauguacaucugcggcgacuccaccgagugcagcaaccuccugcugcaguacggguccuucugcacccagcucaaccgcgcgcugacgggcaucgccguggagcaggacaagaacacccaggagguguucgcccaggucaagcagaucuacaagacgcccccgaucaaggacuucgggggcuucaacuucagccagauccugcccgaccccuccaagcccagcaagcgguccuucaucgaggaccuccuguucaacaaggugacccuggccgacgccggcuucaucaagcaguacggggacugccucggcgacaucgcggcccgcgaccugaucugcgcccagaaguucaacgggcugaccgugcucccgccccugcugaccgacgagaugaucgcccaguacaccagcgcccuccuggcgggcaccaucacguccggguggaccuucggcgccggcgccgcccugcagauccccuucgcgaugcagauggccuaccgguucaacgggaucggcgucacccagaacgugcucuacgagaaccagaagcugaucgccaaccaguucaacagcgccaucgggaagauccaggacucccugagcuccaccgccagcgcgcucggcaagcugcaggacguggucaaccagaacgcccaggcccugaacacgcucgugaagcagcuguccagcaacuucggggccaucuccagcgugcugaacgacauccucucccgccuggacaaggucgaggccgaggugcagaucgaccggcugaucaccggccgccuccagagccugcagaccuacgugacccagcagcugauccgggcggccgagauccgcgccagcgccaaccucgccgcgaccaagauguccgagugcguccugggccagagcaagcggguggacuucugcgggaagggcuaccaccugauguccuucccccagagcgccccgcacgggguggucuuccuccacgugacguacguccccgcccaggagaagaacuucaccaccgcccccgcgaucugccacgacggcaaggcccacuucccccgcgaggggguguucguguccaacggcacccacugguucgucacgcagcggaacuucuacgagccgcagaucaucaccaccgacaacaccuucgugagcggcaacugcgacguggucaucgggaucgugaacaacacgguguacgacccccugcagcccgagcuggacuccuucaaggaggagcucgacaaguacuucaagaaccacaccagccccgacgucgaccugggcgacaucuccgggaucaacgccagcguggugaacauccagaaggagaucgaccgccugaacgaggucgccaagaaccucaacgagucccugaucgaccugcaggagcucggcaaguacgagcaguacaucaaguggccgugguacaucuggcugggcuucaucgccgggcugaucgcgaucgugauggugaccaucaugcucugcugcaugaccagcugcugcuccugccugaagggcugcugcagcugcggguccugcugcaaguucgacgaggacgacagcgagcccguccugaagggcgugaagcuccacuacacgugaggacuaguguccaccugucccuccugggcugcuggauugucucguuuuccugccaaauaaacaggaucagcgcuuuacagaucuaaaaaaaaaaaaaaaaaaaaaaaaaaaaaaaaaaaaaaaaaaaaaaaaaaaaaaaaaaaaaaaaaaaaaaaaaaaaaaaaaaaaaaaaaaaaaaaaaaaa

SEQ ID NO: 25189 - RNA, 4105 nt, Artificial Sequence
  SARS-CoV-2/Wuhan/WIV05/2019__EPI_ISL_402128 spike protein mRNA gc (1-1273)(A222V_D614G)
aggagacccgugacccggaaguuguacggcuacgcgacuuucccucccacaaacccucgcgcccuuccuuuccuacuugggcccggcagaaagcuuaccauguucguguuccugguccuccugccccuggugagcucccagugcgugaaccucaccacccgcacgcagcugccgcccgccuacaccaacagcuucacccggggcgucuacuaccccgacaagguguuccgcuccagcgugcugcacuccacccaggaccucuuccugcccuucuucagcaacgucacgugguuccacgccauccacguguccgggaccaacggcaccaagcgguucgacaacccggugcugcccuucaacgacggggucuacuucgcgagcaccgagaaguccaacaucauccgcggcuggaucuucgggacgacccucgacagcaagacccagucccugcugaucgugaacaacgccaccaacguggucaucaaggugugcgaguuccaguucugcaacgaccccuuccucggcguguacuaccacaagaacaacaagagcuggauggaguccgaguuccgggucuacagcuccgccaacaacugcacguucgaguacgugagccagcccuuccugauggaccuggagggcaagcaggggaacuucaagaaccuccgcgaguucguguucaagaacaucgacggcuacuucaagaucuacuccaagcacaccccgaucaaccugguccgggaccugccccagggguucagcgugcucgagccccugguggaccugcccaucggcaucaacaucacccgcuuccagacccuccuggcccugcaccgguccuaccucacgccgggggacagcagcuccggcuggaccgccggcgcggccgccuacuacgucggguaccugcagccccgcaccuuccugcucaaguacaacgagaacggcaccaucacggacgccguggacugcgcgcuggacccccugagcgagaccaagugcacccucaaguccuucaccguggagaaggggaucuaccagacgagcaacuuccggguccagcccaccgaguccaucgugcgcuucccgaacaucaccaaccugugccccuucggcgaggucuucaacgccacccgguucgccagcguguacgccuggaaccgcaagcggaucuccaacugcguggccgacuacagcguccuguacaacuccgcgagcuucuccacguucaagugcuacggcgugagccccaccaagcucaacgaccugugcuucaccaacguguacgccgacuccuucgucauccgcggggacgaggugcggcagaucgcccccggccagaccgggaagaucgccgacuacaacuacaagcugccggacgacuucacgggcugcgugaucgccuggaacagcaacaaccucgacuccaaggucgggggcaacuacaacuaccuguaccgccuguuccgcaagagcaaccucaagcccuucgagcgggacaucuccaccgagaucuaccaggcgggcagcacccccugcaacgggguggagggcuucaacugcuacuucccccugcaguccuacggguuccagccgaccaacggcgugggguaccagcccuaccgggucguggugcugagcuucgagcuccugcacgcccccgccacggucugcggccccaagaaguccaccaaccuggugaagaacaagugcgugaacuucaacuucaacggccucaccgggaccggcguccugaccgagagcaacaagaaguuccugccguuccagcaguucgggcgcgacaucgccgacacgaccgacgccgugcgcgacccccagacccuggagauccucgacaucacccccugcagcuucggcgggguguccgucaucacgccgggcaccaacaccagcaaccagguggcggugcuguaccagggcgucaacugcaccgaggugcccguggccauccacgccgaccagcugacgcccaccuggcgggucuacuccaccgggagcaacguguuccagacccgcgccggcugccucaucggggccgagcacgugaacaacuccuacgagugcgacauccccaucggcgcgggcaucugcgccagcuaccagacgcagaccaacuccccgcggcgcgcccggagcgucgccucccagagcaucaucgcguacaccaugucccugggggccgagaacagcguggccuacuccaacaacagcaucgccauccccaccaacuucacgaucuccgugaccaccgagauccugcccgucagcaugaccaagacgagcguggacugcaccauguacaucugcggcgacuccaccgagugcagcaaccuccugcugcaguacggguccuucugcacccagcucaaccgcgcccugacgggcaucgcgguggagcaggacaagaacacccaggaggucuucgcccaggugaagcagaucuacaagacgcccccgaucaaggacuucgggggcuucaacuucagccagauccugcccgaccccuccaagcccagcaagcgguccuucaucgaggaccuccuguucaacaaggugacccuggccgacgccggcuucaucaagcaguacggggacugccucggcgacaucgccgcgcgcgaccugaucugcgcccagaaguucaacgggcugaccguccucccgccccugcugaccgacgagaugaucgcccaguacaccagcgcccuccuggccggcaccaucacguccggguggaccuucggcgcgggcgccgcccugcagauccccuucgccaugcagauggcguaccgguucaacgggaucggcgugacccagaacgugcucuacgagaaccagaagcugaucgccaaccaguucaacagcgccaucgggaagauccaggacucccugagcuccaccgccagcgcccucggcaagcugcaggacgucgugaaccagaacgcgcaggcccugaacacgcucgugaagcagcuguccagcaacuucggggccaucuccagcguccugaacgacauccucucccgccuggacaagguggaggccgaggugcagaucgaccggcugaucaccggccgccuccagagccugcagaccuacgucacccagcagcugauccgggccgcggagauccgcgccagcgccaaccucgccgccaccaagauguccgagugcgugcugggccagagcaagcggguggacuucugcgggaagggcuaccaccugauguccuucccccagagcgcgccgcacggggucguguuccuccacgucacguacgugcccgcccaggagaagaacuucaccaccgcccccgccaucugccacgacggcaaggcgcacuucccccgcgaggggguguucgucuccaacggcacccacugguucgugacgcagcggaacuucuacgagccgcagaucaucaccaccgacaacaccuucgugagcggcaacugcgacgucgugaucgggaucgugaacaacacggucuacgacccccugcagcccgagcuggacuccuucaaggaggagcucgacaaguacuucaagaaccacaccagccccgacguggaccugggcgacaucuccgggaucaacgccagcguggucaacauccagaaggagaucgaccgccugaacgagguggccaagaaccucaacgagucccugaucgaccugcaggagcucggcaaguacgagcaguacaucaaguggccgugguacaucuggcugggcuucaucgccgggcugaucgccaucgugauggucaccaucaugcucugcugcaugaccagcugcugcuccugccugaagggcugcugcagcugcggguccugcugcaaguucgacgaggacgacagcgagcccgugcugaagggcgugaagcuccacuacacgugaggacuaguguccaccugucccuccugggcugcuggauugucucguuuuccugccaaauaaacaggaucagcgcuuuacagaucuaaaaaaaaaaaaaaaaaaaaaaaaaaaaaaaaaaaaaaaaaaaaaaaaaaaaaaaaaaaaaaaaaaaaaaaaaaaaaaaaaaaaaaaaaaaaaaaaaaaa

SEQ ID NO: 25190 - RNA, 4105 nt, Artificial Sequence
  SARS-CoV-2/Wuhan/WIV05/2019__EPI_ISL_402128 spike protein mRNA gc (1-1273)(N439K_D614G)
aggagacccgugacccggaaguuguacggcuacgcgacuuucccucccacaaacccucgcgcccuuccuuuccuacuugggcccggcagaaagcuuaccauguucguguuccugguccuccugccccuggugagcucccagugcgugaaccucaccacccgcacgcagcugccgcccgccuacaccaacagcuucacccggggcgucuacuaccccgacaagguguuccgcuccagcgugcugcacuccacccaggaccucuuccugcccuucuucagcaacgucacgugguuccacgccauccacguguccgggaccaacggcaccaagcgguucgacaacccggugcugcccuucaacgacggggucuacuucgcgagcaccgagaaguccaacaucauccgcggcuggaucuucgggacgacccucgacagcaagacccagucccugcugaucgugaacaacgccaccaacguggucaucaaggugugcgaguuccaguucugcaacgaccccuuccucggcguguacuaccacaagaacaacaagagcuggauggaguccgaguuccgggucuacagcuccgccaacaacugcacguucgaguacgugagccagcccuuccugauggaccuggagggcaagcaggggaacuucaagaaccuccgcgaguucguguucaagaacaucgacggcuacuucaagaucuacuccaagcacaccccgaucaaccugguccgggaccugccccagggguucagcgcccucgagccccugguggaccugcccaucggcaucaacaucacccgcuuccagacccuccuggcccugcaccgguccuaccucacgccgggggacagcagcuccggcuggaccgcgggcgccgccgccuacuacgugggguaccugcagccccgcaccuuccugcucaaguacaacgagaacggcaccaucacggacgcggucgacugcgcccuggacccccugagcgagaccaagugcacccucaaguccuucaccguggagaaggggaucuaccagacgagcaacuuccgggugcagcccaccgaguccaucguccgcuucccgaacaucaccaaccugugccccuucggcgagguguucaacgccacccgguucgccagcgucuacgccuggaaccgcaagcggaucuccaacugcguggcggacuacagcgugcuguacaacuccgccagcuucuccacguucaagugcuacggcgucagccccaccaagcucaacgaccugugcuucaccaacguguacgccgacuccuucgugauccgcggggacgagguccggcagaucgcccccggccagaccgggaagaucgccgacuacaacuacaagcugccggacgacuucacgggcugcgugaucgcguggaacagcaagaaccucgacuccaaggucgggggcaacuacaacuaccuguaccgccuguuccgcaagagcaaccucaagcccuucgagcgggacaucuccaccgagaucuaccaggccggcagcacccccugcaacgggguggagggcuucaacugcuacuucccccugcaguccuacggguuccagccgaccaacggcgugggguaccagcccuaccggguggucgugcugagcuucgagcuccugcacgcccccgccacggugugcggccccaagaaguccaccaaccuggucaagaacaagugcgugaacuucaacuucaacggccucaccgggaccggcgugcugaccgagagcaacaagaaguuccugccguuccagcaguucgggcgcgacaucgccgacacgaccgacgcgguccgcgacccccagacccuggagauccucgacaucacccccugcagcuucggcgggguguccgugaucacgccgggcaccaacaccagcaaccaggucgccgugcuguaccagggcgugaacugcaccgagguccccguggccauccacgccgaccagcugacgcccaccuggcggguguacuccaccgggagcaacgucuuccagacccgcgccggcugccucaucggggcggagcacgugaacaacuccuacgagugcgacauccccaucggcgccggcaucugcgccagcuaccagacgcagaccaacuccccgcggcgcgcccggagcguggcgucccagagcaucaucgccuacaccaugucccugggggccgagaacagcgucgccuacuccaacaacagcaucgccauccccaccaacuucacgaucuccgugaccaccgagauccugcccgugagcaugaccaagacgagcgucgacugcaccauguacaucugcggcgacuccaccgagugcagcaaccuccugcugcaguacggguccuucugcacccagcucaaccgcgcgcugacgggcaucgccguggagcaggacaagaacacccaggagguguucgcccaggucaagcagaucuacaagacgcccccgaucaaggacuucgggggcuucaacuucagccagauccugcccgaccccuccaagcccagcaagcgguccuucaucgaggaccuccuguucaacaaggugacccuggccgacgccggcuucaucaagcaguacggggacugccucggcgacaucgcggcccgcgaccugaucugcgcccagaaguucaacgggcugaccgugcucccgccccugcugaccgacgagaugaucgcccaguacaccagcgcccuccuggcgggcaccaucacguccggguggaccuucggcgccggcgccgcccugcagauccccuucgcgaugcagauggccuaccgguucaacgggaucggcgucacccagaacgugcucuacgagaaccagaagcugaucgccaaccaguucaacagcgccaucgggaagauccaggacucccugagcuccaccgccagcgcgcucggcaagcugcaggacguggucaaccagaacgcccaggcccugaacacgcucgugaagcagcuguccagcaacuucggggccaucuccagcgugcugaacgacauccucucccgccuggacaaggucgaggccgaggugcagaucgaccggcugaucaccggccgccuccagagccugcagaccuacgugacccagcagcugauccgggcggccgagauccgcgccagcgccaaccucgccgcgaccaagauguccgagugcguccugggccagagcaagcggguggacuucugcgggaagggcuaccaccugauguccuucccccagagcgccccgcacgggguggucuuccuccacgugacguacguccccgcccaggagaagaacuucaccaccgcccccgcgaucugccacgacggcaaggcccacuucccccgcgaggggguguucguguccaacggcacccacugguucgucacgcagcggaacuucuacgagccgcagaucaucaccaccgacaacaccuucgugagcggcaacugcgacguggucaucgggaucgugaacaacacgguguacgacccccugcagcccgagcuggacuccuucaaggaggagcucgacaaguacuucaagaaccacaccagccccgacgucgaccugggcgacaucuccgggaucaacgccagcguggugaacauccagaaggagaucgaccgccugaacgaggucgccaagaaccucaacgagucccugaucgaccugcaggagcucggcaaguacgagcaguacaucaaguggccgugguacaucuggcugggcuucaucgccgggcugaucgcgaucgugauggugaccaucaugcucugcugcaugaccagcugcugcuccugccugaagggcugcugcagcugcggguccugcugcaaguucgacgaggacgacagcgagcccguccugaagggcgugaagcuccacuacacgugaggacuaguguccaccugucccuccugggcugcuggauugucucguuuuccugccaaauaaacaggaucagcgcuuuacagaucuaaaaaaaaaaaaaaaaaaaaaaaaaaaaaaaaaaaaaaaaaaaaaaaaaaaaaaaaaaaaaaaaaaaaaaaaaaaaaaaaaaaaaaaaaaaaaaaaaaaa

SEQ ID NO: 25191 - RNA, 4105 nt, Artificial Sequence
  SARS-CoV-2/Wuhan/WIV05/2019__EPI_ISL_402128 spike protein mRNA gc (1-1273)(S477N_D614G)
aggagacccgugacccggaaguuguacggcuacgcgacuuucccucccacaaacccucgcgcccuuccuuuccuacuugggcccggcagaaagcuuaccauguucguguuccugguccuccugccccuggugagcucccagugcgugaaccucaccacccgcacgcagcugccgcccgccuacaccaacagcuucacccggggcgucuacuaccccgacaagguguuccgcuccagcgugcugcacuccacccaggaccucuuccugcccuucuucagcaacgucacgugguuccacgccauccacguguccgggaccaacggcaccaagcgguucgacaacccggugcugcccuucaacgacggggucuacuucgcgagcaccgagaaguccaacaucauccgcggcuggaucuucgggacgacccucgacagcaagacccagucccugcugaucgugaacaacgccaccaacguggucaucaaggugugcgaguuccaguucugcaacgaccccuuccucggcguguacuaccacaagaacaacaagagcuggauggaguccgaguuccgggucuacagcuccgccaacaacugcacguucgaguacgugagccagcccuuccugauggaccuggagggcaagcaggggaacuucaagaaccuccgcgaguucguguucaagaacaucgacggcuacuucaagaucuacuccaagcacaccccgaucaaccugguccgggaccugccccagggguucagcgcccucgagccccugguggaccugcccaucggcaucaacaucacccgcuuccagacccuccuggcccugcaccgguccuaccucacgccgggggacagcagcuccggcuggaccgcgggcgccgccgccuacuacgugggguaccugcagccccgcaccuuccugcucaaguacaacgagaacggcaccaucacggacgcggucgacugcgcccuggacccccugagcgagaccaagugcacccucaaguccuucaccguggagaaggggaucuaccagacgagcaacuuccgggugcagcccaccgaguccaucguccgcuucccgaacaucaccaaccugugccccuucggcgagguguucaacgccacccgguucgccagcgucuacgccuggaaccgcaagcggaucuccaacugcguggcggacuacagcgugcuguacaacuccgccagcuucuccacguucaagugcuacggcgucagccccaccaagcucaacgaccugugcuucaccaacguguacgccgacuccuucgugauccgcggggacgagguccggcagaucgcccccggccagaccgggaagaucgccgacuacaacuacaagcugccggacgacuucacgggcugcgugaucgcguggaacagcaacaaccucgacuccaaggucgggggcaacuacaacuaccuguaccgccuguuccgcaagagcaaccucaagcccuucgagcgggacaucuccaccgagaucuaccaggccggcaacacccccugcaacgggguggagggcuucaacugcuacuucccccugcagagcuacggguuccagccgaccaacggcgugggguaccagcccuaccggguggucgugcuguccuucgagcuccugcacgcccccgccacggugugcggccccaagaaguccaccaaccuggucaagaacaagugcgugaacuucaacuucaacggccucaccgggaccggcgugcugaccgagagcaacaagaaguuccugccguuccagcaguucgggcgcgacaucgccgacacgaccgacgcgguccgcgacccccagacccuggagauccucgacaucacccccugcagcuucggcggggugagcgugaucacgccgggcaccaacaccuccaaccaggucgccgugcuguaccagggcgugaacugcaccgagguccccguggccauccacgccgaccagcugacgcccaccuggcggguguacagcaccggguccaacgucuuccagacccgcgccggcugccucaucggggcggagcacgugaacaacagcuacgagugcgacauccccaucggcgccggcaucugcgccuccuaccagacgcagaccaacagcccgcggcgcgcccgguccguggcgagccaguccaucaucgccuacaccaugagccugggggccgagaacuccgucgccuacagcaacaacuccaucgccauccccaccaacuucacgaucagcgugaccaccgagauccugcccguguccaugaccaagacgagcgucgacugcaccauguacaucugcggcgacagcaccgagugcuccaaccuccugcugcaguacgggagcuucugcacccagcucaaccgcgcgcugacgggcaucgccguggagcaggacaagaacacccaggagguguucgcccaggucaagcagaucuacaagacgcccccgaucaaggacuucgggggcuucaacuucucccagauccugcccgaccccagcaagcccuccaagcggagcuucaucgaggaccuccuguucaacaaggugacccuggccgacgccggcuucaucaagcaguacggggacugccucggcgacaucgcggcccgcgaccugaucugcgcccagaaguucaacgggcugaccgugcucccgccccugcugaccgacgagaugaucgcccaguacaccuccgcccuccuggcgggcaccaucacgagcggguggaccuucggcgccggcgccgcccugcagauccccuucgcgaugcagauggccuaccgguucaacgggaucggcgucacccagaacgugcucuacgagaaccagaagcugaucgccaaccaguucaacuccgccaucgggaagauccaggacagccuguccagcaccgccuccgcgcucggcaagcugcaggacguggucaaccagaacgcccaggcccugaacacgcucgugaagcagcugagcuccaacuucggggccaucagcuccgugcugaacgacauccucagccgccuggacaaggucgaggccgaggugcagaucgaccggcugaucaccggccgccuccagucccugcagaccuacgugacccagcagcugauccgggcggccgagauccgcgccagcgccaaccucgccgcgaccaagaugagcgagugcguccugggccaguccaagcggguggacuucugcgggaagggcuaccaccugaugagcuucccccaguccgccccgcacgggguggucuuccuccacgugacguacguccccgcccaggagaagaacuucaccaccgcccccgcgaucugccacgacggcaaggcccacuucccccgcgaggggguguucgugagcaacggcacccacugguucgucacgcagcggaacuucuacgagccgcagaucaucaccaccgacaacaccuucguguccggcaacugcgacguggucaucgggaucgugaacaacacgguguacgacccccugcagcccgagcuggacagcuucaaggaggagcucgacaaguacuucaagaaccacaccucccccgacgucgaccugggcgacaucagcgggaucaacgccuccguggugaacauccagaaggagaucgaccgccugaacgaggucgccaagaaccucaacgagagccugaucgaccugcaggagcucggcaaguacgagcaguacaucaaguggccgugguacaucuggcugggcuucaucgccgggcugaucgcgaucgugauggugaccaucaugcucugcugcaugaccuccugcugcagcugccugaagggcugcugcuccugcgggagcugcugcaaguucgacgaggacgacuccgagcccguccugaagggcgugaagcuccacuacacgugaggacuaguguccaccugucccuccugggcugcuggauugucucguuuuccugccaaauaaacaggaucagcgcuuuacagaucuaaaaaaaaaaaaaaaaaaaaaaaaaaaaaaaaaaaaaaaaaaaaaaaaaaaaaaaaaaaaaaaaaaaaaaaaaaaaaaaaaaaaaaaaaaaaaaaaaaaa

SEQ ID NO: 25192 - RNA, 4105 nt, Artificial Sequence
  SARS-CoV-2/Wuhan/WIV05/2019__EPI_ISL_402128 spike protein mRNA gc (1-1273)(N501Y_D614G)
aggagacccgugacccggaaguuguacggcuacgcgacuuucccucccacaaacccucgcgcccuuccuuuccuacuugggcccggcagaaagcuuaccauguucguguuccugguccuccugccccuggugagcucccagugcgugaaccucaccacccgcacgcagcugccgcccgccuacaccaacagcuucacccggggcgucuacuaccccgacaagguguuccgcuccagcgugcugcacuccacccaggaccucuuccugcccuucuucagcaacgucacgugguuccacgccauccacguguccgggaccaacggcaccaagcgguucgacaacccggugcugcccuucaacgacggggucuacuucgcgagcaccgagaaguccaacaucauccgcggcuggaucuucgggacgacccucgacagcaagacccagucccugcugaucgugaacaacgccaccaacguggucaucaaggugugcgaguuccaguucugcaacgaccccuuccucggcguguacuaccacaagaacaacaagagcuggauggaguccgaguuccgggucuacagcuccgccaacaacugcacguucgaguacgugagccagcccuuccugauggaccuggagggcaagcaggggaacuucaagaaccuccgcgaguucguguucaagaacaucgacggcuacuucaagaucuacuccaagcacaccccgaucaaccugguccgggaccugccccagggguucagcgcccucgagccccugguggaccugcccaucggcaucaacaucacccgcuuccagacccuccuggcccugcaccgguccuaccucacgccgggggacagcagcuccggcuggaccgcgggcgccgccgccuacuacgugggguaccugcagccccgcaccuuccugcucaaguacaacgagaacggcaccaucacggacgcggucgacugcgcccuggacccccugagcgagaccaagugcacccucaaguccuucaccguggagaaggggaucuaccagacgagcaacuuccgggugcagcccaccgaguccaucguccgcuucccgaacaucaccaaccugugccccuucggcgagguguucaacgccacccgguucgccagcgucuacgccuggaaccgcaagcggaucuccaacugcguggcggacuacagcgugcuguacaacuccgccagcuucuccacguucaagugcuacggcgucagccccaccaagcucaacgaccugugcuucaccaacguguacgccgacuccuucgugauccgcggggacgagguccggcagaucgcccccggccagaccgggaagaucgccgacuacaacuacaagcugccggacgacuucacgggcugcgugaucgcguggaacagcaacaaccucgacuccaaggucgggggcaacuacaacuaccuguaccgccuguuccgcaagagcaaccucaagcccuucgagcgggacaucuccaccgagaucuaccaggccggcagcacccccugcaacgggguggagggcuucaacugcuacuucccccugcaguccuacggguuccagccgaccuacggcgugggguaccagcccuaccggguggucgugcugagcuucgagcuccugcacgcccccgccacggugugcggccccaagaaguccaccaaccuggucaagaacaagugcgugaacuucaacuucaacggccucaccgggaccggcgugcugaccgagagcaacaagaaguuccugccguuccagcaguucgggcgcgacaucgccgacacgaccgacgcgguccgcgacccccagacccuggagauccucgacaucacccccugcagcuucggcgggguguccgugaucacgccgggcaccaacaccagcaaccaggucgccgugcuguaccagggcgugaacugcaccgagguccccguggccauccacgccgaccagcugacgcccaccuggcggguguacuccaccgggagcaacgucuuccagacccgcgccggcugccucaucggggcggagcacgugaacaacuccuacgagugcgacauccccaucggcgccggcaucugcgccagcuaccagacgcagaccaacuccccgcggcgcgcccggagcguggcgucccagagcaucaucgccuacaccaugucccugggggccgagaacagcgucgccuacuccaacaacagcaucgccauccccaccaacuucacgaucuccgugaccaccgagauccugcccgugagcaugaccaagacgagcgucgacugcaccauguacaucugcggcgacuccaccgagugcagcaaccuccugcugcaguacggguccuucugcacccagcucaaccgcgcgcugacgggcaucgccguggagcaggacaagaacacccaggagguguucgcccaggucaagcagaucuacaagacgcccccgaucaaggacuucgggggcuucaacuucagccagauccugcccgaccccuccaagcccagcaagcgguccuucaucgaggaccuccuguucaacaaggugacccuggccgacgccggcuucaucaagcaguacggggacugccucggcgacaucgcggcccgcgaccugaucugcgcccagaaguucaacgggcugaccgugcucccgccccugcugaccgacgagaugaucgcccaguacaccagcgcccuccuggcgggcaccaucacguccggguggaccuucggcgccggcgccgcccugcagauccccuucgcgaugcagauggccuaccgguucaacgggaucggcgucacccagaacgugcucuacgagaaccagaagcugaucgccaaccaguucaacagcgccaucgggaagauccaggacucccugagcuccaccgccagcgcgcucggcaagcugcaggacguggucaaccagaacgcccaggcccugaacacgcucgugaagcagcuguccagcaacuucggggccaucuccagcgugcugaacgacauccucucccgccuggacaaggucgaggccgaggugcagaucgaccggcugaucaccggccgccuccagagccugcagaccuacgugacccagcagcugauccgggcggccgagauccgcgccagcgccaaccucgccgcgaccaagauguccgagugcguccugggccagagcaagcggguggacuucugcgggaagggcuaccaccugauguccuucccccagagcgccccgcacgggguggucuuccuccacgugacguacguccccgcccaggagaagaacuucaccaccgcccccgcgaucugccacgacggcaaggcccacuucccccgcgaggggguguucguguccaacggcacccacugguucgucacgcagcggaacuucuacgagccgcagaucaucaccaccgacaacaccuucgugagcggcaacugcgacguggucaucgggaucgugaacaacacgguguacgacccccugcagcccgagcuggacuccuucaaggaggagcucgacaaguacuucaagaaccacaccagccccgacgucgaccugggcgacaucuccgggaucaacgccagcguggugaacauccagaaggagaucgaccgccugaacgaggucgccaagaaccucaacgagucccugaucgaccugcaggagcucggcaaguacgagcaguacaucaaguggccgugguacaucuggcugggcuucaucgccgggcugaucgcgaucgugauggugaccaucaugcucugcugcaugaccagcugcugcuccugccugaagggcugcugcagcugcggguccugcugcaaguucgacgaggacgacagcgagcccguccugaagggcgugaagcuccacuacacgugaggacuaguguccaccugucccuccugggcugcuggauugucucguuuuccugccaaauaaacaggaucagcgcuuuacagaucuaaaaaaaaaaaaaaaaaaaaaaaaaaaaaaaaaaaaaaaaaaaaaaaaaaaaaaaaaaaaaaaaaaaaaaaaaaaaaaaaaaaaaaaaaaaaaaaaaaaa

SEQ ID NO: 25193 - RNA, 4099 nt, Artificial Sequence
  SARS-CoV-2/Wuhan/WIV05/2019__EPI_ISL_402128 spike protein mRNA gc (1-1273)(H69del_V70del_D614G)
aggagacccgugacccggaaguuguacggcuacgcgacuuucccucccacaaacccucgcgcccuuccuuuccuacuugggcccggcagaaagcuuaccauguucguguuccugguccuccugccccuggugagcucccagugcgugaaccucaccacccgcacgcagcugccgcccgccuacaccaacagcuucacccggggcgucuacuaccccgacaagguguuccgcuccagcgugcugcacuccacccaggaccucuuccugcccuucuucagcaacgucacgugguuccacgccaucuccgggaccaacggcaccaagcgguucgacaacccggugcugcccuucaacgacgggguguacuucgcgagcaccgagaaguccaacaucauccgcggcuggaucuucgggacgacccucgacagcaagacccagucccugcugaucgucaacaacgccaccaacguggugaucaaggucugcgaguuccaguucugcaacgaccccuuccucggcguguacuaccacaagaacaacaagagcuggauggaguccgaguuccggguguacagcuccgccaacaacugcacguucgaguacgucagccagcccuuccugauggaccuggagggcaagcaggggaacuucaagaaccuccgcgaguucguguucaagaacaucgacggcuacuucaagaucuacuccaagcacaccccgaucaaccuggugcgggaccugccccagggguucagcgcccucgagccccuggucgaccugcccaucggcaucaacaucacccgcuuccagacccuccuggcccugcaccgguccuaccucacgccgggggacagcagcuccggcuggaccgcgggcgccgccgccuacuacgugggguaccugcagccccgcaccuuccugcucaaguacaacgagaacggcaccaucacggacgcgguggacugcgcccuggacccccugagcgagaccaagugcacccucaaguccuucaccgucgagaaggggaucuaccagacgagcaacuuccgggugcagcccaccgaguccaucgugcgcuucccgaacaucaccaaccugugccccuucggcgaggucuucaacgccacccgguucgccagcguguacgccuggaaccgcaagcggaucuccaacugcgucgcggacuacagcgugcuguacaacuccgccagcuucuccacguucaagugcuacggcgugagccccaccaagcucaacgaccugugcuucaccaacgucuacgccgacuccuucgugauccgcggggacgaggugcggcagaucgcccccggccagaccgggaagaucgccgacuacaacuacaagcugccggacgacuucacgggcugcgucaucgcguggaacagcaacaaccucgacuccaaggucgggggcaacuacaacuaccuguaccgccuguuccgcaagagcaaccucaagcccuucgagcgggacaucuccaccgagaucuaccaggccggcagcacccccugcaacgggguggagggcuucaacugcuacuucccccugcaguccuacggguuccagccgaccaacggcgugggguaccagcccuaccggguggugguccugagcuucgagcuccugcacgcccccgccacggugugcggccccaagaaguccaccaaccuggugaagaacaagugcgucaacuucaacuucaacggccucaccgggaccggcgugcugaccgagagcaacaagaaguuccugccguuccagcaguucgggcgcgacaucgccgacacgaccgacgcggugcgcgacccccagacccuggagauccucgacaucacccccugcagcuucggcggggucuccgugaucacgccgggcaccaacaccagcaaccagguggccguccuguaccagggcgugaacugcaccgaggugcccgucgccauccacgccgaccagcugacgcccaccuggcggguguacuccaccgggagcaacguguuccagacccgcgccggcugccucaucggggcggagcacgucaacaacuccuacgagugcgacauccccaucggcgccggcaucugcgccagcuaccagacgcagaccaacuccccgcggcgcgcccggagcguggcgucccagagcaucaucgccuacaccaugucccugggggccgagaacagcguggccuacuccaacaacagcaucgccauccccaccaacuucacgaucuccgucaccaccgagauccugcccgugagcaugaccaagacgagcguggacugcaccauguacaucugcggcgacuccaccgagugcagcaaccuccugcugcaguacggguccuucugcacccagcucaaccgcgcgcugacgggcaucgccgucgagcaggacaagaacacccaggagguguucgcccaggugaagcagaucuacaagacgcccccgaucaaggacuucgggggcuucaacuucagccagauccugcccgaccccuccaagcccagcaagcgguccuucaucgaggaccuccuguucaacaaggucacccuggccgacgccggcuucaucaagcaguacggggacugccucggcgacaucgcggcccgcgaccugaucugcgcccagaaguucaacgggcugaccgugcucccgccccugcugaccgacgagaugaucgcccaguacaccagcgcccuccuggcgggcaccaucacguccggguggaccuucggcgccggcgccgcccugcagauccccuucgcgaugcagauggccuaccgguucaacgggaucggcgugacccagaacguccucuacgagaaccagaagcugaucgccaaccaguucaacagcgccaucgggaagauccaggacucccugagcuccaccgccagcgcgcucggcaagcugcaggacguggugaaccagaacgcccaggcccugaacacgcucgucaagcagcuguccagcaacuucggggccaucuccagcgugcugaacgacauccucucccgccuggacaagguggaggccgagguccagaucgaccggcugaucaccggccgccuccagagccugcagaccuacgugacccagcagcugauccgggcggccgagauccgcgccagcgccaaccucgccgcgaccaagauguccgagugcgugcugggccagagcaagcgggucgacuucugcgggaagggcuaccaccugauguccuucccccagagcgccccgcacggggugguguuccuccacgucacguacgugcccgcccaggagaagaacuucaccaccgcccccgcgaucugccacgacggcaaggcccacuucccccgcgagggggucuucguguccaacggcacccacugguucgugacgcagcggaacuucuacgagccgcagaucaucaccaccgacaacaccuucgucagcggcaacugcgacguggugaucgggaucgucaacaacacgguguacgacccccugcagcccgagcuggacuccuucaaggaggagcucgacaaguacuucaagaaccacaccagccccgacguggaccugggcgacaucuccgggaucaacgccagcgucgugaacauccagaaggagaucgaccgccugaacgagguggccaagaaccucaacgagucccugaucgaccugcaggagcucggcaaguacgagcaguacaucaaguggccgugguacaucuggcugggcuucaucgccgggcugaucgcgaucgucauggugaccaucaugcucugcugcaugaccagcugcugcuccugccugaagggcugcugcagcugcggguccugcugcaaguucgacgaggacgacagcgagcccgugcugaagggcgucaagcuccacuacacgugaggacuaguguccaccugucccuccugggcugcuggauugucucguuuuccugccaaauaaacaggaucagcgcuuuacagaucuaaaaaaaaaaaaaaaaaaaaaaaaaaaaaaaaaaaaaaaaaaaaaaaaaaaaaaaaaaaaaaaaaaaaaaaaaaaaaaaaaaaaaaaaaaaaaaaaaaaa

SEQ ID NO: 25194 - RNA, 4105 nt, Artificial Sequence
  SARS-CoV-2/Wuhan/WIV05/2019__EPI_ISL_402128 spike protein mRNA gc (1-1273)(Y453F_D614G)
aggagacccgugacccggaaguuguacggcuacgcgacuuucccucccacaaacccucgcgcccuuccuuuccuacuugggcccggcagaaagcuuaccauguucguguuccugguccuccugccccuggugagcucccagugcgugaaccucaccacccgcacgcagcugccgcccgccuacaccaacagcuucacccggggcgucuacuaccccgacaagguguuccgcuccagcgugcugcacuccacccaggaccucuuccugcccuucuucagcaacgucacgugguuccacgccauccacguguccgggaccaacggcaccaagcgguucgacaacccggugcugcccuucaacgacggggucuacuucgcgagcaccgagaaguccaacaucauccgcggcuggaucuucgggacgacccucgacagcaagacccagucccugcugaucgugaacaacgccaccaacguggucaucaaggugugcgaguuccaguucugcaacgaccccuuccucggcguguacuaccacaagaacaacaagagcuggauggaguccgaguuccgggucuacagcuccgccaacaacugcacguucgaguacgugagccagcccuuccugauggaccuggagggcaagcaggggaacuucaagaaccuccgcgaguucguguucaagaacaucgacggcuacuucaagaucuacuccaagcacaccccgaucaaccugguccgggaccugccccagggguucagcgcccucgagccccugguggaccugcccaucggcaucaacaucacccgcuuccagacccuccuggcccugcaccgguccuaccucacgccgggggacagcagcuccggcuggaccgcgggcgccgccgccuacuacgugggguaccugcagccccgcaccuuccugcucaaguacaacgagaacggcaccaucacggacgcggucgacugcgcccuggacccccugagcgagaccaagugcacccucaaguccuucaccguggagaaggggaucuaccagacgagcaacuuccgggugcagcccaccgaguccaucguccgcuucccgaacaucaccaaccugugccccuucggcgagguguucaacgccacccgguucgccagcgucuacgccuggaaccgcaagcggaucuccaacugcguggcggacuacagcgugcuguacaacuccgccagcuucuccacguucaagugcuacggcgucagccccaccaagcucaacgaccugugcuucaccaacguguacgccgacuccuucgugauccgcggggacgagguccggcagaucgcccccggccagaccgggaagaucgccgacuacaacuacaagcugccggacgacuucacgggcugcgugaucgcguggaacagcaacaaccucgacuccaaggucgggggcaacuacaacuaccuguuccgccuguuccgcaagagcaaccucaagcccuucgagcgggacaucuccaccgagaucuaccaggccggcagcacccccugcaacgggguggagggcuucaacugcuacuucccccugcaguccuacggguuccagccgaccaacggcgugggguaccagcccuaccggguggucgugcugagcuucgagcuccugcacgcccccgccacggugugcggccccaagaaguccaccaaccuggucaagaacaagugcgugaacuucaacuucaacggccucaccgggaccggcgugcugaccgagagcaacaagaaguuccugccguuccagcaguucgggcgcgacaucgccgacacgaccgacgcgguccgcgacccccagacccuggagauccucgacaucacccccugcagcuucggcgggguguccgugaucacgccgggcaccaacaccagcaaccaggucgccgugcuguaccagggcgugaacugcaccgagguccccguggccauccacgccgaccagcugacgcccaccuggcggguguacuccaccgggagcaacgucuuccagacccgcgccggcugccucaucggggcggagcacgugaacaacuccuacgagugcgacauccccaucggcgccggcaucugcgccagcuaccagacgcagaccaacuccccgcggcgcgcccggagcguggcgucccagagcaucaucgccuacaccaugucccugggggccgagaacagcgucgccuacuccaacaacagcaucgccauccccaccaacuucacgaucuccgugaccaccgagauccugcccgugagcaugaccaagacgagcgucgacugcaccauguacaucugcggcgacuccaccgagugcagcaaccuccugcugcaguacggguccuucugcacccagcucaaccgcgcgcugacgggcaucgccguggagcaggacaagaacacccaggagguguucgcccaggucaagcagaucuacaagacgcccccgaucaaggacuucgggggcuucaacuucagccagauccugcccgaccccuccaagcccagcaagcgguccuucaucgaggaccuccuguucaacaaggugacccuggccgacgccggcuucaucaagcaguacggggacugccucggcgacaucgcggcccgcgaccugaucugcgcccagaaguucaacgggcugaccgugcucccgccccugcugaccgacgagaugaucgcccaguacaccagcgcccuccuggcgggcaccaucacguccggguggaccuucggcgccggcgccgcccugcagauccccuucgcgaugcagauggccuaccgguucaacgggaucggcgucacccagaacgugcucuacgagaaccagaagcugaucgccaaccaguucaacagcgccaucgggaagauccaggacucccugagcuccaccgccagcgcgcucggcaagcugcaggacguggucaaccagaacgcccaggcccugaacacgcucgugaagcagcuguccagcaacuucggggccaucuccagcgugcugaacgacauccucucccgccuggacaaggucgaggccgaggugcagaucgaccggcugaucaccggccgccuccagagccugcagaccuacgugacccagcagcugauccgggcggccgagauccgcgccagcgccaaccucgccgcgaccaagauguccgagugcguccugggccagagcaagcggguggacuucugcgggaagggcuaccaccugauguccuucccccagagcgccccgcacgggguggucuuccuccacgugacguacguccccgcccaggagaagaacuucaccaccgcccccgcgaucugccacgacggcaaggcccacuucccccgcgaggggguguucguguccaacggcacccacugguucgucacgcagcggaacuucuacgagccgcagaucaucaccaccgacaacaccuucgugagcggcaacugcgacguggucaucgggaucgugaacaacacgguguacgacccccugcagcccgagcuggacuccuucaaggaggagcucgacaaguacuucaagaaccacaccagccccgacgucgaccugggcgacaucuccgggaucaacgccagcguggugaacauccagaaggagaucgaccgccugaacgaggucgccaagaaccucaacgagucccugaucgaccugcaggagcucggcaaguacgagcaguacaucaaguggccgugguacaucuggcugggcuucaucgccgggcugaucgcgaucgugauggugaccaucaugcucugcugcaugaccagcugcugcuccugccugaagggcugcugcagcugcggguccugcugcaaguucgacgaggacgacagcgagcccguccugaagggcgugaagcuccacuacacgugaggacuaguguccaccugucccuccugggcugcuggauugucucguuuuccugccaaauaaacaggaucagcgcuuuacagaucuaaaaaaaaaaaaaaaaaaaaaaaaaaaaaaaaaaaaaaaaaaaaaaaaaaaaaaaaaaaaaaaaaaaaaaaaaaaaaaaaaaaaaaaaaaaaaaaaaaaa

SEQ ID NO: 25195 - RNA, 4105 nt, Artificial Sequence
  SARS-CoV-2/Wuhan/WIV05/2019__EPI_ISL_402128 spike protein mRNA gc (1-1273)(D614G_I692V)
aggagacccgugacccggaaguuguacggcuacgcgacuuucccucccacaaacccucgcgcccuuccuuuccuacuugggcccggcagaaagcuuaccauguucguguuccugguccuccugccccuggugagcucccagugcgugaaccucaccacccgcacgcagcugccgcccgccuacaccaacagcuucacccggggcgucuacuaccccgacaagguguuccgcuccagcgugcugcacuccacccaggaccucuuccugcccuucuucagcaacgucacgugguuccacgccauccacguguccgggaccaacggcaccaagcgguucgacaacccggugcugcccuucaacgacggggucuacuucgcgagcaccgagaaguccaacaucauccgcggcuggaucuucgggacgacccucgacagcaagacccagucccugcugaucgugaacaacgccaccaacguggucaucaaggugugcgaguuccaguucugcaacgaccccuuccucggcguguacuaccacaagaacaacaagagcuggauggaguccgaguuccgggucuacagcuccgccaacaacugcacguucgaguacgugagccagcccuuccugauggaccuggagggcaagcaggggaacuucaagaaccuccgcgaguucguguucaagaacaucgacggcuacuucaagaucuacuccaagcacaccccgaucaaccugguccgggaccugccccagggguucagcgcccucgagccccugguggaccugcccaucggcaucaacaucacccgcuuccagacccuccuggcccugcaccgguccuaccucacgccgggggacagcagcuccggcuggaccgcgggcgccgccgccuacuacgugggguaccugcagccccgcaccuuccugcucaaguacaacgagaacggcaccaucacggacgcggucgacugcgcccuggacccccugagcgagaccaagugcacccucaaguccuucaccguggagaaggggaucuaccagacgagcaacuuccgggugcagcccaccgaguccaucguccgcuucccgaacaucaccaaccugugccccuucggcgagguguucaacgccacccgguucgccagcgucuacgccuggaaccgcaagcggaucuccaacugcguggcggacuacagcgugcuguacaacuccgccagcuucuccacguucaagugcuacggcgucagccccaccaagcucaacgaccugugcuucaccaacguguacgccgacuccuucgugauccgcggggacgagguccggcagaucgcccccggccagaccgggaagaucgccgacuacaacuacaagcugccggacgacuucacgggcugcgugaucgcguggaacagcaacaaccucgacuccaaggucgggggcaacuacaacuaccuguaccgccuguuccgcaagagcaaccucaagcccuucgagcgggacaucuccaccgagaucuaccaggccggcagcacccccugcaacgggguggagggcuucaacugcuacuucccccugcaguccuacggguuccagccgaccaacggcgugggguaccagcccuaccggguggucgugcugagcuucgagcuccugcacgcccccgccacggugugcggccccaagaaguccaccaaccuggucaagaacaagugcgugaacuucaacuucaacggccucaccgggaccggcgugcugaccgagagcaacaagaaguuccugccguuccagcaguucgggcgcgacaucgccgacacgaccgacgcgguccgcgacccccagacccuggagauccucgacaucacccccugcagcuucggcgggguguccgugaucacgccgggcaccaacaccagcaaccaggucgccgugcuguaccagggcgugaacugcaccgagguccccguggccauccacgccgaccagcugacgcccaccuggcggguguacuccaccgggagcaacgucuuccagacccgcgccggcugccucaucggggcggagcacgugaacaacuccuacgagugcgacauccccaucggcgccggcaucugcgccagcuaccagacgcagaccaacuccccgcggcgcgcccggagcguggcgucccagagcgucaucgccuacaccaugucccugggggccgagaacagcguggccuacuccaacaacagcaucgccauccccaccaacuucacgaucuccgugaccaccgagauccugcccgucagcaugaccaagacgagcguggacugcaccauguacaucugcggcgacuccaccgagugcagcaaccuccugcugcaguacggguccuucugcacccagcucaaccgcgcgcugacgggcaucgccguggagcaggacaagaacacccaggaggucuucgcccaggugaagcagaucuacaagacgcccccgaucaaggacuucgggggcuucaacuucagccagauccugcccgaccccuccaagcccagcaagcgguccuucaucgaggaccuccuguucaacaaggugacccuggccgacgccggcuucaucaagcaguacggggacugccucggcgacaucgcggcccgcgaccugaucugcgcccagaaguucaacgggcugaccguccucccgccccugcugaccgacgagaugaucgcccaguacaccagcgcccuccuggcgggcaccaucacguccggguggaccuucggcgccggcgccgcccugcagauccccuucgcgaugcagauggccuaccgguucaacgggaucggcgugacccagaacgugcucuacgagaaccagaagcugaucgccaaccaguucaacagcgccaucgggaagauccaggacucccugagcuccaccgccagcgcgcucggcaagcugcaggacgucgugaaccagaacgcccaggcccugaacacgcucgugaagcagcuguccagcaacuucggggccaucuccagcguccugaacgacauccucucccgccuggacaagguggaggccgaggugcagaucgaccggcugaucaccggccgccuccagagccugcagaccuacgucacccagcagcugauccgggcggccgagauccgcgccagcgccaaccucgccgcgaccaagauguccgagugcgugcugggccagagcaagcggguggacuucugcgggaagggcuaccaccugauguccuucccccagagcgccccgcacggggucguguuccuccacgucacguacgugcccgcccaggagaagaacuucaccaccgcccccgcgaucugccacgacggcaaggcccacuucccccgcgaggggguguucgucuccaacggcacccacugguucgugacgcagcggaacuucuacgagccgcagaucaucaccaccgacaacaccuucgugagcggcaacugcgacgucgugaucgggaucgugaacaacacggucuacgacccccugcagcccgagcuggacuccuucaaggaggagcucgacaaguacuucaagaaccacaccagccccgacguggaccugggcgacaucuccgggaucaacgccagcguggucaacauccagaaggagaucgaccgccugaacgagguggccaagaaccucaacgagucccugaucgaccugcaggagcucggcaaguacgagcaguacaucaaguggccgugguacaucuggcugggcuucaucgccgggcugaucgcgaucgugauggucaccaucaugcucugcugcaugaccagcugcugcuccugccugaagggcugcugcagcugcggguccugcugcaaguucgacgaggacgacagcgagcccgugcugaagggcgugaagcuccacuacacgugaggacuaguguccaccugucccuccugggcugcuggauugucucguuuuccugccaaauaaacaggaucagcgcuuuacagaucuaaaaaaaaaaaaaaaaaaaaaaaaaaaaaaaaaaaaaaaaaaaaaaaaaaaaaaaaaaaaaaaaaaaaaaaaaaaaaaaaaaaaaaaaaaaaaaaaaaaa

SEQ ID NO: 25196 - RNA, 4105 nt, Artificial Sequence
  SARS-CoV-2/Wuhan/WIV05/2019__EPI_ISL_402128 spike protein mRNA gc (1-1273)(D614G_M1229I)
aggagacccgugacccggaaguuguacggcuacgcgacuuucccucccacaaacccucgcgcccuuccuuuccuacuugggcccggcagaaagcuuaccauguucguguuccugguccuccugccccuggugagcucccagugcgugaaccucaccacccgcacgcagcugccgcccgccuacaccaacagcuucacccggggcgucuacuaccccgacaagguguuccgcuccagcgugcugcacuccacccaggaccucuuccugcccuucuucagcaacgucacgugguuccacgccauccacguguccgggaccaacggcaccaagcgguucgacaacccggugcugcccuucaacgacggggucuacuucgcgagcaccgagaaguccaacaucauccgcggcuggaucuucgggacgacccucgacagcaagacccagucccugcugaucgugaacaacgccaccaacguggucaucaaggugugcgaguuccaguucugcaacgaccccuuccucggcguguacuaccacaagaacaacaagagcuggauggaguccgaguuccgggucuacagcuccgccaacaacugcacguucgaguacgugagccagcccuuccugauggaccuggagggcaagcaggggaacuucaagaaccuccgcgaguucguguucaagaacaucgacggcuacuucaagaucuacuccaagcacaccccgaucaaccugguccgggaccugccccagggguucagcgcccucgagccccugguggaccugcccaucggcaucaacaucacccgcuuccagacccuccuggcccugcaccgguccuaccucacgccgggggacagcagcuccggcuggaccgcgggcgccgccgccuacuacgugggguaccugcagccccgcaccuuccugcucaaguacaacgagaacggcaccaucacggacgcggucgacugcgcccuggacccccugagcgagaccaagugcacccucaaguccuucaccguggagaaggggaucuaccagacgagcaacuuccgggugcagcccaccgaguccaucguccgcuucccgaacaucaccaaccugugccccuucggcgagguguucaacgccacccgguucgccagcgucuacgccuggaaccgcaagcggaucuccaacugcguggcggacuacagcgugcuguacaacuccgccagcuucuccacguucaagugcuacggcgucagccccaccaagcucaacgaccugugcuucaccaacguguacgccgacuccuucgugauccgcggggacgagguccggcagaucgcccccggccagaccgggaagaucgccgacuacaacuacaagcugccggacgacuucacgggcugcgugaucgcguggaacagcaacaaccucgacuccaaggucgggggcaacuacaacuaccuguaccgccuguuccgcaagagcaaccucaagcccuucgagcgggacaucuccaccgagaucuaccaggccggcagcacccccugcaacgggguggagggcuucaacugcuacuucccccugcaguccuacggguuccagccgaccaacggcgugggguaccagcccuaccggguggucgugcugagcuucgagcuccugcacgcccccgccacggugugcggccccaagaaguccaccaaccuggucaagaacaagugcgugaacuucaacuucaacggccucaccgggaccggcgugcugaccgagagcaacaagaaguuccugccguuccagcaguucgggcgcgacaucgccgacacgaccgacgcgguccgcgacccccagacccuggagauccucgacaucacccccugcagcuucggcgggguguccgugaucacgccgggcaccaacaccagcaaccaggucgccgugcuguaccagggcgugaacugcaccgagguccccguggccauccacgccgaccagcugacgcccaccuggcggguguacuccaccgggagcaacgucuuccagacccgcgccggcugccucaucggggcggagcacgugaacaacuccuacgagugcgacauccccaucggcgccggcaucugcgccagcuaccagacgcagaccaacuccccgcggcgcgcccggagcguggcgucccagagcaucaucgccuacaccaugucccugggggccgagaacagcgucgccuacuccaacaacagcaucgccauccccaccaacuucacgaucuccgugaccaccgagauccugcccgugagcaugaccaagacgagcgucgacugcaccauguacaucugcggcgacuccaccgagugcagcaaccuccugcugcaguacggguccuucugcacccagcucaaccgcgcgcugacgggcaucgccguggagcaggacaagaacacccaggagguguucgcccaggucaagcagaucuacaagacgcccccgaucaaggacuucgggggcuucaacuucagccagauccugcccgaccccuccaagcccagcaagcgguccuucaucgaggaccuccuguucaacaaggugacccuggccgacgccggcuucaucaagcaguacggggacugccucggcgacaucgcggcccgcgaccugaucugcgcccagaaguucaacgggcugaccgugcucccgccccugcugaccgacgagaugaucgcccaguacaccagcgcccuccuggcgggcaccaucacguccggguggaccuucggcgccggcgccgcccugcagauccccuucgcgaugcagauggccuaccgguucaacgggaucggcgucacccagaacgugcucuacgagaaccagaagcugaucgccaaccaguucaacagcgccaucgggaagauccaggacucccugagcuccaccgccagcgcgcucggcaagcugcaggacguggucaaccagaacgcccaggcccugaacacgcucgugaagcagcuguccagcaacuucggggccaucuccagcgugcugaacgacauccucucccgccuggacaaggucgaggccgaggugcagaucgaccggcugaucaccggccgccuccagagccugcagaccuacgugacccagcagcugauccgggcggccgagauccgcgccagcgccaaccucgccgcgaccaagauguccgagugcguccugggccagagcaagcggguggacuucugcgggaagggcuaccaccugauguccuucccccagagcgccccgcacgggguggucuuccuccacgugacguacguccccgcccaggagaagaacuucaccaccgcccccgcgaucugccacgacggcaaggcccacuucccccgcgaggggguguucguguccaacggcacccacugguucgucacgcagcggaacuucuacgagccgcagaucaucaccaccgacaacaccuucgugagcggcaacugcgacguggucaucgggaucgugaacaacacgguguacgacccccugcagcccgagcuggacuccuucaaggaggagcucgacaaguacuucaagaaccacaccagccccgacgucgaccugggcgacaucuccgggaucaacgccagcguggugaacauccagaaggagaucgaccgccugaacgaggucgccaagaaccucaacgagucccugaucgaccugcaggagcucggcaaguacgagcaguacaucaaguggccgugguacaucuggcugggcuucaucgccgggcugaucgcgaucgugaucgugaccaucaugcucugcugcaugaccagcugcugcuccugccugaagggcugcugcagcugcggguccugcugcaaguucgacgaggacgacagcgagcccguccugaagggcgugaagcuccacuacacgugaggacuaguguccaccugucccuccugggcugcuggauugucucguuuuccugccaaauaaacaggaucagcgcuuuacagaucuaaaaaaaaaaaaaaaaaaaaaaaaaaaaaaaaaaaaaaaaaaaaaaaaaaaaaaaaaaaaaaaaaaaaaaaaaaaaaaaaaaaaaaaaaaaaaaaaaaaa

SEQ ID NO: 25197 - RNA, 4099 nt, Artificial Sequence
  SARS-CoV-2/Wuhan/WIV05/2019__EPI_ISL_402128 spike protein mRNA gc (1-1273)(H69del_V70del_A222V_Y453F_S477N_D614G_I692V)
aggagacccgugacccggaaguuguacggcuacgcgacuuucccucccacaaacccucgcgcccuuccuuuccuacuugggcccggcagaaagcuuaccauguucguguuccugguccuccugccccuggugagcucccagugcgugaaccucaccacccgcacgcagcugccgcccgccuacaccaacagcuucacccggggcgucuacuaccccgacaagguguuccgcuccagcgugcugcacuccacccaggaccucuuccugcccuucuucagcaacgucacgugguuccacgccaucuccgggaccaacggcaccaagcgguucgacaacccggugcugcccuucaacgacgggguguacuucgcgagcaccgagaaguccaacaucauccgcggcuggaucuucgggacgacccucgacagcaagacccagucccugcugaucgucaacaacgccaccaacguggugaucaaggucugcgaguuccaguucugcaacgaccccuuccucggcguguacuaccacaagaacaacaagagcuggauggaguccgaguuccggguguacagcuccgccaacaacugcacguucgaguacgucagccagcccuuccugauggaccuggagggcaagcaggggaacuucaagaaccuccgcgaguucguguucaagaacaucgacggcuacuucaagaucuacuccaagcacaccccgaucaaccuggugcgggaccugccccagggguucagcguccucgagccccugguggaccugcccaucggcaucaacaucacccgcuuccagacccuccuggcccugcaccgguccuaccucacgccgggggacagcagcuccggcuggaccgccggcgcggccgccuacuacgugggguaccugcagccccgcaccuuccugcucaaguacaacgagaacggcaccaucacggacgccgucgacugcgcgcuggacccccugagcgagaccaagugcacccucaaguccuucaccguggagaaggggaucuaccagacgagcaacuuccgggugcagcccaccgaguccaucguccgcuucccgaacaucaccaaccugugccccuucggcgagguguucaacgccacccgguucgccagcgucuacgccuggaaccgcaagcggaucuccaacugcguggccgacuacagcgugcuguacaacuccgcgagcuucuccacguucaagugcuacggcgucagccccaccaagcucaacgaccugugcuucaccaacguguacgccgacuccuucgugauccgcggggacgagguccggcagaucgcccccggccagaccgggaagaucgccgacuacaacuacaagcugccggacgacuucacgggcugcgugaucgccuggaacagcaacaaccucgacuccaaggucgggggcaacuacaacuaccuguuccgccuguuccgcaagagcaaccucaagcccuucgagcgggacaucuccaccgagaucuaccaggcgggcaacacccccugcaacgggguggagggcuucaacugcuacuucccccugcagagcuacggguuccagccgaccaacggcgugggguaccagcccuaccggguggucgugcuguccuucgagcuccugcacgcccccgccacggugugcggccccaagaaguccaccaaccuggucaagaacaagugcgugaacuucaacuucaacggccucaccgggaccggcgugcugaccgagagcaacaagaaguuccugccguuccagcaguucgggcgcgacaucgccgacacgaccgacgccguccgcgacccccagacccuggagauccucgacaucacccccugcagcuucggcggggugagcgugaucacgccgggcaccaacaccuccaaccaggucgcggugcuguaccagggcgugaacugcaccgagguccccguggccauccacgccgaccagcugacgcccaccuggcggguguacagcaccggguccaacgucuuccagacccgcgccggcugccucaucggggccgagcacgugaacaacagcuacgagugcgacauccccaucggcgcgggcaucugcgccuccuaccagacgcagaccaacagcccgcggcgcgcccgguccguggccagccaguccgucaucgcguacaccaugagccugggggccgagaacuccguggccuacagcaacaacuccaucgccauccccaccaacuucacgaucagcgugaccaccgagauccugcccgucuccaugaccaagacgagcguggacugcaccauguacaucugcggcgacagcaccgagugcuccaaccuccugcugcaguacgggagcuucugcacccagcucaaccgcgcccugacgggcaucgcgguggagcaggacaagaacacccaggaggucuucgcccaggugaagcagaucuacaagacgcccccgaucaaggacuucgggggcuucaacuucucccagauccugcccgaccccagcaagcccuccaagcggagcuucaucgaggaccuccuguucaacaaggugacccuggccgacgccggcuucaucaagcaguacggggacugccucggcgacaucgccgcgcgcgaccugaucugcgcccagaaguucaacgggcugaccguccucccgccccugcugaccgacgagaugaucgcccaguacaccuccgcccuccuggccggcaccaucacgagcggguggaccuucggcgcgggcgccgcccugcagauccccuucgccaugcagauggcguaccgguucaacgggaucggcgugacccagaacgugcucuacgagaaccagaagcugaucgccaaccaguucaacuccgccaucgggaagauccaggacagccuguccagcaccgccuccgcccucggcaagcugcaggacgucgugaaccagaacgcgcaggcccugaacacgcucgugaagcagcugagcuccaacuucggggccaucagcuccguccugaacgacauccucagccgccuggacaagguggaggccgaggugcagaucgaccggcugaucaccggccgccuccagucccugcagaccuacgucacccagcagcugauccgggccgcggagauccgcgccagcgccaaccucgccgccaccaagaugagcgagugcgugcugggccaguccaagcggguggacuucugcgggaagggcuaccaccugaugagcuucccccaguccgcgccgcacggggucguguuccuccacgucacguacgugcccgcccaggagaagaacuucaccaccgcccccgccaucugccacgacggcaaggcgcacuucccccgcgaggggguguucgucagcaacggcacccacugguucgugacgcagcggaacuucuacgagccgcagaucaucaccaccgacaacaccuucguguccggcaacugcgacgucgugaucgggaucgugaacaacacggucuacgacccccugcagcccgagcuggacagcuucaaggaggagcucgacaaguacuucaagaaccacaccucccccgacguggaccugggcgacaucagcgggaucaacgccuccguggucaacauccagaaggagaucgaccgccugaacgagguggccaagaaccucaacgagagccugaucgaccugcaggagcucggcaaguacgagcaguacaucaaguggccgugguacaucuggcugggcuucaucgccgggcugaucgccaucgugauggucaccaucaugcucugcugcaugaccuccugcugcagcugccugaagggcugcugcuccugcgggagcugcugcaaguucgacgaggacgacuccgagcccgugcugaagggcgugaagcuccacuacacgugaggacuaguguccaccugucccuccugggcugcuggauugucucguuuuccugccaaauaaacaggaucagcgcuuuacagaucuaaaaaaaaaaaaaaaaaaaaaaaaaaaaaaaaaaaaaaaaaaaaaaaaaaaaaaaaaaaaaaaaaaaaaaaaaaaaaaaaaaaaaaaaaaaaaaaaaaaa

SEQ ID NO: 25198 - RNA, 4099 nt, Artificial Sequence
  SARS-CoV-2/Wuhan/WIV05/2019__EPI_ISL_402128 spike protein mRNA gc (1-1273)(H69del_V70del_Y453F_D614G_I692V_M1229I)
aggagacccgugacccggaaguuguacggcuacgcgacuuucccucccacaaacccucgcgcccuuccuuuccuacuugggcccggcagaaagcuuaccauguucguguuccugguccuccugccccuggugagcucccagugcgugaaccucaccacccgcacgcagcugccgcccgccuacaccaacagcuucacccggggcgucuacuaccccgacaagguguuccgcuccagcgugcugcacuccacccaggaccucuuccugcccuucuucagcaacgucacgugguuccacgccaucuccgggaccaacggcaccaagcgguucgacaacccggugcugcccuucaacgacgggguguacuucgcgagcaccgagaaguccaacaucauccgcggcuggaucuucgggacgacccucgacagcaagacccagucccugcugaucgucaacaacgccaccaacguggugaucaaggucugcgaguuccaguucugcaacgaccccuuccucggcguguacuaccacaagaacaacaagagcuggauggaguccgaguuccggguguacagcuccgccaacaacugcacguucgaguacgucagccagcccuuccugauggaccuggagggcaagcaggggaacuucaagaaccuccgcgaguucguguucaagaacaucgacggcuacuucaagaucuacuccaagcacaccccgaucaaccuggugcgggaccugccccagggguucagcgcccucgagccccuggucgaccugcccaucggcaucaacaucacccgcuuccagacccuccuggcccugcaccgguccuaccucacgccgggggacagcagcuccggcuggaccgcgggcgccgccgccuacuacgugggguaccugcagccccgcaccuuccugcucaaguacaacgagaacggcaccaucacggacgcgguggacugcgcccuggacccccugagcgagaccaagugcacccucaaguccuucaccgucgagaaggggaucuaccagacgagcaacuuccgggugcagcccaccgaguccaucgugcgcuucccgaacaucaccaaccugugccccuucggcgaggucuucaacgccacccgguucgccagcguguacgccuggaaccgcaagcggaucuccaacugcgucgcggacuacagcgugcuguacaacuccgccagcuucuccacguucaagugcuacggcgugagccccaccaagcucaacgaccugugcuucaccaacgucuacgccgacuccuucgugauccgcggggacgaggugcggcagaucgcccccggccagaccgggaagaucgccgacuacaacuacaagcugccggacgacuucacgggcugcgucaucgcguggaacagcaacaaccucgacuccaaggucgggggcaacuacaacuaccuguuccgccuguuccgcaagagcaaccucaagcccuucgagcgggacaucuccaccgagaucuaccaggccggcagcacccccugcaacgggguggagggcuucaacugcuacuucccccugcaguccuacggguuccagccgaccaacggcgugggguaccagcccuaccggguggugguccugagcuucgagcuccugcacgcccccgccacggugugcggccccaagaaguccaccaaccuggugaagaacaagugcgucaacuucaacuucaacggccucaccgggaccggcgugcugaccgagagcaacaagaaguuccugccguuccagcaguucgggcgcgacaucgccgacacgaccgacgcggugcgcgacccccagacccuggagauccucgacaucacccccugcagcuucggcggggucuccgugaucacgccgggcaccaacaccagcaaccagguggccguccuguaccagggcgugaacugcaccgaggugcccgucgccauccacgccgaccagcugacgcccaccuggcggguguacuccaccgggagcaacguguuccagacccgcgccggcugccucaucggggcggagcacgucaacaacuccuacgagugcgacauccccaucggcgccggcaucugcgccagcuaccagacgcagaccaacuccccgcggcgcgcccggagcguggcgucccagagcgugaucgccuacaccaugucccugggggccgagaacagcgucgccuacuccaacaacagcaucgccauccccaccaacuucacgaucuccgugaccaccgagauccugcccgugagcaugaccaagacgagcgucgacugcaccauguacaucugcggcgacuccaccgagugcagcaaccuccugcugcaguacggguccuucugcacccagcucaaccgcgcgcugacgggcaucgccguggagcaggacaagaacacccaggagguguucgcccaggucaagcagaucuacaagacgcccccgaucaaggacuucgggggcuucaacuucagccagauccugcccgaccccuccaagcccagcaagcgguccuucaucgaggaccuccuguucaacaaggugacccuggccgacgccggcuucaucaagcaguacggggacugccucggcgacaucgcggcccgcgaccugaucugcgcccagaaguucaacgggcugaccgugcucccgccccugcugaccgacgagaugaucgcccaguacaccagcgcccuccuggcgggcaccaucacguccggguggaccuucggcgccggcgccgcccugcagauccccuucgcgaugcagauggccuaccgguucaacgggaucggcgucacccagaacgugcucuacgagaaccagaagcugaucgccaaccaguucaacagcgccaucgggaagauccaggacucccugagcuccaccgccagcgcgcucggcaagcugcaggacguggucaaccagaacgcccaggcccugaacacgcucgugaagcagcuguccagcaacuucggggccaucuccagcgugcugaacgacauccucucccgccuggacaaggucgaggccgaggugcagaucgaccggcugaucaccggccgccuccagagccugcagaccuacgugacccagcagcugauccgggcggccgagauccgcgccagcgccaaccucgccgcgaccaagauguccgagugcguccugggccagagcaagcggguggacuucugcgggaagggcuaccaccugauguccuucccccagagcgccccgcacgggguggucuuccuccacgugacguacguccccgcccaggagaagaacuucaccaccgcccccgcgaucugccacgacggcaaggcccacuucccccgcgaggggguguucguguccaacggcacccacugguucgucacgcagcggaacuucuacgagccgcagaucaucaccaccgacaacaccuucgugagcggcaacugcgacguggucaucgggaucgugaacaacacgguguacgacccccugcagcccgagcuggacuccuucaaggaggagcucgacaaguacuucaagaaccacaccagccccgacgucgaccugggcgacaucuccgggaucaacgccagcguggugaacauccagaaggagaucgaccgccugaacgaggucgccaagaaccucaacgagucccugaucgaccugcaggagcucggcaaguacgagcaguacaucaaguggccgugguacaucuggcugggcuucaucgccgggcugaucgcgaucgugaucgugaccaucaugcucugcugcaugaccagcugcugcuccugccugaagggcugcugcagcugcggguccugcugcaaguucgacgaggacgacagcgagcccguccugaagggcgugaagcuccacuacacgugaggacuaguguccaccugucccuccugggcugcuggauugucucguuuuccugccaaauaaacaggaucagcgcuuuacagaucuaaaaaaaaaaaaaaaaaaaaaaaaaaaaaaaaaaaaaaaaaaaaaaaaaaaaaaaaaaaaaaaaaaaaaaaaaaaaaaaaaaaaaaaaaaaaaaaaaaaa

SEQ ID NO: 25199 - RNA, 4096 nt, Artificial Sequence
  SARS-CoV-2/Wuhan/WIV05/2019__EPI_ISL_402128 spike protein mRNA gc (1-1273)(H69del_V70del_Y144del_N501Y_A570D_D614G_P681H_T716I_S982 A_D1118H)
aggagacccgugacccggaaguuguacggcuacgcgacuuucccucccacaaacccucgcgcccuuccuuuccuacuugggcccggcagaaagcuuaccauguucguguuccugguccuccugccccuggugagcucccagugcgugaaccucaccacccgcacgcagcugccgcccgccuacaccaacagcuucacccggggcgucuacuaccccgacaagguguuccgcuccagcgugcugcacuccacccaggaccucuuccugcccuucuucagcaacgucacgugguuccacgccaucuccgggaccaacggcaccaagcgguucgacaacccggugcugcccuucaacgacgggguguacuucgcgagcaccgagaaguccaacaucauccgcggcuggaucuucgggacgacccucgacagcaagacccagucccugcugaucgucaacaacgccaccaacguggugaucaaggucugcgaguuccaguucugcaacgaccccuuccucggcguguaccacaagaacaacaagagcuggauggaguccgaguuccggguguacagcuccgccaacaacugcacguucgaguacgucagccagcccuuccugauggaccuggagggcaagcaggggaacuucaagaaccuccgcgaguucguguucaagaacaucgacggcuacuucaagaucuacuccaagcacaccccgaucaaccuggugcgggaccugccccagggguucagcgcccucgagccccuggucgaccugcccaucggcaucaacaucacccgcuuccagacccuccuggcccugcaccgguccuaccucacgccgggggacagcagcuccggcuggaccgcgggcgccgccgccuacuacgugggguaccugcagccccgcaccuuccugcucaaguacaacgagaacggcaccaucacggacgcgguggacugcgcccuggacccccugagcgagaccaagugcacccucaaguccuucaccgucgagaaggggaucuaccagacgagcaacuuccgggugcagcccaccgaguccaucgugcgcuucccgaacaucaccaaccugugccccuucggcgaggucuucaacgccacccgguucgccagcguguacgccuggaaccgcaagcggaucuccaacugcgucgcggacuacagcgugcuguacaacuccgccagcuucuccacguucaagugcuacggcgugagccccaccaagcucaacgaccugugcuucaccaacgucuacgccgacuccuucgugauccgcggggacgaggugcggcagaucgcccccggccagaccgggaagaucgccgacuacaacuacaagcugccggacgacuucacgggcugcgucaucgcguggaacagcaacaaccucgacuccaaggucgggggcaacuacaacuaccuguaccgccuguuccgcaagagcaaccucaagcccuucgagcgggacaucuccaccgagaucuaccaggccggcagcacccccugcaacgggguggagggcuucaacugcuacuucccccugcaguccuacggguuccagccgaccuacggcgugggguaccagcccuaccggguggugguccugagcuucgagcuccugcacgcccccgccacggugugcggccccaagaaguccaccaaccuggugaagaacaagugcgucaacuucaacuucaacggccucaccgggaccggcgugcugaccgagagcaacaagaaguuccugccguuccagcaguucgggcgcgacaucgacgacacgaccgacgccgugcgcgacccccagacccuggagauccucgacaucacccccugcagcuucggcggggucuccgugaucacgccgggcaccaacaccagcaaccagguggcgguccuguaccagggcgugaacugcaccgaggugcccgucgccauccacgccgaccagcugacgcccaccuggcggguguacuccaccgggagcaacguguuccagacccgcgccggcugccucaucggggccgagcacgucaacaacuccuacgagugcgacauccccaucggcgcgggcaucugcgccagcuaccagacgcagaccaacucccaccggcgcgcccggagcguggccucccagagcaucaucgcguacaccaugucccugggggccgagaacagcguggccuacuccaacaacagcaucgccaucccgaucaacuucaccaucuccgucacgaccgagauccugcccgugagcaugaccaagaccagcguggacugcacgauguacaucugcggcgacuccaccgagugcagcaaccuccugcugcaguacggguccuucugcacccagcucaaccgcgcccugaccggcaucgcggucgagcaggacaagaacacgcaggagguguucgcccaggugaagcagaucuacaagaccccgcccaucaaggacuucgggggcuucaacuucagccagauccugcccgaccccuccaagcccagcaagcgguccuucaucgaggaccuccuguucaacaaggucacccuggccgacgccggcuucaucaagcaguacggggacugccucggcgacaucgccgcgcgcgaccugaucugcgcccagaaguucaacgggcugaccgugcugcccccgcuccugacggacgagaugaucgcccaguacaccagcgcccuccuggccggcaccaucaccuccggguggacguucggcgcgggcgccgcccugcagauccccuucgccaugcagauggcguaccgguucaacgggaucggcgugacccagaacguccucuacgagaaccagaagcugaucgccaaccaguucaacagcgccaucgggaagauccaggacucccugagcuccaccgccagcgcccucggcaagcugcaggacguggugaaccagaacgcgcaggcccugaacacccucgucaagcagcuguccagcaacuucggggccaucuccagcgugcugaacgacauccucgcccgccuggacaagguggaggccgagguccagaucgaccggcugaucacgggccgccuccagucccugcagaccuacgugacccagcagcugauccgggcggccgagauccgcgccagcgccaaccucgccgcgaccaagaugagcgagugcgugcugggccaguccaagcgggucgacuucugcgggaagggcuaccaccugaugagcuucccccaguccgcgccccacggggugguguuccuccacgucaccuacgugccggcccaggagaagaacuucacgaccgcccccgccaucugccacgacggcaaggcccacuucccccgcgagggggucuucgugagcaacggcacccacugguucgugacccagcggaacuucuacgagccccagaucaucacgacccacaacaccuucgucuccggcaacugcgacguggugaucgggaucgucaacaacaccguguacgacccgcugcagcccgagcuggacagcuucaaggaggagcucgacaaguacuucaagaaccacacgucccccgacguggaccugggcgacaucagcgggaucaacgccuccgucgugaacauccagaaggagaucgaccgccugaacgagguggccaagaaccucaacgagagccugaucgaccugcaggagcucggcaaguacgagcaguacaucaaguggcccugguacaucuggcugggcuucaucgccgggcugaucgcgaucgucauggugaccaucaugcucugcugcaugaccuccugcugcagcugccugaagggcugcugcuccugcgggagcugcugcaaguucgacgaggacgacuccgagccggugcugaagggcgucaagcuccacuacaccugaggacuaguguccaccugucccuccugggcugcuggauugucucguuuuccugccaaauaaacaggaucagcgcuuuacagaucuaaaaaaaaaaaaaaaaaaaaaaaaaaaaaaaaaaaaaaaaaaaaaaaaaaaaaaaaaaaaaaaaaaaaaaaaaaaaaaaaaaaaaaaaaaaaaaaaaaaa

SEQ ID NO: 25200 - RNA, 4105 nt, Artificial Sequence
  SARS-CoV-2/Wuhan/WIV05/2019__EPI_ISL_402128 spike protein mRNA gc (1-1273)(K417N_E484K_N501Y_D614G)
aggagacccgugacccggaaguuguacggcuacgcgacuuucccucccacaaacccucgcgcccuuccuuuccuacuugggcccggcagaaagcuuaccauguucguguuccugguccuccugccccuggugagcucccagugcgugaaccucaccacccgcacgcagcugccgcccgccuacaccaacagcuucacccggggcgucuacuaccccgacaagguguuccgcuccagcgugcugcacuccacccaggaccucuuccugcccuucuucagcaacgucacgugguuccacgccauccacguguccgggaccaacggcaccaagcgguucgacaacccggugcugcccuucaacgacggggucuacuucgcgagcaccgagaaguccaacaucauccgcggcuggaucuucgggacgacccucgacagcaagacccagucccugcugaucgugaacaacgccaccaacguggucaucaaggugugcgaguuccaguucugcaacgaccccuuccucggcguguacuaccacaagaacaacaagagcuggauggaguccgaguuccgggucuacagcuccgccaacaacugcacguucgaguacgugagccagcccuuccugauggaccuggagggcaagcaggggaacuucaagaaccuccgcgaguucguguucaagaacaucgacggcuacuucaagaucuacuccaagcacaccccgaucaaccugguccgggaccugccccagggguucagcgcccucgagccccugguggaccugcccaucggcaucaacaucacccgcuuccagacccuccuggcccugcaccgguccuaccucacgccgggggacagcagcuccggcuggaccgcgggcgccgccgccuacuacgugggguaccugcagccccgcaccuuccugcucaaguacaacgagaacggcaccaucacggacgcggucgacugcgcccuggacccccugagcgagaccaagugcacccucaaguccuucaccguggagaaggggaucuaccagacgagcaacuuccgggugcagcccaccgaguccaucguccgcuucccgaacaucaccaaccugugccccuucggcgagguguucaacgccacccgguucgccagcgucuacgccuggaaccgcaagcggaucuccaacugcguggcggacuacagcgugcuguacaacuccgccagcuucuccacguucaagugcuacggcgucagccccaccaagcucaacgaccugugcuucaccaacguguacgccgacuccuucgugauccgcggggacgagguccggcagaucgcccccggccagaccgggaacaucgccgacuacaacuacaagcugccggacgacuucacgggcugcgugaucgcguggaacagcaacaaccucgacuccaaggucgggggcaacuacaacuaccuguaccgccuguuccgcaagagcaaccucaagcccuucgagcgggacaucuccaccgagaucuaccaggccggcagcacccccugcaacggggugaagggcuucaacugcuacuucccccugcaguccuacggguuccagccgaccuacggcgugggguaccagcccuaccggguggucgugcugagcuucgagcuccugcacgcccccgccacggugugcggccccaagaaguccaccaaccuggucaagaacaagugcgugaacuucaacuucaacggccucaccgggaccggcgugcugaccgagagcaacaagaaguuccugccguuccagcaguucgggcgcgacaucgccgacacgaccgacgcgguccgcgacccccagacccuggagauccucgacaucacccccugcagcuucggcgggguguccgugaucacgccgggcaccaacaccagcaaccaggucgccgugcuguaccagggcgugaacugcaccgagguccccguggccauccacgccgaccagcugacgcccaccuggcggguguacuccaccgggagcaacgucuuccagacccgcgccggcugccucaucggggcggagcacgugaacaacuccuacgagugcgacauccccaucggcgccggcaucugcgccagcuaccagacgcagaccaacuccccgcggcgcgcccggagcguggcgucccagagcaucaucgccuacaccaugucccugggggccgagaacagcgucgccuacuccaacaacagcaucgccauccccaccaacuucacgaucuccgugaccaccgagauccugcccgugagcaugaccaagacgagcgucgacugcaccauguacaucugcggcgacuccaccgagugcagcaaccuccugcugcaguacggguccuucugcacccagcucaaccgcgcgcugacgggcaucgccguggagcaggacaagaacacccaggagguguucgcccaggucaagcagaucuacaagacgcccccgaucaaggacuucgggggcuucaacuucagccagauccugcccgaccccuccaagcccagcaagcgguccuucaucgaggaccuccuguucaacaaggugacccuggccgacgccggcuucaucaagcaguacggggacugccucggcgacaucgcggcccgcgaccugaucugcgcccagaaguucaacgggcugaccgugcucccgccccugcugaccgacgagaugaucgcccaguacaccagcgcccuccuggcgggcaccaucacguccggguggaccuucggcgccggcgccgcccugcagauccccuucgcgaugcagauggccuaccgguucaacgggaucggcgucacccagaacgugcucuacgagaaccagaagcugaucgccaaccaguucaacagcgccaucgggaagauccaggacucccugagcuccaccgccagcgcgcucggcaagcugcaggacguggucaaccagaacgcccaggcccugaacacgcucgugaagcagcuguccagcaacuucggggccaucuccagcgugcugaacgacauccucucccgccuggacaaggucgaggccgaggugcagaucgaccggcugaucaccggccgccuccagagccugcagaccuacgugacccagcagcugauccgggcggccgagauccgcgccagcgccaaccucgccgcgaccaagauguccgagugcguccugggccagagcaagcggguggacuucugcgggaagggcuaccaccugauguccuucccccagagcgccccgcacgggguggucuuccuccacgugacguacguccccgcccaggagaagaacuucaccaccgcccccgcgaucugccacgacggcaaggcccacuucccccgcgaggggguguucguguccaacggcacccacugguucgucacgcagcggaacuucuacgagccgcagaucaucaccaccgacaacaccuucgugagcggcaacugcgacguggucaucgggaucgugaacaacacgguguacgacccccugcagcccgagcuggacuccuucaaggaggagcucgacaaguacuucaagaaccacaccagccccgacgucgaccugggcgacaucuccgggaucaacgccagcguggugaacauccagaaggagaucgaccgccugaacgaggucgccaagaaccucaacgagucccugaucgaccugcaggagcucggcaaguacgagcaguacaucaaguggccgugguacaucuggcugggcuucaucgccgggcugaucgcgaucgugauggugaccaucaugcucugcugcaugaccagcugcugcuccugccugaagggcugcugcagcugcggguccugcugcaaguucgacgaggacgacagcgagcccguccugaagggcgugaagcuccacuacacgugaggacuaguguccaccugucccuccugggcugcuggauugucucguuuuccugccaaauaaacaggaucagcgcuuuacagaucuaaaaaaaaaaaaaaaaaaaaaaaaaaaaaaaaaaaaaaaaaaaaaaaaaaaaaaaaaaaaaaaaaaaaaaaaaaaaaaaaaaaaaaaaaaaaaaaaaaaa

SEQ ID NO: 25201 - RNA, 4096 nt, Artificial Sequence
  SARS-CoV-2/Wuhan/WIV05/2019__EPI_ISL_402128 spike protein mRNA gc (1-1273)(L18F_D80A_D215G_L242del_A243del_L244del_R246I_K417N_E484 K_N501Y_D614G_A701V)
aggagacccgugacccggaaguuguacggcuacgcgacuuucccucccacaaacccucgcgcccuuccuuuccuacuugggcccggcagaaagcuuaccauguucguguuccugguccuccugccccuggugagcucccagugcgugaacuucaccacccgcacgcagcucccgcccgccuacaccaacagcuucacccggggcgucuacuaccccgacaagguguuccgcuccagcgugcugcacuccacccaggaccuguuccuccccuucuucagcaacgucacgugguuccacgccauccacguguccgggaccaacggcaccaagcgguucgcgaacccggugcugcccuucaacgacggggucuacuucgccagcaccgagaaguccaacaucauccgcggcuggaucuucgggacgacccuggacagcaagacccagucccuccugaucgugaacaacgccaccaacguggucaucaaggugugcgaguuccaguucugcaacgaccccuuccugggcguguacuaccacaagaacaacaagagcuggauggaguccgaguuccgggucuacagcuccgccaacaacugcacguucgaguacgugagccagcccuuccucauggaccuggagggcaagcaggggaacuucaagaaccugcgcgaguucguguucaagaacaucgacggcuacuucaagaucuacuccaagcacaccccgaucaaccucguccgggggcugccccagggcuucagcgcccuggagccccucguggaccugcccaucgggaucaacaucacccgcuuccagacccugcacaucuccuaccucacgccgggcgacagcagcuccggcuggaccgcgggggccgccgccuacuacgugggcuaccugcagccccggaccuuccugcucaaguacaacgagaacgggaccaucacggacgcggucgacugcgcccuggacccccugagcgagaccaagugcacccucaaguccuucaccguggagaagggcaucuaccagacgagcaacuuccgcgugcagcccaccgaguccaucguccgguucccgaacaucaccaaccugugccccuucggcgagguguucaacgccacccgcuucgccagcgucuacgccuggaaccggaagcgcaucuccaacugcguggcggacuacagcgugcuguacaacuccgccagcuucuccacguucaagugcuacggggucagccccaccaagcucaacgaccugugcuucaccaacguguacgccgacuccuucgugauccggggcgacgagguccgccagaucgcccccgggcagaccggcaacaucgccgacuacaacuacaagcugccggacgacuucacggggugcgugaucgcguggaacagcaacaaccucgacuccaaggugggcggcaacuacaacuaccuguaccggcuguuccgcaagagcaaccucaagcccuucgagcgggacaucuccaccgagaucuaccaggccgggagcacccccugcaacggcgucaagggguucaacugcuacuucccccugcaguccuacggcuuccagccgaccuacggggugggcuaccagcccuaccgcguggucgugcugagcuucgagcuccugcacgcccccgccacggugugcggccccaagaaguccaccaaccuggucaagaacaagugcgugaacuucaacuucaacgggcucaccggcaccggggugcugaccgagagcaacaagaaguuccugccguuccagcaguucggccgggacaucgccgacacgaccgacgcgguccgcgacccccagacccucgagauccuggacaucacccccugcagcuucgggggcguguccgugaucacgccgggcaccaacaccagcaaccaggucgccgugcuguaccagggggugaacugcaccgagguccccguggccauccacgccgaccagcugacgcccaccuggcgcguguacuccaccggcagcaacgucuuccagacccgggccgggugccucaucggcgcggagcacgugaacaacuccuacgagugcgacauccccaucggcgccgggaucugcgccagcuaccagacgcagaccaacuccccgcgccgggcccgcagcguggcgucccagagcaucaucgccuacaccaugucccugggcgucgagaacagcguggccuacuccaacaacagcaucgccauccccaccaacuucacgaucuccgugaccaccgagauccugcccgucagcaugaccaagacgagcguggacugcaccauguacaucugcggggacuccaccgagugcagcaaccuccugcugcaguacggcuccuucugcacccagcucaaccgggcccugacggggaucgcgguggagcaggacaagaacacccaggaggucuucgcccaggugaagcagaucuacaagacgcccccgaucaaggacuucggcggcuucaacuucagccagauccugcccgaccccuccaagcccagcaagcgcuccuucaucgaggaccuccuguucaacaaggugacccuggccgacgccggguucaucaagcaguacggcgacugccucggggacaucgccgcgcgggaccugaucugcgcccagaaguucaacggccugaccguccucccgccccugcugaccgacgagaugaucgcccaguacaccagcgcccuccuggccgggaccaucacguccggcuggaccuucggcgcgggggccgcccugcagauccccuucgccaugcagauggcguaccgcuucaacggcaucggggugacccagaacgugcucuacgagaaccagaagcugaucgccaaccaguucaacagcgccaucggcaagauccaggacucccugagcuccaccgccagcgcccucgggaagcugcaggacgucgugaaccagaacgcgcaggcccugaacacgcucgugaagcagcuguccagcaacuucggcgccaucuccagcguccugaacgacauccucucccggcuggacaagguggaggccgaggugcagaucgaccgccugaucaccggccggcuccagagccugcagaccuacgucacccagcagcugauccgcgccgcggagauccgggccagcgccaaccucgccgccaccaagauguccgagugcgugcuggggcagagcaagcgcguggacuucugcggcaagggguaccaccugauguccuucccccagagcgcgccgcacggcgucguguuccuccacgucacguacgugcccgcccaggagaagaacuucaccaccgcccccgccaucugccacgacgggaaggcgcacuucccccgggagggcguguucgucuccaacggcacccacugguucgugacgcagcgcaacuucuacgagccgcagaucaucaccaccgacaacaccuucgugagcgggaacugcgacgucgugaucggcaucgugaacaacacggucuacgacccccugcagcccgagcuggacuccuucaaggaggagcucgacaaguacuucaagaaccacaccagccccgacguggaccugggggacaucuccggcaucaacgccagcguggucaacauccagaaggagaucgaccggcugaacgagguggccaagaaccucaacgagucccugaucgaccugcaggagcucggcaaguacgagcaguacaucaaguggccgugguacaucuggcugggguucaucgccggccugaucgccaucgugauggucaccaucaugcucugcugcaugaccagcugcugcuccugccugaaggggugcugcagcugcggcuccugcugcaaguucgacgaggacgacagcgagcccgugcugaagggggugaagcuccacuacacgugaggacuaguguccaccugucccuccugggcugcuggauugucucguuuuccugccaaauaaacaggaucagcgcuuuacagaucuaaaaaaaaaaaaaaaaaaaaaaaaaaaaaaaaaaaaaaaaaaaaaaaaaaaaaaaaaaaaaaaaaaaaaaaaaaaaaaaaaaaaaaaaaaaaaaaaaaaa

SEQ ID NO: 25202 - RNA, 4105 nt, Artificial Sequence
  SARS-CoV-2/Wuhan/WIV05/2019__EPI_ISL_402128 spike protein mRNA gc (1-1273)(E484K_D614G)
aggagacccgugacccggaaguuguacggcuacgcgacuuucccucccacaaacccucgcgcccuuccuuuccuacuugggcccggcagaaagcuuaccauguucguguuccugguccuccugccccuggugagcucccagugcgugaaccucaccacccgcacgcagcugccgcccgccuacaccaacagcuucacccggggcgucuacuaccccgacaagguguuccgcuccagcgugcugcacuccacccaggaccucuuccugcccuucuucagcaacgucacgugguuccacgccauccacguguccgggaccaacggcaccaagcgguucgacaacccggugcugcccuucaacgacggggucuacuucgcgagcaccgagaaguccaacaucauccgcggcuggaucuucgggacgacccucgacagcaagacccagucccugcugaucgugaacaacgccaccaacguggucaucaaggugugcgaguuccaguucugcaacgaccccuuccucggcguguacuaccacaagaacaacaagagcuggauggaguccgaguuccgggucuacagcuccgccaacaacugcacguucgaguacgugagccagcccuuccugauggaccuggagggcaagcaggggaacuucaagaaccuccgcgaguucguguucaagaacaucgacggcuacuucaagaucuacuccaagcacaccccgaucaaccugguccgggaccugccccagggguucagcgcccucgagccccugguggaccugcccaucggcaucaacaucacccgcuuccagacccuccuggcccugcaccgguccuaccucacgccgggggacagcagcuccggcuggaccgcgggcgccgccgccuacuacgugggguaccugcagccccgcaccuuccugcucaaguacaacgagaacggcaccaucacggacgcggucgacugcgcccuggacccccugagcgagaccaagugcacccucaaguccuucaccguggagaaggggaucuaccagacgagcaacuuccgggugcagcccaccgaguccaucguccgcuucccgaacaucaccaaccugugccccuucggcgagguguucaacgccacccgguucgccagcgucuacgccuggaaccgcaagcggaucuccaacugcguggcggacuacagcgugcuguacaacuccgccagcuucuccacguucaagugcuacggcgucagccccaccaagcucaacgaccugugcuucaccaacguguacgccgacuccuucgugauccgcggggacgagguccggcagaucgcccccggccagaccgggaagaucgccgacuacaacuacaagcugccggacgacuucacgggcugcgugaucgcguggaacagcaacaaccucgacuccaaggucgggggcaacuacaacuaccuguaccgccuguuccgcaagagcaaccucaagcccuucgagcgggacaucuccaccgagaucuaccaggccggcagcacccccugcaacggggugaagggcuucaacugcuacuucccccugcaguccuacggguuccagccgaccaacggcgugggguaccagcccuaccggguggucgugcugagcuucgagcuccugcacgcccccgccacggugugcggccccaagaaguccaccaaccuggucaagaacaagugcgugaacuucaacuucaacggccucaccgggaccggcgugcugaccgagagcaacaagaaguuccugccguuccagcaguucgggcgcgacaucgccgacacgaccgacgcgguccgcgacccccagacccuggagauccucgacaucacccccugcagcuucggcgggguguccgugaucacgccgggcaccaacaccagcaaccaggucgccgugcuguaccagggcgugaacugcaccgagguccccguggccauccacgccgaccagcugacgcccaccuggcggguguacuccaccgggagcaacgucuuccagacccgcgccggcugccucaucggggcggagcacgugaacaacuccuacgagugcgacauccccaucggcgccggcaucugcgccagcuaccagacgcagaccaacuccccgcggcgcgcccggagcguggcgucccagagcaucaucgccuacaccaugucccugggggccgagaacagcgucgccuacuccaacaacagcaucgccauccccaccaacuucacgaucuccgugaccaccgagauccugcccgugagcaugaccaagacgagcgucgacugcaccauguacaucugcggcgacuccaccgagugcagcaaccuccugcugcaguacggguccuucugcacccagcucaaccgcgcgcugacgggcaucgccguggagcaggacaagaacacccaggagguguucgcccaggucaagcagaucuacaagacgcccccgaucaaggacuucgggggcuucaacuucagccagauccugcccgaccccuccaagcccagcaagcgguccuucaucgaggaccuccuguucaacaaggugacccuggccgacgccggcuucaucaagcaguacggggacugccucggcgacaucgcggcccgcgaccugaucugcgcccagaaguucaacgggcugaccgugcucccgccccugcugaccgacgagaugaucgcccaguacaccagcgcccuccuggcgggcaccaucacguccggguggaccuucggcgccggcgccgcccugcagauccccuucgcgaugcagauggccuaccgguucaacgggaucggcgucacccagaacgugcucuacgagaaccagaagcugaucgccaaccaguucaacagcgccaucgggaagauccaggacucccugagcuccaccgccagcgcgcucggcaagcugcaggacguggucaaccagaacgcccaggcccugaacacgcucgugaagcagcuguccagcaacuucggggccaucuccagcgugcugaacgacauccucucccgccuggacaaggucgaggccgaggugcagaucgaccggcugaucaccggccgccuccagagccugcagaccuacgugacccagcagcugauccgggcggccgagauccgcgccagcgccaaccucgccgcgaccaagauguccgagugcguccugggccagagcaagcggguggacuucugcgggaagggcuaccaccugauguccuucccccagagcgccccgcacgggguggucuuccuccacgugacguacguccccgcccaggagaagaacuucaccaccgcccccgcgaucugccacgacggcaaggcccacuucccccgcgaggggguguucguguccaacggcacccacugguucgucacgcagcggaacuucuacgagccgcagaucaucaccaccgacaacaccuucgugagcggcaacugcgacguggucaucgggaucgugaacaacacgguguacgacccccugcagcccgagcuggacuccuucaaggaggagcucgacaaguacuucaagaaccacaccagccccgacgucgaccugggcgacaucuccgggaucaacgccagcguggugaacauccagaaggagaucgaccgccugaacgaggucgccaagaaccucaacgagucccugaucgaccugcaggagcucggcaaguacgagcaguacaucaaguggccgugguacaucuggcugggcuucaucgccgggcugaucgcgaucgugauggugaccaucaugcucugcugcaugaccagcugcugcuccugccugaagggcugcugcagcugcggguccugcugcaaguucgacgaggacgacagcgagcccguccugaagggcgugaagcuccacuacacgugaggacuaguguccaccugucccuccugggcugcuggauugucucguuuuccugccaaauaaacaggaucagcgcuuuacagaucuaaaaaaaaaaaaaaaaaaaaaaaaaaaaaaaaaaaaaaaaaaaaaaaaaaaaaaaaaaaaaaaaaaaaaaaaaaaaaaaaaaaaaaaaaaaaaaaaaaaa

SEQ ID NO: 25203 - RNA, 4105 nt, Artificial Sequence
  SARS-CoV-2/Wuhan/WIV05/2019__EPI_ISL_402128 spike protein mRNA gc (1-1273)(L18F_T20N_P26S_D138Y_R190S_K417T_E484K_N501Y_D614G_H655Y _T1027I)
aggagacccgugacccggaaguuguacggcuacgcgacuuucccucccacaaacccucgcgcccuuccuuuccuacuugggcccggcagaaagcuuaccauguucguguuccugguccuccugccccuggugagcucccagugcgugaacuucaccaaccgcacccagcucccgagcgccuacacgaacuccuucacccggggcgucuacuaccccgacaagguguuccgcagcuccgugcugcacagcacccaggaccuguuccuccccuucuucuccaacgucaccugguuccacgccauccacgugagcgggacgaacggcaccaagcgguucgacaaccccgugcugccguucaacgacggggucuacuucgcguccaccgagaaguccaacaucauccgcggcuggaucuucgggaccacgcuggacuccaagacccagagccuccugaucgugaacaacgccaccaacguggucaucaaggugugcgaguuccaguucugcaacuaccccuuccugggcguguacuaccacaagaacaacaaguccuggauggagagcgaguuccgggucuacuccagcgccaacaacugcaccuucgaguacgugucccagcccuuccucauggaccuggagggcaagcaggggaacuucaagaaccugagcgaguucguguucaagaacaucgacggcuacuucaagaucuacuccaagcacacgcccaucaaccucguccgcgaccugccgcagggguucagcgcccuggagccccucguggaccugcccaucggcaucaacaucacccgguuccagacccugcucgcccugcaccgcagcuaccugacccccggggacuccagcuccggcuggacggcgggcgccgccgccuacuacgugggguaccuccagccgcggaccuuccugcugaaguacaacgagaacggcaccaucaccgacgcggucgacugcgcccucgacccccugagcgagacgaagugcacccugaaguccuucaccguggagaaggggaucuaccagaccagcaacuuccgcgugcagcccacggaguccaucguccgguuccccaacaucaccaaccucugcccguucggcgagguguucaacgccacccgcuucgccagcgucuacgccuggaaccggaagcgcaucuccaacugcguggcggacuacagcgugcuguacaacuccgccagcuucuccaccuucaagugcuacggcgucagccccacgaagcugaacgaccucugcuucaccaacguguacgccgacuccuucgugauccgcggggacgagguccggcagaucgcccccggccagaccgggaccaucgccgacuacaacuacaagcugcccgacgacuucacgggcugcgugaucgcguggaacagcaacaaccuggacuccaaggucgggggcaacuacaacuaccucuaccggcuguuccgcaagagcaaccugaagccguucgagcgggacaucuccaccgagaucuaccaggccggcagcacccccugcaacggggugaagggcuucaacugcuacuucccccuccagagcuacggguuccagcccaccuacggcgugggguaccagccguaccgcguggucgugcuguccuucgagcugcuccacgcccccgccacggugugcggccccaagaaguccaccaaccuggucaagaacaagugcgugaacuucaacuucaacggccugaccgggaccggcgugcucaccgagagcaacaagaaguuccugcccuuccagcaguucgggcgggacaucgccgacacgaccgacgcgguccgcgacccgcagacccuggagauccuggacaucacccccugcagcuucggcgggguguccgugaucacgcccggcaccaacaccagcaaccaggucgccgugcucuaccagggcgugaacugcaccgaggucccgguggccauccacgccgaccagcugacgcccaccuggcgcguguacuccaccgggagcaacgucuuccagacccgggccggcugccugaucggggcggaguacgugaacaacuccuacgagugcgacauccccaucggcgccggcaucugcgccagcuaccagacgcagaccaacagcccccgccgggcccgcagcguggcgucccagagcaucaucgccuacaccaugucccucggggccgagaacagcgucgccuacuccaacaacagcaucgccaucccgaccaacuucacgaucagcgugaccaccgagauccugcccguguccaugaccaagacgagcgucgacugcaccauguacaucugcggcgacuccaccgagugcagcaaccugcuccugcaguacggguccuucugcacccagcugaaccgggcgcucacgggcaucgccguggagcaggacaagaacacccaggagguguucgcccaggucaagcagaucuacaagaccccgcccaucaaggacuucgggggcuucaacuucagccagauccugcccgaccccuccaagcccagcaagcgcuccuucaucgaggaccuccuguucaacaaggugacccuggccgacgccggcuucaucaagcaguacggggacugccugggcgacaucgcggcccgggaccucaucugcgcccagaaguucaacgggcugacggugcugcccccgcuccugaccgacgagaugaucgcccaguacaccagcgcccugcucgcgggcaccaucacguccggguggaccuucggcgccggcgccgcccugcagauccccuucgcgaugcagauggccuaccgcuucaacgggaucggcgucacccagaacgugcuguacgagaaccagaagcucaucgccaaccaguucaacagcgccaucgggaagauccaggacucccugagcuccaccgccagcgcgcugggcaagcuccaggacguggucaaccagaacgcccaggcccugaacacgcuggugaagcagcucuccagcaacuucggggccaucuccagcgugcugaacgacauccugagccggcucgacaaggucgaggccgaggugcagaucgaccgccugaucaccggccggcugcagucccuccagaccuacgugacccagcagcugauccgcgcggccgagauccgggccagcgccaaccuggccgcgaucaagauguccgagugcguccucggccagagcaagcgcguggacuucugcgggaagggcuaccaccugauguccuucccccagagcgcgccccacgggguggucuuccugcacgugaccuacgucccggcccaggagaagaacuucacgaccgcccccgccaucugccacgacggcaaggcccacuucccccgggaggggguguucguguccaacggcacccacugguucgucacccagcgcaacuucuacgagccccagaucaucacgaccgacaacaccuucgugagcggcaacugcgacguggucaucgggaucgugaacaacaccguguacgacccgcuccagcccgagcuggacuccuucaaggaggagcuggacaaguacuucaagaaccacacgagccccgacgucgaccucggcgacaucuccgggaucaacgccagcguggugaacauccagaaggagaucgaccggcugaacgaggucgccaagaaccugaacgagucccucaucgaccugcaggagcugggcaaguacgagcaguacaucaaguggcccugguacaucuggcucggcuucaucgccgggcugaucgcgaucgugauggugaccaucaugcugugcugcaugaccagcugcugcuccugccucaagggcugcugcagcugcggguccugcugcaaguucgacgaggacgacagcgagccgguccugaagggcgugaagcugcacuacaccugaggacuaguguccaccugucccuccugggcugcuggauugucucguuuuccugccaaauaaacaggaucagcgcuuuacagaucuaaaaaaaaaaaaaaaaaaaaaaaaaaaaaaaaaaaaaaaaaaaaaaaaaaaaaaaaaaaaaaaaaaaaaaaaaaaaaaaaaaaaaaaaaaaaaaaaaaaa

SEQ ID NO: 25204 - RNA, 4105 nt, Artificial Sequence
  SARS-CoV-2/Wuhan/WIV05/2019__EPI_ISL_402128 spike protein mRNA gc (1-1273)(S13I_W152C_L452R_D614G)
aggagacccgugacccggaaguuguacggcuacgcgacuuucccucccacaaacccucgcgcccuuccuuuccuacuugggcccggcagaaagcuuaccauguucguguuccugguccuccugccccuggugagcauccagugcgugaaccucaccacccgcacgcagcugccgcccgccuacaccaacuccuucacccggggcgucuacuaccccgacaagguguuccgcagcuccgugcugcacagcacccaggaccucuuccugcccuucuucuccaacgucacgugguuccacgccauccacgugagcgggaccaacggcaccaagcgguucgacaacccggugcugcccuucaacgacggggucuacuucgcguccaccgagaaguccaacaucauccgcggcuggaucuucgggacgacccucgacagcaagacccagagccugcugaucgugaacaacgccaccaacguggucaucaaggugugcgaguuccaguucugcaacgaccccuuccucggcguguacuaccacaagaacaacaaguccugcauggagagcgaguuccgggucuacuccagcgccaacaacugcacguucgaguacgugucccagcccuuccugauggaccuggagggcaagcaggggaacuucaagaaccuccgcgaguucguguucaagaacaucgacggcuacuucaagaucuacagcaagcacaccccgaucaaccugguccgggaccugccccagggguucuccgcccucgagccccugguggaccugcccaucggcaucaacaucacccgcuuccagacccuccuggcccugcaccggagcuaccucacgccgggggacuccagcagcggcuggaccgcgggcgccgccgccuacuacgugggguaccugcagccccgcaccuuccugcucaaguacaacgagaacggcaccaucacggacgcggucgacugcgcccuggacccccuguccgagaccaagugcacccucaagagcuucaccguggagaaggggaucuaccagacguccaacuuccgggugcagcccaccgagagcaucguccgcuucccgaacaucaccaaccugugccccuucggcgagguguucaacgccacccgguucgccuccgucuacgccuggaaccgcaagcggaucagcaacugcguggcggacuacuccgugcuguacaacagcgccuccuucagcacguucaagugcuacggcgucucccccaccaagcucaacgaccugugcuucaccaacguguacgccgacagcuucgugauccgcggggacgagguccggcagaucgcccccggccagaccgggaagaucgccgacuacaacuacaagcugccggacgacuucacgggcugcgugaucgcguggaacuccaacaaccucgacagcaaggucgggggcaacuacaacuaccgcuaccggcuguuccgcaaguccaaccugaagcccuucgagcgggacaucagcaccgagaucuaccaggccggcuccacccccugcaacgggguggagggcuucaacugcuacuucccccuccagagcuacggguuccagccgaccaacggcgugggguaccagcccuaccgcguggucgugcuguccuucgagcugcuccacgcccccgccacggugugcggccccaagaaguccaccaaccuggucaagaacaagugcgugaacuucaacuucaacggccugaccgggaccggcgugcucaccgagagcaacaagaaguuccugccguuccagcaguucgggcgcgacaucgccgacacgaccgacgcgguccgggacccccagacccuggagauccuggacaucacccccugcagcuucggcggggugagcgugaucacgccgggcaccaacaccuccaaccaggucgccgugcucuaccagggcgugaacugcaccgagguccccguggccauccacgccgaccagcugacgcccaccuggcgcguguacagcaccggguccaacgucuuccagacccgggccggcugccugaucggggcggagcacgugaacaacagcuacgagugcgacauccccaucggcgccggcaucugcgccuccuaccagacgcagaccaacagcccgcgccgggcccgcuccguggcgagccaguccaucaucgccuacaccaugagccucggggccgagaacuccgucgccuacagcaacaacuccaucgccauccccaccaacuucacgaucagcgugaccaccgagauccugcccguguccaugaccaagacgagcgucgacugcaccauguacaucugcggcgacagcaccgagugcuccaaccugcuccugcaguacgggagcuucugcacccagcugaaccgggcgcucacgggcaucgccguggagcaggacaagaacacccaggagguguucgcccaggucaagcagaucuacaagacgcccccgaucaaggacuucgggggcuucaacuucucccagauccugcccgaccccagcaagcccuccaagcgcagcuucaucgaggaccuccuguucaacaaggugacccuggccgacgccggcuucaucaagcaguacggggacugccugggcgacaucgcggcccgggaccucaucugcgcccagaaguucaacgggcugaccgugcugccgccccuccugaccgacgagaugaucgcccaguacaccuccgcccugcucgcgggcaccaucacgagcggguggaccuucggcgccggcgccgcccugcagauccccuucgcgaugcagauggccuaccgcuucaacgggaucggcgucacccagaacgugcuguacgagaaccagaagcucaucgccaaccaguucaacuccgccaucgggaagauccaggacagccuguccagcaccgccuccgcgcugggcaagcuccaggacguggucaaccagaacgcccaggcccugaacacgcuggugaagcagcucagcuccaacuucggggccaucagcuccgugcugaacgacauccugagccggcucgacaaggucgaggccgaggugcagaucgaccgccugaucaccggccggcugcagucccuccagaccuacgugacccagcagcugauccgcgcggccgagauccgggccagcgccaaccuggccgcgaccaagaugagcgagugcguccucggccaguccaagcgcguggacuucugcgggaagggcuaccaccugaugagcuucccccaguccgccccgcacgggguggucuuccugcacgugacguacguccccgcccaggagaagaacuucaccaccgcccccgcgaucugccacgacggcaaggcccacuucccccgggaggggguguucgugagcaacggcacccacugguucgucacgcagcgcaacuucuacgagccgcagaucaucaccaccgacaacaccuucguguccggcaacugcgacguggucaucgggaucgugaacaacacgguguacgacccccuccagcccgagcuggacagcuucaaggaggagcuggacaaguacuucaagaaccacaccucccccgacgucgaccucggcgacaucagcgggaucaacgccuccguggugaacauccagaaggagaucgaccggcugaacgaggucgccaagaaccugaacgagagccucaucgaccugcaggagcugggcaaguacgagcaguacaucaaguggccgugguacaucuggcucggcuucaucgccgggcugaucgcgaucgugauggugaccaucaugcugugcugcaugaccuccugcugcagcugccucaagggcugcugcuccugcgggagcugcugcaaguucgacgaggacgacuccgagcccguccugaagggcgugaagcugcacuacacgugaggacuaguguccaccugucccuccugggcugcuggauugucucguuuuccugccaaauaaacaggaucagcgcuuuacagaucuaaaaaaaaaaaaaaaaaaaaaaaaaaaaaaaaaaaaaaaaaaaaaaaaaaaaaaaaaaaaaaaaaaaaaaaaaaaaaaaaaaaaaaaaaaaaaaaaaaaa

SEQ ID NO: 25205 - RNA, 4105 nt, Artificial Sequence
  SARS-CoV-2/Wuhan/WIV05/2019__EPI_ISL_402128 spike protein mRNA gc (1-1273)
aggagacccgugacccggaaguuguacggcuacgcgacuuucccucccacaaacccucgcgcccuuccuuuccuacuugggcccggcagaaagcuuaccauguucguguuccuggugcugcugccccuggugagcagccagugcgugaaccugaccacccggacccagcugccaccagccuacaccaacagcuucacccggggcgucuacuaccccgacaagguguuccggagcagcguccugcacagcacccaggaccuguuccugcccuucuucagcaacgugaccugguuccacgccauccacgugagcggcaccaacggcaccaagcgguucgacaaccccgugcugcccuucaacgacggcguguacuucgccagcaccgagaagagcaacaucauccggggcuggaucuucggcaccacccuggacagcaagacccagagccugcugaucgugaauaacgccaccaacguggugaucaaggugugcgaguuccaguucugcaacgaccccuuccugggcguguacuaccacaagaacaacaagagcuggauggagagcgaguuccggguguacagcagcgccaacaacugcaccuucgaguacgugagccagcccuuccugauggaccuggagggcaagcagggcaacuucaagaaccugcgggaguucguguucaagaacaucgacggcuacuucaagaucuacagcaagcacaccccaaucaaccuggugcgggaucugccccagggcuucucagcccuggagccccugguggaccugcccaucggcaucaacaucacccgguuccagacccugcuggcccugcaccggagcuaccugaccccaggcgacagcagcagcggguggacagcaggcgcggcugcuuacuacgugggcuaccugcagccccggaccuuccugcugaaguacaacgagaacggcaccaucaccgacgccguggacugcgcccuggacccucugagcgagaccaagugcacccugaagagcuucaccguggagaagggcaucuaccagaccagcaacuuccgggugcagcccaccgagagcaucgugcgguuccccaacaucaccaaccugugccccuucggcgagguguucaacgccacccgguucgccagcguguacgccuggaaccggaagcggaucagcaacugcguggccgacuacagcgugcuguacaacagcgccagcuucagcaccuucaagugcuacggcgugagccccaccaagcugaacgaccugugcuucaccaacguguacgccgacagcuucgugauccguggcgacgaggugcggcagaucgcacccggccagacaggcaagaucgccgacuacaacuacaagcugcccgacgacuucaccggcugcgugaucgccuggaacagcaacaaccucgacagcaaggugggcggcaacuacaacuaccuguaccggcuguuccggaagagcaaccugaagcccuucgagcgggacaucagcaccgagaucuaccaagccggcuccaccccuugcaacggcguggagggcuucaacugcuacuucccucugcagagcuacggcuuccagcccaccaacggcgugggcuaccagcccuaccgggugguggugcugagcuucgagcugcugcacgccccagccaccguguguggccccaagaagagcaccaaccuggugaagaacaagugcgugaacuucaacuucaacggccuuaccggcaccggcgugcugaccgagagcaacaagaaauuccugcccuuucagcaguucggccgggacaucgccgacaccaccgacgcugugcgggauccccagacccuggagauccuggacaucaccccuugcagcuucggcggcgugagcgugaucaccccaggcaccaacaccagcaaccagguggccgugcuguaccaggacgugaacugcaccgaggugcccguggccauccacgccgaccagcugacacccaccuggcgggucuacagcaccggcagcaacguguuccagacccgggccgguugccugaucggcgccgagcacgugaacaacagcuacgagugcgacauccccaucggcgccggcaucugugccagcuaccagacccagaccaauucaccccggagggcaaggagcguggccagccagagcaucaucgccuacaccaugagccugggcgccgagaacagcguggccuacagcaacaacagcaucgccauccccaccaacuucaccaucagcgugaccaccgagauucugcccgugagcaugaccaagaccagcguggacugcaccauguacaucugcggcgacagcaccgagugcagcaaccugcugcugcaguacggcagcuucugcacccagcugaaccgggcccugaccggcaucgccguggagcaggacaagaacacccaggagguguucgcccaggugaagcagaucuacaagaccccucccaucaaggacuucggcggcuucaacuucagccagauccugcccgaccccagcaagcccagcaagcggagcuucaucgaggaccugcuguucaacaaggugacccuagccgacgccggcuucaucaagcaguacggcgacugccucggcgacauagccgcccgggaccugaucugcgcccagaaguucaacggccugaccgugcugccuccccugcugaccgacgagaugaucgcccaguacaccagcgcccuguuagccggaaccaucaccagcggcuggacuuucggcgcuggagccgcucugcagauccccuucgccaugcagauggccuaccgguucaacggcaucggcgugacccagaacgugcuguacgagaaccagaagcugaucgccaaccaguucaacagcgccaucggcaagauccaggacagccugagcagcaccgcuagcgcccugggcaagcugcaggacguggugaaccagaacgcccaggcccugaacacccuggugaagcagcugagcagcaacuucggcgccaucagcagcgugcugaacgacauccugagccggcuggacaaggucgaggccgaggugcagaucgaccggcugaucacuggccggcugcagagccugcagaccuacgugacccagcagcugauccgggccgccgagauucgggccagcgccaaccuggccgccaccaagaugagcgagugcgugcugggccagagcaagcggguggacuucugcggcaagggcuaccaccugaugagcuuuccccagagcgcaccccacggagugguguuccugcacgugaccuacgugcccgcccaggagaagaacuucaccaccgccccagccaucugccacgacggcaaggcccacuuuccccgggagggcguguucgugagcaacggcacccacugguucgugacccagcggaacuucuacgagccccagaucaucaccaccgacaacaccuucgugagcggcaacugcgacguggugaucggcaucgugaacaacaccguguacgauccccugcagcccgagcuggacagcuucaaggaggagcuggacaaguacuucaagaaucacaccagccccgacguggaccugggcgacaucagcggcaucaacgccagcguggugaacauccagaaggagaucgaucggcugaacgagguggccaagaaccugaacgagagccugaucgaccugcaggagcugggcaaguacgagcaguacaucaaguggcccugguacaucuggcugggcuucaucgccggccugaucgccaucgugauggugaccaucaugcugugcugcaugaccagcugcugcagcugccugaagggcuguugcagcugcggcagcugcugcaaguucgacgaggacgacagcgagcccgugcugaagggcgugaagcugcacuacaccugaggacuaguguccaccugucccuccugggcugcuggauugucucguuuuccugccaaauaaacaggaucagcgcuuuacagaucuaaaaaaaaaaaaaaaaaaaaaaaaaaaaaaaaaaaaaaaaaaaaaaaaaaaaaaaaaaaaaaaaaaaaaaaaaaaaaaaaaaaaaaaaaaaaaaaaaaaa

SEQ ID NO: 25206 - RNA, 4105 nt, Artificial Sequence
  SARS-CoV-2/Wuhan/WIV05/2019__EPI_ISL_402128 spike protein mRNA gc (1-1273)(D614G)
aggagacccgugacccggaaguuguacggcuacgcgacuuucccucccacaaacccucgcgcccuuccuuuccuacuugggcccggcagaaagcuuaccauguucguguuccuggugcugcugccccuggugagcagccagugcgugaaccugaccacccggacccagcugccaccagccuacaccaacagcuucacccggggcgucuacuaccccgacaagguguuccggagcagcguccugcacagcacccaggaccuguuccugcccuucuucagcaacgugaccugguuccacgccauccacgugagcggcaccaacggcaccaagcgguucgacaaccccgugcugcccuucaacgacggcguguacuucgccagcaccgagaagagcaacaucauccggggcuggaucuucggcaccacccuggacagcaagacccagagccugcugaucgugaauaacgccaccaacguggugaucaaggugugcgaguuccaguucugcaacgaccccuuccugggcguguacuaccacaagaacaacaagagcuggauggagagcgaguuccggguguacagcagcgccaacaacugcaccuucgaguacgugagccagcccuuccugauggaccuggagggcaagcagggcaacuucaagaaccugcgggaguucguguucaagaacaucgacggcuacuucaagaucuacagcaagcacaccccaaucaaccuggugcgggaucugccccagggcuucucagcccuggagccccugguggaccugcccaucggcaucaacaucacccgguuccagacccugcuggcccugcaccggagcuaccugaccccaggcgacagcagcagcggguggacagcaggcgcggcugcuuacuacgugggcuaccugcagccccggaccuuccugcugaaguacaacgagaacggcaccaucaccgacgccguggacugcgcccuggacccucugagcgagaccaagugcacccugaagagcuucaccguggagaagggcaucuaccagaccagcaacuuccgggugcagcccaccgagagcaucgugcgguuccccaacaucaccaaccugugccccuucggcgagguguucaacgccacccgguucgccagcguguacgccuggaaccggaagcggaucagcaacugcguggccgacuacagcgugcuguacaacagcgccagcuucagcaccuucaagugcuacggcgugagccccaccaagcugaacgaccugugcuucaccaacguguacgccgacagcuucgugauccguggcgacgaggugcggcagaucgcacccggccagacaggcaagaucgccgacuacaacuacaagcugcccgacgacuucaccggcugcgugaucgccuggaacagcaacaaccucgacagcaaggugggcggcaacuacaacuaccuguaccggcuguuccggaagagcaaccugaagcccuucgagcgggacaucagcaccgagaucuaccaagccggcuccaccccuugcaacggcguggagggcuucaacugcuacuucccucugcagagcuacggcuuccagcccaccaacggcgugggcuaccagcccuaccgggugguggugcugagcuucgagcugcugcacgccccagccaccguguguggccccaagaagagcaccaaccuggugaagaacaagugcgugaacuucaacuucaacggccuuaccggcaccggcgugcugaccgagagcaacaagaaauuccugcccuuucagcaguucggccgggacaucgccgacaccaccgacgcugugcgggauccccagacccuggagauccuggacaucaccccuugcagcuucggcggcgugagcgugaucaccccaggcaccaacaccagcaaccagguggccgugcuguaccagggcgugaacugcaccgaggugcccguggccauccacgccgaccagcugacacccaccuggcgggucuacagcaccggcagcaacguguuccagacccgggccgguugccugaucggcgccgagcacgugaacaacagcuacgagugcgacauccccaucggcgccggcaucugugccagcuaccagacccagaccaauucaccccggagggcaaggagcguggccagccagagcaucaucgccuacaccaugagccugggcgccgagaacagcguggccuacagcaacaacagcaucgccauccccaccaacuucaccaucagcgugaccaccgagauucugcccgugagcaugaccaagaccagcguggacugcaccauguacaucugcggcgacagcaccgagugcagcaaccugcugcugcaguacggcagcuucugcacccagcugaaccgggcccugaccggcaucgccguggagcaggacaagaacacccaggagguguucgcccaggugaagcagaucuacaagaccccucccaucaaggacuucggcggcuucaacuucagccagauccugcccgaccccagcaagcccagcaagcggagcuucaucgaggaccugcuguucaacaaggugacccuagccgacgccggcuucaucaagcaguacggcgacugccucggcgacauagccgcccgggaccugaucugcgcccagaaguucaacggccugaccgugcugccuccccugcugaccgacgagaugaucgcccaguacaccagcgcccuguuagccggaaccaucaccagcggcuggacuuucggcgcuggagccgcucugcagauccccuucgccaugcagauggccuaccgguucaacggcaucggcgugacccagaacgugcuguacgagaaccagaagcugaucgccaaccaguucaacagcgccaucggcaagauccaggacagccugagcagcaccgcuagcgcccugggcaagcugcaggacguggugaaccagaacgcccaggcccugaacacccuggugaagcagcugagcagcaacuucggcgccaucagcagcgugcugaacgacauccugagccggcuggacaaggucgaggccgaggugcagaucgaccggcugaucacuggccggcugcagagccugcagaccuacgugacccagcagcugauccgggccgccgagauucgggccagcgccaaccuggccgccaccaagaugagcgagugcgugcugggccagagcaagcggguggacuucugcggcaagggcuaccaccugaugagcuuuccccagagcgcaccccacggagugguguuccugcacgugaccuacgugcccgcccaggagaagaacuucaccaccgccccagccaucugccacgacggcaaggcccacuuuccccgggagggcguguucgugagcaacggcacccacugguucgugacccagcggaacuucuacgagccccagaucaucaccaccgacaacaccuucgugagcggcaacugcgacguggugaucggcaucgugaacaacaccguguacgauccccugcagcccgagcuggacagcuucaaggaggagcuggacaaguacuucaagaaucacaccagccccgacguggaccugggcgacaucagcggcaucaacgccagcguggugaacauccagaaggagaucgaucggcugaacgagguggccaagaaccugaacgagagccugaucgaccugcaggagcugggcaaguacgagcaguacaucaaguggcccugguacaucuggcugggcuucaucgccggccugaucgccaucgugauggugaccaucaugcugugcugcaugaccagcugcugcagcugccugaagggcuguugcagcugcggcagcugcugcaaguucgacgaggacgacagcgagcccgugcugaagggcgugaagcugcacuacaccugaggacuaguguccaccugucccuccugggcugcuggauugucucguuuuccugccaaauaaacaggaucagcgcuuuacagaucuaaaaaaaaaaaaaaaaaaaaaaaaaaaaaaaaaaaaaaaaaaaaaaaaaaaaaaaaaaaaaaaaaaaaaaaaaaaaaaaaaaaaaaaaaaaaaaaaaaaa

SEQ ID NO: 25207 - RNA, 4105 nt, Artificial Sequence
  SARS-CoV-2/Wuhan/WIV05/2019__EPI_ISL_402128 spike protein mRNA gc (1-1273)(A222V_D614G)
aggagacccgugacccggaaguuguacggcuacgcgacuuucccucccacaaacccucgcgcccuuccuuuccuacuugggcccggcagaaagcuuaccauguucguguuccuggugcugcugccccuggugagcagccagugcgugaaccugaccacccggacccagcugccaccagccuacaccaacagcuucacccggggcgucuacuaccccgacaagguguuccggagcagcguccugcacagcacccaggaccuguuccugcccuucuucagcaacgugaccugguuccacgccauccacgugagcggcaccaacggcaccaagcgguucgacaaccccgugcugcccuucaacgacggcguguacuucgccagcaccgagaagagcaacaucauccggggcuggaucuucggcaccacccuggacagcaagacccagagccugcugaucgugaauaacgccaccaacguggugaucaaggugugcgaguuccaguucugcaacgaccccuuccugggcguguacuaccacaagaacaacaagagcuggauggagagcgaguuccggguguacagcagcgccaacaacugcaccuucgaguacgugagccagcccuuccugauggaccuggagggcaagcagggcaacuucaagaaccugcgggaguucguguucaagaacaucgacggcuacuucaagaucuacagcaagcacaccccaaucaaccuggugcgggaucugccccagggcuucucagugcuggagccccugguggaccugcccaucggcaucaacaucacccgguuccagacccugcuggcccugcaccggagcuaccugaccccaggcgacagcagcagcggguggacagcaggcgcggcugcuuacuacgugggcuaccugcagccccggaccuuccugcugaaguacaacgagaacggcaccaucaccgacgccguggacugcgcccuggacccucugagcgagaccaagugcacccugaagagcuucaccguggagaagggcaucuaccagaccagcaacuuccgggugcagcccaccgagagcaucgugcgguuccccaacaucaccaaccugugccccuucggcgagguguucaacgccacccgguucgccagcguguacgccuggaaccggaagcggaucagcaacugcguggccgacuacagcgugcuguacaacagcgccagcuucagcaccuucaagugcuacggcgugagccccaccaagcugaacgaccugugcuucaccaacguguacgccgacagcuucgugauccguggcgacgaggugcggcagaucgcacccggccagacaggcaagaucgccgacuacaacuacaagcugcccgacgacuucaccggcugcgugaucgccuggaacagcaacaaccucgacagcaaggugggcggcaacuacaacuaccuguaccggcuguuccggaagagcaaccugaagcccuucgagcgggacaucagcaccgagaucuaccaagccggcuccaccccuugcaacggcguggagggcuucaacugcuacuucccucugcagagcuacggcuuccagcccaccaacggcgugggcuaccagcccuaccgggugguggugcugagcuucgagcugcugcacgccccagccaccguguguggccccaagaagagcaccaaccuggugaagaacaagugcgugaacuucaacuucaacggccuuaccggcaccggcgugcugaccgagagcaacaagaaauuccugcccuuucagcaguucggccgggacaucgccgacaccaccgacgcugugcgggauccccagacccuggagauccuggacaucaccccuugcagcuucggcggcgugagcgugaucaccccaggcaccaacaccagcaaccagguggccgugcuguaccagggcgugaacugcaccgaggugcccguggccauccacgccgaccagcugacacccaccuggcgggucuacagcaccggcagcaacguguuccagacccgggccgguugccugaucggcgccgagcacgugaacaacagcuacgagugcgacauccccaucggcgccggcaucugugccagcuaccagacccagaccaauucaccccggagggcaaggagcguggccagccagagcaucaucgccuacaccaugagccugggcgccgagaacagcguggccuacagcaacaacagcaucgccauccccaccaacuucaccaucagcgugaccaccgagauucugcccgugagcaugaccaagaccagcguggacugcaccauguacaucugcggcgacagcaccgagugcagcaaccugcugcugcaguacggcagcuucugcacccagcugaaccgggcccugaccggcaucgccguggagcaggacaagaacacccaggagguguucgcccaggugaagcagaucuacaagaccccucccaucaaggacuucggcggcuucaacuucagccagauccugcccgaccccagcaagcccagcaagcggagcuucaucgaggaccugcuguucaacaaggugacccuagccgacgccggcuucaucaagcaguacggcgacugccucggcgacauagccgcccgggaccugaucugcgcccagaaguucaacggccugaccgugcugccuccccugcugaccgacgagaugaucgcccaguacaccagcgcccuguuagccggaaccaucaccagcggcuggacuuucggcgcuggagccgcucugcagauccccuucgccaugcagauggccuaccgguucaacggcaucggcgugacccagaacgugcuguacgagaaccagaagcugaucgccaaccaguucaacagcgccaucggcaagauccaggacagccugagcagcaccgcuagcgcccugggcaagcugcaggacguggugaaccagaacgcccaggcccugaacacccuggugaagcagcugagcagcaacuucggcgccaucagcagcgugcugaacgacauccugagccggcuggacaaggucgaggccgaggugcagaucgaccggcugaucacuggccggcugcagagccugcagaccuacgugacccagcagcugauccgggccgccgagauucgggccagcgccaaccuggccgccaccaagaugagcgagugcgugcugggccagagcaagcggguggacuucugcggcaagggcuaccaccugaugagcuuuccccagagcgcaccccacggagugguguuccugcacgugaccuacgugcccgcccaggagaagaacuucaccaccgccccagccaucugccacgacggcaaggcccacuuuccccgggagggcguguucgugagcaacggcacccacugguucgugacccagcggaacuucuacgagccccagaucaucaccaccgacaacaccuucgugagcggcaacugcgacguggugaucggcaucgugaacaacaccguguacgauccccugcagcccgagcuggacagcuucaaggaggagcuggacaaguacuucaagaaucacaccagccccgacguggaccugggcgacaucagcggcaucaacgccagcguggugaacauccagaaggagaucgaucggcugaacgagguggccaagaaccugaacgagagccugaucgaccugcaggagcugggcaaguacgagcaguacaucaaguggcccugguacaucuggcugggcuucaucgccggccugaucgccaucgugauggugaccaucaugcugugcugcaugaccagcugcugcagcugccugaagggcuguugcagcugcggcagcugcugcaaguucgacgaggacgacagcgagcccgugcugaagggcgugaagcugcacuacaccugaggacuaguguccaccugucccuccugggcugcuggauugucucguuuuccugccaaauaaacaggaucagcgcuuuacagaucuaaaaaaaaaaaaaaaaaaaaaaaaaaaaaaaaaaaaaaaaaaaaaaaaaaaaaaaaaaaaaaaaaaaaaaaaaaaaaaaaaaaaaaaaaaaaaaaaaaaa

SEQ ID NO: 25208 - RNA, 4105 nt, Artificial Sequence
  SARS-CoV-2/Wuhan/WIV05/2019__EPI_ISL_402128 spike protein mRNA gc (1-1273)(N439K_D614G)
aggagacccgugacccggaaguuguacggcuacgcgacuuucccucccacaaacccucgcgcccuuccuuuccuacuugggcccggcagaaagcuuaccauguucguguuccuggugcugcugccccuggugagcagccagugcgugaaccugaccacccggacccagcugccaccagccuacaccaacagcuucacccggggcgucuacuaccccgacaagguguuccggagcagcguccugcacagcacccaggaccuguuccugcccuucuucagcaacgugaccugguuccacgccauccacgugagcggcaccaacggcaccaagcgguucgacaaccccgugcugcccuucaacgacggcguguacuucgccagcaccgagaagagcaacaucauccggggcuggaucuucggcaccacccuggacagcaagacccagagccugcugaucgugaauaacgccaccaacguggugaucaaggugugcgaguuccaguucugcaacgaccccuuccugggcguguacuaccacaagaacaacaagagcuggauggagagcgaguuccggguguacagcagcgccaacaacugcaccuucgaguacgugagccagcccuuccugauggaccuggagggcaagcagggcaacuucaagaaccugcgggaguucguguucaagaacaucgacggcuacuucaagaucuacagcaagcacaccccaaucaaccuggugcgggaucugccccagggcuucucagcccuggagccccugguggaccugcccaucggcaucaacaucacccgguuccagacccugcuggcccugcaccggagcuaccugaccccaggcgacagcagcagcggguggacagcaggcgcggcugcuuacuacgugggcuaccugcagccccggaccuuccugcugaaguacaacgagaacggcaccaucaccgacgccguggacugcgcccuggacccucugagcgagaccaagugcacccugaagagcuucaccguggagaagggcaucuaccagaccagcaacuuccgggugcagcccaccgagagcaucgugcgguuccccaacaucaccaaccugugccccuucggcgagguguucaacgccacccgguucgccagcguguacgccuggaaccggaagcggaucagcaacugcguggccgacuacagcgugcuguacaacagcgccagcuucagcaccuucaagugcuacggcgugagccccaccaagcugaacgaccugugcuucaccaacguguacgccgacagcuucgugauccguggcgacgaggugcggcagaucgcacccggccagacaggcaagaucgccgacuacaacuacaagcugcccgacgacuucaccggcugcgugaucgccuggaacagcaagaaccucgacagcaaggugggcggcaacuacaacuaccuguaccggcuguuccggaagagcaaccugaagcccuucgagcgggacaucagcaccgagaucuaccaagccggcuccaccccuugcaacggcguggagggcuucaacugcuacuucccucugcagagcuacggcuuccagcccaccaacggcgugggcuaccagcccuaccgggugguggugcugagcuucgagcugcugcacgccccagccaccguguguggccccaagaagagcaccaaccuggugaagaacaagugcgugaacuucaacuucaacggccuuaccggcaccggcgugcugaccgagagcaacaagaaauuccugcccuuucagcaguucggccgggacaucgccgacaccaccgacgcugugcgggauccccagacccuggagauccuggacaucaccccuugcagcuucggcggcgugagcgugaucaccccaggcaccaacaccagcaaccagguggccgugcuguaccagggcgugaacugcaccgaggugcccguggccauccacgccgaccagcugacacccaccuggcgggucuacagcaccggcagcaacguguuccagacccgggccgguugccugaucggcgccgagcacgugaacaacagcuacgagugcgacauccccaucggcgccggcaucugugccagcuaccagacccagaccaauucaccccggagggcaaggagcguggccagccagagcaucaucgccuacaccaugagccugggcgccgagaacagcguggccuacagcaacaacagcaucgccauccccaccaacuucaccaucagcgugaccaccgagauucugcccgugagcaugaccaagaccagcguggacugcaccauguacaucugcggcgacagcaccgagugcagcaaccugcugcugcaguacggcagcuucugcacccagcugaaccgggcccugaccggcaucgccguggagcaggacaagaacacccaggagguguucgcccaggugaagcagaucuacaagaccccucccaucaaggacuucggcggcuucaacuucagccagauccugcccgaccccagcaagcccagcaagcggagcuucaucgaggaccugcuguucaacaaggugacccuagccgacgccggcuucaucaagcaguacggcgacugccucggcgacauagccgcccgggaccugaucugcgcccagaaguucaacggccugaccgugcugccuccccugcugaccgacgagaugaucgcccaguacaccagcgcccuguuagccggaaccaucaccagcggcuggacuuucggcgcuggagccgcucugcagauccccuucgccaugcagauggccuaccgguucaacggcaucggcgugacccagaacgugcuguacgagaaccagaagcugaucgccaaccaguucaacagcgccaucggcaagauccaggacagccugagcagcaccgcuagcgcccugggcaagcugcaggacguggugaaccagaacgcccaggcccugaacacccuggugaagcagcugagcagcaacuucggcgccaucagcagcgugcugaacgacauccugagccggcuggacaaggucgaggccgaggugcagaucgaccggcugaucacuggccggcugcagagccugcagaccuacgugacccagcagcugauccgggccgccgagauucgggccagcgccaaccuggccgccaccaagaugagcgagugcgugcugggccagagcaagcggguggacuucugcggcaagggcuaccaccugaugagcuuuccccagagcgcaccccacggagugguguuccugcacgugaccuacgugcccgcccaggagaagaacuucaccaccgccccagccaucugccacgacggcaaggcccacuuuccccgggagggcguguucgugagcaacggcacccacugguucgugacccagcggaacuucuacgagccccagaucaucaccaccgacaacaccuucgugagcggcaacugcgacguggugaucggcaucgugaacaacaccguguacgauccccugcagcccgagcuggacagcuucaaggaggagcuggacaaguacuucaagaaucacaccagccccgacguggaccugggcgacaucagcggcaucaacgccagcguggugaacauccagaaggagaucgaucggcugaacgagguggccaagaaccugaacgagagccugaucgaccugcaggagcugggcaaguacgagcaguacaucaaguggcccugguacaucuggcugggcuucaucgccggccugaucgccaucgugauggugaccaucaugcugugcugcaugaccagcugcugcagcugccugaagggcuguugcagcugcggcagcugcugcaaguucgacgaggacgacagcgagcccgugcugaagggcgugaagcugcacuacaccugaggacuaguguccaccugucccuccugggcugcuggauugucucguuuuccugccaaauaaacaggaucagcgcuuuacagaucuaaaaaaaaaaaaaaaaaaaaaaaaaaaaaaaaaaaaaaaaaaaaaaaaaaaaaaaaaaaaaaaaaaaaaaaaaaaaaaaaaaaaaaaaaaaaaaaaaaaa

SEQ ID NO: 25209 - RNA, 4105 nt, Artificial Sequence
  SARS-CoV-2/Wuhan/WIV05/2019__EPI_ISL_402128 spike protein mRNA gc (1-1273)(S477N_D614G)
aggagacccgugacccggaaguuguacggcuacgcgacuuucccucccacaaacccucgcgcccuuccuuuccuacuugggcccggcagaaagcuuaccauguucguguuccuggugcugcugccccuggugagcagccagugcgugaaccugaccacccggacccagcugccaccagccuacaccaacagcuucacccggggcgucuacuaccccgacaagguguuccggagcagcguccugcacagcacccaggaccuguuccugcccuucuucagcaacgugaccugguuccacgccauccacgugagcggcaccaacggcaccaagcgguucgacaaccccgugcugcccuucaacgacggcguguacuucgccagcaccgagaagagcaacaucauccggggcuggaucuucggcaccacccuggacagcaagacccagagccugcugaucgugaauaacgccaccaacguggugaucaaggugugcgaguuccaguucugcaacgaccccuuccugggcguguacuaccacaagaacaacaagagcuggauggagagcgaguuccggguguacagcagcgccaacaacugcaccuucgaguacgugagccagcccuuccugauggaccuggagggcaagcagggcaacuucaagaaccugcgggaguucguguucaagaacaucgacggcuacuucaagaucuacagcaagcacaccccaaucaaccuggugcgggaucugccccagggcuucucagcccuggagccccugguggaccugcccaucggcaucaacaucacccgguuccagacccugcuggcccugcaccggagcuaccugaccccaggcgacagcagcagcggguggacagcaggcgcggcugcuuacuacgugggcuaccugcagccccggaccuuccugcugaaguacaacgagaacggcaccaucaccgacgccguggacugcgcccuggacccucugagcgagaccaagugcacccugaagagcuucaccguggagaagggcaucuaccagaccagcaacuuccgggugcagcccaccgagagcaucgugcgguuccccaacaucaccaaccugugccccuucggcgagguguucaacgccacccgguucgccagcguguacgccuggaaccggaagcggaucagcaacugcguggccgacuacagcgugcuguacaacagcgccagcuucagcaccuucaagugcuacggcgugagccccaccaagcugaacgaccugugcuucaccaacguguacgccgacagcuucgugauccguggcgacgaggugcggcagaucgcacccggccagacaggcaagaucgccgacuacaacuacaagcugcccgacgacuucaccggcugcgugaucgccuggaacagcaacaaccucgacagcaaggugggcggcaacuacaacuaccuguaccggcuguuccggaagagcaaccugaagcccuucgagcgggacaucagcaccgagaucuaccaagccggcaacaccccuugcaacggcguggagggcuucaacugcuacuucccucugcagagcuacggcuuccagcccaccaacggcgugggcuaccagcccuaccgggugguggugcugagcuucgagcugcugcacgccccagccaccguguguggccccaagaagagcaccaaccuggugaagaacaagugcgugaacuucaacuucaacggccuuaccggcaccggcgugcugaccgagagcaacaagaaauuccugcccuuucagcaguucggccgggacaucgccgacaccaccgacgcugugcgggauccccagacccuggagauccuggacaucaccccuugcagcuucggcggcgugagcgugaucaccccaggcaccaacaccagcaaccagguggccgugcuguaccagggcgugaacugcaccgaggugcccguggccauccacgccgaccagcugacacccaccuggcgggucuacagcaccggcagcaacguguuccagacccgggccgguugccugaucggcgccgagcacgugaacaacagcuacgagugcgacauccccaucggcgccggcaucugugccagcuaccagacccagaccaauucaccccggagggcaaggagcguggccagccagagcaucaucgccuacaccaugagccugggcgccgagaacagcguggccuacagcaacaacagcaucgccauccccaccaacuucaccaucagcgugaccaccgagauucugcccgugagcaugaccaagaccagcguggacugcaccauguacaucugcggcgacagcaccgagugcagcaaccugcugcugcaguacggcagcuucugcacccagcugaaccgggcccugaccggcaucgccguggagcaggacaagaacacccaggagguguucgcccaggugaagcagaucuacaagaccccucccaucaaggacuucggcggcuucaacuucagccagauccugcccgaccccagcaagcccagcaagcggagcuucaucgaggaccugcuguucaacaaggugacccuagccgacgccggcuucaucaagcaguacggcgacugccucggcgacauagccgcccgggaccugaucugcgcccagaaguucaacggccugaccgugcugccuccccugcugaccgacgagaugaucgcccaguacaccagcgcccuguuagccggaaccaucaccagcggcuggacuuucggcgcuggagccgcucugcagauccccuucgccaugcagauggccuaccgguucaacggcaucggcgugacccagaacgugcuguacgagaaccagaagcugaucgccaaccaguucaacagcgccaucggcaagauccaggacagccugagcagcaccgcuagcgcccugggcaagcugcaggacguggugaaccagaacgcccaggcccugaacacccuggugaagcagcugagcagcaacuucggcgccaucagcagcgugcugaacgacauccugagccggcuggacaaggucgaggccgaggugcagaucgaccggcugaucacuggccggcugcagagccugcagaccuacgugacccagcagcugauccgggccgccgagauucgggccagcgccaaccuggccgccaccaagaugagcgagugcgugcugggccagagcaagcggguggacuucugcggcaagggcuaccaccugaugagcuuuccccagagcgcaccccacggagugguguuccugcacgugaccuacgugcccgcccaggagaagaacuucaccaccgccccagccaucugccacgacggcaaggcccacuuuccccgggagggcguguucgugagcaacggcacccacugguucgugacccagcggaacuucuacgagccccagaucaucaccaccgacaacaccuucgugagcggcaacugcgacguggugaucggcaucgugaacaacaccguguacgauccccugcagcccgagcuggacagcuucaaggaggagcuggacaaguacuucaagaaucacaccagccccgacguggaccugggcgacaucagcggcaucaacgccagcguggugaacauccagaaggagaucgaucggcugaacgagguggccaagaaccugaacgagagccugaucgaccugcaggagcugggcaaguacgagcaguacaucaaguggcccugguacaucuggcugggcuucaucgccggccugaucgccaucgugauggugaccaucaugcugugcugcaugaccagcugcugcagcugccugaagggcuguugcagcugcggcagcugcugcaaguucgacgaggacgacagcgagcccgugcugaagggcgugaagcugcacuacaccugaggacuaguguccaccugucccuccugggcugcuggauugucucguuuuccugccaaauaaacaggaucagcgcuuuacagaucuaaaaaaaaaaaaaaaaaaaaaaaaaaaaaaaaaaaaaaaaaaaaaaaaaaaaaaaaaaaaaaaaaaaaaaaaaaaaaaaaaaaaaaaaaaaaaaaaaaaa

SEQ ID NO: 25210 - RNA, 4105 nt, Artificial Sequence
  SARS-CoV-2/Wuhan/WIV05/2019__EPI_ISL_402128 spike protein mRNA gc (1-1273)(N501Y_D614G)
aggagacccgugacccggaaguuguacggcuacgcgacuuucccucccacaaacccucgcgcccuuccuuuccuacuugggcccggcagaaagcuuaccauguucguguuccuggugcugcugccccuggugagcagccagugcgugaaccugaccacccggacccagcugccaccagccuacaccaacagcuucacccggggcgucuacuaccccgacaagguguuccggagcagcguccugcacagcacccaggaccuguuccugcccuucuucagcaacgugaccugguuccacgccauccacgugagcggcaccaacggcaccaagcgguucgacaaccccgugcugcccuucaacgacggcguguacuucgccagcaccgagaagagcaacaucauccggggcuggaucuucggcaccacccuggacagcaagacccagagccugcugaucgugaauaacgccaccaacguggugaucaaggugugcgaguuccaguucugcaacgaccccuuccugggcguguacuaccacaagaacaacaagagcuggauggagagcgaguuccggguguacagcagcgccaacaacugcaccuucgaguacgugagccagcccuuccugauggaccuggagggcaagcagggcaacuucaagaaccugcgggaguucguguucaagaacaucgacggcuacuucaagaucuacagcaagcacaccccaaucaaccuggugcgggaucugccccagggcuucucagcccuggagccccugguggaccugcccaucggcaucaacaucacccgguuccagacccugcuggcccugcaccggagcuaccugaccccaggcgacagcagcagcggguggacagcaggcgcggcugcuuacuacgugggcuaccugcagccccggaccuuccugcugaaguacaacgagaacggcaccaucaccgacgccguggacugcgcccuggacccucugagcgagaccaagugcacccugaagagcuucaccguggagaagggcaucuaccagaccagcaacuuccgggugcagcccaccgagagcaucgugcgguuccccaacaucaccaaccugugccccuucggcgagguguucaacgccacccgguucgccagcguguacgccuggaaccggaagcggaucagcaacugcguggccgacuacagcgugcuguacaacagcgccagcuucagcaccuucaagugcuacggcgugagccccaccaagcugaacgaccugugcuucaccaacguguacgccgacagcuucgugauccguggcgacgaggugcggcagaucgcacccggccagacaggcaagaucgccgacuacaacuacaagcugcccgacgacuucaccggcugcgugaucgccuggaacagcaacaaccucgacagcaaggugggcggcaacuacaacuaccuguaccggcuguuccggaagagcaaccugaagcccuucgagcgggacaucagcaccgagaucuaccaagccggcuccaccccuugcaacggcguggagggcuucaacugcuacuucccucugcagagcuacggcuuccagcccaccuacggcgugggcuaccagcccuaccgggugguggugcugagcuucgagcugcugcacgccccagccaccguguguggccccaagaagagcaccaaccuggugaagaacaagugcgugaacuucaacuucaacggccuuaccggcaccggcgugcugaccgagagcaacaagaaauuccugcccuuucagcaguucggccgggacaucgccgacaccaccgacgcugugcgggauccccagacccuggagauccuggacaucaccccuugcagcuucggcggcgugagcgugaucaccccaggcaccaacaccagcaaccagguggccgugcuguaccagggcgugaacugcaccgaggugcccguggccauccacgccgaccagcugacacccaccuggcgggucuacagcaccggcagcaacguguuccagacccgggccgguugccugaucggcgccgagcacgugaacaacagcuacgagugcgacauccccaucggcgccggcaucugugccagcuaccagacccagaccaauucaccccggagggcaaggagcguggccagccagagcaucaucgccuacaccaugagccugggcgccgagaacagcguggccuacagcaacaacagcaucgccauccccaccaacuucaccaucagcgugaccaccgagauucugcccgugagcaugaccaagaccagcguggacugcaccauguacaucugcggcgacagcaccgagugcagcaaccugcugcugcaguacggcagcuucugcacccagcugaaccgggcccugaccggcaucgccguggagcaggacaagaacacccaggagguguucgcccaggugaagcagaucuacaagaccccucccaucaaggacuucggcggcuucaacuucagccagauccugcccgaccccagcaagcccagcaagcggagcuucaucgaggaccugcuguucaacaaggugacccuagccgacgccggcuucaucaagcaguacggcgacugccucggcgacauagccgcccgggaccugaucugcgcccagaaguucaacggccugaccgugcugccuccccugcugaccgacgagaugaucgcccaguacaccagcgcccuguuagccggaaccaucaccagcggcuggacuuucggcgcuggagccgcucugcagauccccuucgccaugcagauggccuaccgguucaacggcaucggcgugacccagaacgugcuguacgagaaccagaagcugaucgccaaccaguucaacagcgccaucggcaagauccaggacagccugagcagcaccgcuagcgcccugggcaagcugcaggacguggugaaccagaacgcccaggcccugaacacccuggugaagcagcugagcagcaacuucggcgccaucagcagcgugcugaacgacauccugagccggcuggacaaggucgaggccgaggugcagaucgaccggcugaucacuggccggcugcagagccugcagaccuacgugacccagcagcugauccgggccgccgagauucgggccagcgccaaccuggccgccaccaagaugagcgagugcgugcugggccagagcaagcggguggacuucugcggcaagggcuaccaccugaugagcuuuccccagagcgcaccccacggagugguguuccugcacgugaccuacgugcccgcccaggagaagaacuucaccaccgccccagccaucugccacgacggcaaggcccacuuuccccgggagggcguguucgugagcaacggcacccacugguucgugacccagcggaacuucuacgagccccagaucaucaccaccgacaacaccuucgugagcggcaacugcgacguggugaucggcaucgugaacaacaccguguacgauccccugcagcccgagcuggacagcuucaaggaggagcuggacaaguacuucaagaaucacaccagccccgacguggaccugggcgacaucagcggcaucaacgccagcguggugaacauccagaaggagaucgaucggcugaacgagguggccaagaaccugaacgagagccugaucgaccugcaggagcugggcaaguacgagcaguacaucaaguggcccugguacaucuggcugggcuucaucgccggccugaucgccaucgugauggugaccaucaugcugugcugcaugaccagcugcugcagcugccugaagggcuguugcagcugcggcagcugcugcaaguucgacgaggacgacagcgagcccgugcugaagggcgugaagcugcacuacaccugaggacuaguguccaccugucccuccugggcugcuggauugucucguuuuccugccaaauaaacaggaucagcgcuuuacagaucuaaaaaaaaaaaaaaaaaaaaaaaaaaaaaaaaaaaaaaaaaaaaaaaaaaaaaaaaaaaaaaaaaaaaaaaaaaaaaaaaaaaaaaaaaaaaaaaaaaaa

SEQ ID NO: 25211 - RNA, 4099 nt, Artificial Sequence
  SARS-CoV-2/Wuhan/WIV05/2019__EPI_ISL_402128 spike protein mRNA gc (1-1273)(H69del_V70del_D614G)
aggagacccgugacccggaaguuguacggcuacgcgacuuucccucccacaaacccucgcgcccuuccuuuccuacuugggcccggcagaaagcuuaccauguucguguuccuggugcugcugccccuggugagcagccagugcgugaaccugaccacccggacccagcugccaccagccuacaccaacagcuucacccggggcgucuacuaccccgacaagguguuccggagcagcguccugcacagcacccaggaccuguuccugcccuucuucagcaacgugaccugguuccacgccaucagcggcaccaacggcaccaagcgguucgacaaccccgugcugcccuucaacgacggcguguacuucgccagcaccgagaagagcaacaucauccggggcuggaucuucggcaccacccuggacagcaagacccagagccugcugaucgugaauaacgccaccaacguggugaucaaggugugcgaguuccaguucugcaacgaccccuuccugggcguguacuaccacaagaacaacaagagcuggauggagagcgaguuccggguguacagcagcgccaacaacugcaccuucgaguacgugagccagcccuuccugauggaccuggagggcaagcagggcaacuucaagaaccugcgggaguucguguucaagaacaucgacggcuacuucaagaucuacagcaagcacaccccaaucaaccuggugcgggaucugccccagggcuucucagcccuggagccccugguggaccugcccaucggcaucaacaucacccgguuccagacccugcuggcccugcaccggagcuaccugaccccaggcgacagcagcagcggguggacagcaggcgcggcugcuuacuacgugggcuaccugcagccccggaccuuccugcugaaguacaacgagaacggcaccaucaccgacgccguggacugcgcccuggacccucugagcgagaccaagugcacccugaagagcuucaccguggagaagggcaucuaccagaccagcaacuuccgggugcagcccaccgagagcaucgugcgguuccccaacaucaccaaccugugccccuucggcgagguguucaacgccacccgguucgccagcguguacgccuggaaccggaagcggaucagcaacugcguggccgacuacagcgugcuguacaacagcgccagcuucagcaccuucaagugcuacggcgugagccccaccaagcugaacgaccugugcuucaccaacguguacgccgacagcuucgugauccguggcgacgaggugcggcagaucgcacccggccagacaggcaagaucgccgacuacaacuacaagcugcccgacgacuucaccggcugcgugaucgccuggaacagcaacaaccucgacagcaaggugggcggcaacuacaacuaccuguaccggcuguuccggaagagcaaccugaagcccuucgagcgggacaucagcaccgagaucuaccaagccggcuccaccccuugcaacggcguggagggcuucaacugcuacuucccucugcagagcuacggcuuccagcccaccaacggcgugggcuaccagcccuaccgggugguggugcugagcuucgagcugcugcacgccccagccaccguguguggccccaagaagagcaccaaccuggugaagaacaagugcgugaacuucaacuucaacggccuuaccggcaccggcgugcugaccgagagcaacaagaaauuccugcccuuucagcaguucggccgggacaucgccgacaccaccgacgcugugcgggauccccagacccuggagauccuggacaucaccccuugcagcuucggcggcgugagcgugaucaccccaggcaccaacaccagcaaccagguggccgugcuguaccagggcgugaacugcaccgaggugcccguggccauccacgccgaccagcugacacccaccuggcgggucuacagcaccggcagcaacguguuccagacccgggccgguugccugaucggcgccgagcacgugaacaacagcuacgagugcgacauccccaucggcgccggcaucugugccagcuaccagacccagaccaauucaccccggagggcaaggagcguggccagccagagcaucaucgccuacaccaugagccugggcgccgagaacagcguggccuacagcaacaacagcaucgccauccccaccaacuucaccaucagcgugaccaccgagauucugcccgugagcaugaccaagaccagcguggacugcaccauguacaucugcggcgacagcaccgagugcagcaaccugcugcugcaguacggcagcuucugcacccagcugaaccgggcccugaccggcaucgccguggagcaggacaagaacacccaggagguguucgcccaggugaagcagaucuacaagaccccucccaucaaggacuucggcggcuucaacuucagccagauccugcccgaccccagcaagcccagcaagcggagcuucaucgaggaccugcuguucaacaaggugacccuagccgacgccggcuucaucaagcaguacggcgacugccucggcgacauagccgcccgggaccugaucugcgcccagaaguucaacggccugaccgugcugccuccccugcugaccgacgagaugaucgcccaguacaccagcgcccuguuagccggaaccaucaccagcggcuggacuuucggcgcuggagccgcucugcagauccccuucgccaugcagauggccuaccgguucaacggcaucggcgugacccagaacgugcuguacgagaaccagaagcugaucgccaaccaguucaacagcgccaucggcaagauccaggacagccugagcagcaccgcuagcgcccugggcaagcugcaggacguggugaaccagaacgcccaggcccugaacacccuggugaagcagcugagcagcaacuucggcgccaucagcagcgugcugaacgacauccugagccggcuggacaaggucgaggccgaggugcagaucgaccggcugaucacuggccggcugcagagccugcagaccuacgugacccagcagcugauccgggccgccgagauucgggccagcgccaaccuggccgccaccaagaugagcgagugcgugcugggccagagcaagcggguggacuucugcggcaagggcuaccaccugaugagcuuuccccagagcgcaccccacggagugguguuccugcacgugaccuacgugcccgcccaggagaagaacuucaccaccgccccagccaucugccacgacggcaaggcccacuuuccccgggagggcguguucgugagcaacggcacccacugguucgugacccagcggaacuucuacgagccccagaucaucaccaccgacaacaccuucgugagcggcaacugcgacguggugaucggcaucgugaacaacaccguguacgauccccugcagcccgagcuggacagcuucaaggaggagcuggacaaguacuucaagaaucacaccagccccgacguggaccugggcgacaucagcggcaucaacgccagcguggugaacauccagaaggagaucgaucggcugaacgagguggccaagaaccugaacgagagccugaucgaccugcaggagcugggcaaguacgagcaguacaucaaguggcccugguacaucuggcugggcuucaucgccggccugaucgccaucgugauggugaccaucaugcugugcugcaugaccagcugcugcagcugccugaagggcuguugcagcugcggcagcugcugcaaguucgacgaggacgacagcgagcccgugcugaagggcgugaagcugcacuacaccugaggacuaguguccaccugucccuccugggcugcuggauugucucguuuuccugccaaauaaacaggaucagcgcuuuacagaucuaaaaaaaaaaaaaaaaaaaaaaaaaaaaaaaaaaaaaaaaaaaaaaaaaaaaaaaaaaaaaaaaaaaaaaaaaaaaaaaaaaaaaaaaaaaaaaaaaaaa

SEQ ID NO: 25212 - RNA, 4105 nt, Artificial Sequence
  SARS-CoV-2/Wuhan/WIV05/2019__EPI_ISL_402128 spike protein mRNA gc (1-1273)(Y453F_D614G)
aggagacccgugacccggaaguuguacggcuacgcgacuuucccucccacaaacccucgcgcccuuccuuuccuacuugggcccggcagaaagcuuaccauguucguguuccuggugcugcugccccuggugagcagccagugcgugaaccugaccacccggacccagcugccaccagccuacaccaacagcuucacccggggcgucuacuaccccgacaagguguuccggagcagcguccugcacagcacccaggaccuguuccugcccuucuucagcaacgugaccugguuccacgccauccacgugagcggcaccaacggcaccaagcgguucgacaaccccgugcugcccuucaacgacggcguguacuucgccagcaccgagaagagcaacaucauccggggcuggaucuucggcaccacccuggacagcaagacccagagccugcugaucgugaauaacgccaccaacguggugaucaaggugugcgaguuccaguucugcaacgaccccuuccugggcguguacuaccacaagaacaacaagagcuggauggagagcgaguuccggguguacagcagcgccaacaacugcaccuucgaguacgugagccagcccuuccugauggaccuggagggcaagcagggcaacuucaagaaccugcgggaguucguguucaagaacaucgacggcuacuucaagaucuacagcaagcacaccccaaucaaccuggugcgggaucugccccagggcuucucagcccuggagccccugguggaccugcccaucggcaucaacaucacccgguuccagacccugcuggcccugcaccggagcuaccugaccccaggcgacagcagcagcggguggacagcaggcgcggcugcuuacuacgugggcuaccugcagccccggaccuuccugcugaaguacaacgagaacggcaccaucaccgacgccguggacugcgcccuggacccucugagcgagaccaagugcacccugaagagcuucaccguggagaagggcaucuaccagaccagcaacuuccgggugcagcccaccgagagcaucgugcgguuccccaacaucaccaaccugugccccuucggcgagguguucaacgccacccgguucgccagcguguacgccuggaaccggaagcggaucagcaacugcguggccgacuacagcgugcuguacaacagcgccagcuucagcaccuucaagugcuacggcgugagccccaccaagcugaacgaccugugcuucaccaacguguacgccgacagcuucgugauccguggcgacgaggugcggcagaucgcacccggccagacaggcaagaucgccgacuacaacuacaagcugcccgacgacuucaccggcugcgugaucgccuggaacagcaacaaccucgacagcaaggugggcggcaacuacaacuaccuguuccggcuguuccggaagagcaaccugaagcccuucgagcgggacaucagcaccgagaucuaccaagccggcuccaccccuugcaacggcguggagggcuucaacugcuacuucccucugcagagcuacggcuuccagcccaccaacggcgugggcuaccagcccuaccgggugguggugcugagcuucgagcugcugcacgccccagccaccguguguggccccaagaagagcaccaaccuggugaagaacaagugcgugaacuucaacuucaacggccuuaccggcaccggcgugcugaccgagagcaacaagaaauuccugcccuuucagcaguucggccgggacaucgccgacaccaccgacgcugugcgggauccccagacccuggagauccuggacaucaccccuugcagcuucggcggcgugagcgugaucaccccaggcaccaacaccagcaaccagguggccgugcuguaccagggcgugaacugcaccgaggugcccguggccauccacgccgaccagcugacacccaccuggcgggucuacagcaccggcagcaacguguuccagacccgggccgguugccugaucggcgccgagcacgugaacaacagcuacgagugcgacauccccaucggcgccggcaucugugccagcuaccagacccagaccaauucaccccggagggcaaggagcguggccagccagagcaucaucgccuacaccaugagccugggcgccgagaacagcguggccuacagcaacaacagcaucgccauccccaccaacuucaccaucagcgugaccaccgagauucugcccgugagcaugaccaagaccagcguggacugcaccauguacaucugcggcgacagcaccgagugcagcaaccugcugcugcaguacggcagcuucugcacccagcugaaccgggcccugaccggcaucgccguggagcaggacaagaacacccaggagguguucgcccaggugaagcagaucuacaagaccccucccaucaaggacuucggcggcuucaacuucagccagauccugcccgaccccagcaagcccagcaagcggagcuucaucgaggaccugcuguucaacaaggugacccuagccgacgccggcuucaucaagcaguacggcgacugccucggcgacauagccgcccgggaccugaucugcgcccagaaguucaacggccugaccgugcugccuccccugcugaccgacgagaugaucgcccaguacaccagcgcccuguuagccggaaccaucaccagcggcuggacuuucggcgcuggagccgcucugcagauccccuucgccaugcagauggccuaccgguucaacggcaucggcgugacccagaacgugcuguacgagaaccagaagcugaucgccaaccaguucaacagcgccaucggcaagauccaggacagccugagcagcaccgcuagcgcccugggcaagcugcaggacguggugaaccagaacgcccaggcccugaacacccuggugaagcagcugagcagcaacuucggcgccaucagcagcgugcugaacgacauccugagccggcuggacaaggucgaggccgaggugcagaucgaccggcugaucacuggccggcugcagagccugcagaccuacgugacccagcagcugauccgggccgccgagauucgggccagcgccaaccuggccgccaccaagaugagcgagugcgugcugggccagagcaagcggguggacuucugcggcaagggcuaccaccugaugagcuuuccccagagcgcaccccacggagugguguuccugcacgugaccuacgugcccgcccaggagaagaacuucaccaccgccccagccaucugccacgacggcaaggcccacuuuccccgggagggcguguucgugagcaacggcacccacugguucgugacccagcggaacuucuacgagccccagaucaucaccaccgacaacaccuucgugagcggcaacugcgacguggugaucggcaucgugaacaacaccguguacgauccccugcagcccgagcuggacagcuucaaggaggagcuggacaaguacuucaagaaucacaccagccccgacguggaccugggcgacaucagcggcaucaacgccagcguggugaacauccagaaggagaucgaucggcugaacgagguggccaagaaccugaacgagagccugaucgaccugcaggagcugggcaaguacgagcaguacaucaaguggcccugguacaucuggcugggcuucaucgccggccugaucgccaucgugauggugaccaucaugcugugcugcaugaccagcugcugcagcugccugaagggcuguugcagcugcggcagcugcugcaaguucgacgaggacgacagcgagcccgugcugaagggcgugaagcugcacuacaccugaggacuaguguccaccugucccuccugggcugcuggauugucucguuuuccugccaaauaaacaggaucagcgcuuuacagaucuaaaaaaaaaaaaaaaaaaaaaaaaaaaaaaaaaaaaaaaaaaaaaaaaaaaaaaaaaaaaaaaaaaaaaaaaaaaaaaaaaaaaaaaaaaaaaaaaaaaa

SEQ ID NO: 25213 - RNA, 4105 nt, Artificial Sequence
  SARS-CoV-2/Wuhan/WIV05/2019__EPI_ISL_402128 spike protein mRNA gc (1-1273)(D614G_I692V)
aggagacccgugacccggaaguuguacggcuacgcgacuuucccucccacaaacccucgcgcccuuccuuuccuacuugggcccggcagaaagcuuaccauguucguguuccuggugcugcugccccuggugagcagccagugcgugaaccugaccacccggacccagcugccaccagccuacaccaacagcuucacccggggcgucuacuaccccgacaagguguuccggagcagcguccugcacagcacccaggaccuguuccugcccuucuucagcaacgugaccugguuccacgccauccacgugagcggcaccaacggcaccaagcgguucgacaaccccgugcugcccuucaacgacggcguguacuucgccagcaccgagaagagcaacaucauccggggcuggaucuucggcaccacccuggacagcaagacccagagccugcugaucgugaauaacgccaccaacguggugaucaaggugugcgaguuccaguucugcaacgaccccuuccugggcguguacuaccacaagaacaacaagagcuggauggagagcgaguuccggguguacagcagcgccaacaacugcaccuucgaguacgugagccagcccuuccugauggaccuggagggcaagcagggcaacuucaagaaccugcgggaguucguguucaagaacaucgacggcuacuucaagaucuacagcaagcacaccccaaucaaccuggugcgggaucugccccagggcuucucagcccuggagccccugguggaccugcccaucggcaucaacaucacccgguuccagacccugcuggcccugcaccggagcuaccugaccccaggcgacagcagcagcggguggacagcaggcgcggcugcuuacuacgugggcuaccugcagccccggaccuuccugcugaaguacaacgagaacggcaccaucaccgacgccguggacugcgcccuggacccucugagcgagaccaagugcacccugaagagcuucaccguggagaagggcaucuaccagaccagcaacuuccgggugcagcccaccgagagcaucgugcgguuccccaacaucaccaaccugugccccuucggcgagguguucaacgccacccgguucgccagcguguacgccuggaaccggaagcggaucagcaacugcguggccgacuacagcgugcuguacaacagcgccagcuucagcaccuucaagugcuacggcgugagccccaccaagcugaacgaccugugcuucaccaacguguacgccgacagcuucgugauccguggcgacgaggugcggcagaucgcacccggccagacaggcaagaucgccgacuacaacuacaagcugcccgacgacuucaccggcugcgugaucgccuggaacagcaacaaccucgacagcaaggugggcggcaacuacaacuaccuguaccggcuguuccggaagagcaaccugaagcccuucgagcgggacaucagcaccgagaucuaccaagccggcuccaccccuugcaacggcguggagggcuucaacugcuacuucccucugcagagcuacggcuuccagcccaccaacggcgugggcuaccagcccuaccgggugguggugcugagcuucgagcugcugcacgccccagccaccguguguggccccaagaagagcaccaaccuggugaagaacaagugcgugaacuucaacuucaacggccuuaccggcaccggcgugcugaccgagagcaacaagaaauuccugcccuuucagcaguucggccgggacaucgccgacaccaccgacgcugugcgggauccccagacccuggagauccuggacaucaccccuugcagcuucggcggcgugagcgugaucaccccaggcaccaacaccagcaaccagguggccgugcuguaccagggcgugaacugcaccgaggugcccguggccauccacgccgaccagcugacacccaccuggcgggucuacagcaccggcagcaacguguuccagacccgggccgguugccugaucggcgccgagcacgugaacaacagcuacgagugcgacauccccaucggcgccggcaucugugccagcuaccagacccagaccaauucaccccggagggcaaggagcguggccagccagagcgugaucgccuacaccaugagccugggcgccgagaacagcguggccuacagcaacaacagcaucgccauccccaccaacuucaccaucagcgugaccaccgagauucugcccgugagcaugaccaagaccagcguggacugcaccauguacaucugcggcgacagcaccgagugcagcaaccugcugcugcaguacggcagcuucugcacccagcugaaccgggcccugaccggcaucgccguggagcaggacaagaacacccaggagguguucgcccaggugaagcagaucuacaagaccccucccaucaaggacuucggcggcuucaacuucagccagauccugcccgaccccagcaagcccagcaagcggagcuucaucgaggaccugcuguucaacaaggugacccuagccgacgccggcuucaucaagcaguacggcgacugccucggcgacauagccgcccgggaccugaucugcgcccagaaguucaacggccugaccgugcugccuccccugcugaccgacgagaugaucgcccaguacaccagcgcccuguuagccggaaccaucaccagcggcuggacuuucggcgcuggagccgcucugcagauccccuucgccaugcagauggccuaccgguucaacggcaucggcgugacccagaacgugcuguacgagaaccagaagcugaucgccaaccaguucaacagcgccaucggcaagauccaggacagccugagcagcaccgcuagcgcccugggcaagcugcaggacguggugaaccagaacgcccaggcccugaacacccuggugaagcagcugagcagcaacuucggcgccaucagcagcgugcugaacgacauccugagccggcuggacaaggucgaggccgaggugcagaucgaccggcugaucacuggccggcugcagagccugcagaccuacgugacccagcagcugauccgggccgccgagauucgggccagcgccaaccuggccgccaccaagaugagcgagugcgugcugggccagagcaagcggguggacuucugcggcaagggcuaccaccugaugagcuuuccccagagcgcaccccacggagugguguuccugcacgugaccuacgugcccgcccaggagaagaacuucaccaccgccccagccaucugccacgacggcaaggcccacuuuccccgggagggcguguucgugagcaacggcacccacugguucgugacccagcggaacuucuacgagccccagaucaucaccaccgacaacaccuucgugagcggcaacugcgacguggugaucggcaucgugaacaacaccguguacgauccccugcagcccgagcuggacagcuucaaggaggagcuggacaaguacuucaagaaucacaccagccccgacguggaccugggcgacaucagcggcaucaacgccagcguggugaacauccagaaggagaucgaucggcugaacgagguggccaagaaccugaacgagagccugaucgaccugcaggagcugggcaaguacgagcaguacaucaaguggcccugguacaucuggcugggcuucaucgccggccugaucgccaucgugauggugaccaucaugcugugcugcaugaccagcugcugcagcugccugaagggcuguugcagcugcggcagcugcugcaaguucgacgaggacgacagcgagcccgugcugaagggcgugaagcugcacuacaccugaggacuaguguccaccugucccuccugggcugcuggauugucucguuuuccugccaaauaaacaggaucagcgcuuuacagaucuaaaaaaaaaaaaaaaaaaaaaaaaaaaaaaaaaaaaaaaaaaaaaaaaaaaaaaaaaaaaaaaaaaaaaaaaaaaaaaaaaaaaaaaaaaaaaaaaaaaa

SEQ ID NO: 25214 - RNA, 4105 nt, Artificial Sequence
  SARS-CoV-2/Wuhan/WIV05/2019__EPI_ISL_402128 spike protein mRNA gc (1-1273)(D614G_M1229I)
aggagacccgugacccggaaguuguacggcuacgcgacuuucccucccacaaacccucgcgcccuuccuuuccuacuugggcccggcagaaagcuuaccauguucguguuccuggugcugcugccccuggugagcagccagugcgugaaccugaccacccggacccagcugccaccagccuacaccaacagcuucacccggggcgucuacuaccccgacaagguguuccggagcagcguccugcacagcacccaggaccuguuccugcccuucuucagcaacgugaccugguuccacgccauccacgugagcggcaccaacggcaccaagcgguucgacaaccccgugcugcccuucaacgacggcguguacuucgccagcaccgagaagagcaacaucauccggggcuggaucuucggcaccacccuggacagcaagacccagagccugcugaucgugaauaacgccaccaacguggugaucaaggugugcgaguuccaguucugcaacgaccccuuccugggcguguacuaccacaagaacaacaagagcuggauggagagcgaguuccggguguacagcagcgccaacaacugcaccuucgaguacgugagccagcccuuccugauggaccuggagggcaagcagggcaacuucaagaaccugcgggaguucguguucaagaacaucgacggcuacuucaagaucuacagcaagcacaccccaaucaaccuggugcgggaucugccccagggcuucucagcccuggagccccugguggaccugcccaucggcaucaacaucacccgguuccagacccugcuggcccugcaccggagcuaccugaccccaggcgacagcagcagcggguggacagcaggcgcggcugcuuacuacgugggcuaccugcagccccggaccuuccugcugaaguacaacgagaacggcaccaucaccgacgccguggacugcgcccuggacccucugagcgagaccaagugcacccugaagagcuucaccguggagaagggcaucuaccagaccagcaacuuccgggugcagcccaccgagagcaucgugcgguuccccaacaucaccaaccugugccccuucggcgagguguucaacgccacccgguucgccagcguguacgccuggaaccggaagcggaucagcaacugcguggccgacuacagcgugcuguacaacagcgccagcuucagcaccuucaagugcuacggcgugagccccaccaagcugaacgaccugugcuucaccaacguguacgccgacagcuucgugauccguggcgacgaggugcggcagaucgcacccggccagacaggcaagaucgccgacuacaacuacaagcugcccgacgacuucaccggcugcgugaucgccuggaacagcaacaaccucgacagcaaggugggcggcaacuacaacuaccuguaccggcuguuccggaagagcaaccugaagcccuucgagcgggacaucagcaccgagaucuaccaagccggcuccaccccuugcaacggcguggagggcuucaacugcuacuucccucugcagagcuacggcuuccagcccaccaacggcgugggcuaccagcccuaccgggugguggugcugagcuucgagcugcugcacgccccagccaccguguguggccccaagaagagcaccaaccuggugaagaacaagugcgugaacuucaacuucaacggccuuaccggcaccggcgugcugaccgagagcaacaagaaauuccugcccuuucagcaguucggccgggacaucgccgacaccaccgacgcugugcgggauccccagacccuggagauccuggacaucaccccuugcagcuucggcggcgugagcgugaucaccccaggcaccaacaccagcaaccagguggccgugcuguaccagggcgugaacugcaccgaggugcccguggccauccacgccgaccagcugacacccaccuggcgggucuacagcaccggcagcaacguguuccagacccgggccgguugccugaucggcgccgagcacgugaacaacagcuacgagugcgacauccccaucggcgccggcaucugugccagcuaccagacccagaccaauucaccccggagggcaaggagcguggccagccagagcaucaucgccuacaccaugagccugggcgccgagaacagcguggccuacagcaacaacagcaucgccauccccaccaacuucaccaucagcgugaccaccgagauucugcccgugagcaugaccaagaccagcguggacugcaccauguacaucugcggcgacagcaccgagugcagcaaccugcugcugcaguacggcagcuucugcacccagcugaaccgggcccugaccggcaucgccguggagcaggacaagaacacccaggagguguucgcccaggugaagcagaucuacaagaccccucccaucaaggacuucggcggcuucaacuucagccagauccugcccgaccccagcaagcccagcaagcggagcuucaucgaggaccugcuguucaacaaggugacccuagccgacgccggcuucaucaagcaguacggcgacugccucggcgacauagccgcccgggaccugaucugcgcccagaaguucaacggccugaccgugcugccuccccugcugaccgacgagaugaucgcccaguacaccagcgcccuguuagccggaaccaucaccagcggcuggacuuucggcgcuggagccgcucugcagauccccuucgccaugcagauggccuaccgguucaacggcaucggcgugacccagaacgugcuguacgagaaccagaagcugaucgccaaccaguucaacagcgccaucggcaagauccaggacagccugagcagcaccgcuagcgcccugggcaagcugcaggacguggugaaccagaacgcccaggcccugaacacccuggugaagcagcugagcagcaacuucggcgccaucagcagcgugcugaacgacauccugagccggcuggacaaggucgaggccgaggugcagaucgaccggcugaucacuggccggcugcagagccugcagaccuacgugacccagcagcugauccgggccgccgagauucgggccagcgccaaccuggccgccaccaagaugagcgagugcgugcugggccagagcaagcggguggacuucugcggcaagggcuaccaccugaugagcuuuccccagagcgcaccccacggagugguguuccugcacgugaccuacgugcccgcccaggagaagaacuucaccaccgccccagccaucugccacgacggcaaggcccacuuuccccgggagggcguguucgugagcaacggcacccacugguucgugacccagcggaacuucuacgagccccagaucaucaccaccgacaacaccuucgugagcggcaacugcgacguggugaucggcaucgugaacaacaccguguacgauccccugcagcccgagcuggacagcuucaaggaggagcuggacaaguacuucaagaaucacaccagccccgacguggaccugggcgacaucagcggcaucaacgccagcguggugaacauccagaaggagaucgaucggcugaacgagguggccaagaaccugaacgagagccugaucgaccugcaggagcugggcaaguacgagcaguacaucaaguggcccugguacaucuggcugggcuucaucgccggccugaucgccaucgugaucgugaccaucaugcugugcugcaugaccagcugcugcagcugccugaagggcuguugcagcugcggcagcugcugcaaguucgacgaggacgacagcgagcccgugcugaagggcgugaagcugcacuacaccugaggacuaguguccaccugucccuccugggcugcuggauugucucguuuuccugccaaauaaacaggaucagcgcuuuacagaucuaaaaaaaaaaaaaaaaaaaaaaaaaaaaaaaaaaaaaaaaaaaaaaaaaaaaaaaaaaaaaaaaaaaaaaaaaaaaaaaaaaaaaaaaaaaaaaaaaaaa

SEQ ID NO: 25215 - RNA, 4099 nt, Artificial Sequence
  SARS-CoV-2/Wuhan/WIV05/2019__EPI_ISL_402128 spike protein mRNA gc (1-1273)(H69del_V70del_A222V_Y453F_S477N_D614G_I692V)
aggagacccgugacccggaaguuguacggcuacgcgacuuucccucccacaaacccucgcgcccuuccuuuccuacuugggcccggcagaaagcuuaccauguucguguuccuggugcugcugccccuggugagcagccagugcgugaaccugaccacccggacccagcugccaccagccuacaccaacagcuucacccggggcgucuacuaccccgacaagguguuccggagcagcguccugcacagcacccaggaccuguuccugcccuucuucagcaacgugaccugguuccacgccaucagcggcaccaacggcaccaagcgguucgacaaccccgugcugcccuucaacgacggcguguacuucgccagcaccgagaagagcaacaucauccggggcuggaucuucggcaccacccuggacagcaagacccagagccugcugaucgugaauaacgccaccaacguggugaucaaggugugcgaguuccaguucugcaacgaccccuuccugggcguguacuaccacaagaacaacaagagcuggauggagagcgaguuccggguguacagcagcgccaacaacugcaccuucgaguacgugagccagcccuuccugauggaccuggagggcaagcagggcaacuucaagaaccugcgggaguucguguucaagaacaucgacggcuacuucaagaucuacagcaagcacaccccaaucaaccuggugcgggaucugccccagggcuucucagugcuggagccccugguggaccugcccaucggcaucaacaucacccgguuccagacccugcuggcccugcaccggagcuaccugaccccaggcgacagcagcagcggguggacagcaggcgcggcugcuuacuacgugggcuaccugcagccccggaccuuccugcugaaguacaacgagaacggcaccaucaccgacgccguggacugcgcccuggacccucugagcgagaccaagugcacccugaagagcuucaccguggagaagggcaucuaccagaccagcaacuuccgggugcagcccaccgagagcaucgugcgguuccccaacaucaccaaccugugccccuucggcgagguguucaacgccacccgguucgccagcguguacgccuggaaccggaagcggaucagcaacugcguggccgacuacagcgugcuguacaacagcgccagcuucagcaccuucaagugcuacggcgugagccccaccaagcugaacgaccugugcuucaccaacguguacgccgacagcuucgugauccguggcgacgaggugcggcagaucgcacccggccagacaggcaagaucgccgacuacaacuacaagcugcccgacgacuucaccggcugcgugaucgccuggaacagcaacaaccucgacagcaaggugggcggcaacuacaacuaccuguuccggcuguuccggaagagcaaccugaagcccuucgagcgggacaucagcaccgagaucuaccaagccggcaacaccccuugcaacggcguggagggcuucaacugcuacuucccucugcagagcuacggcuuccagcccaccaacggcgugggcuaccagcccuaccgggugguggugcugagcuucgagcugcugcacgccccagccaccguguguggccccaagaagagcaccaaccuggugaagaacaagugcgugaacuucaacuucaacggccuuaccggcaccggcgugcugaccgagagcaacaagaaauuccugcccuuucagcaguucggccgggacaucgccgacaccaccgacgcugugcgggauccccagacccuggagauccuggacaucaccccuugcagcuucggcggcgugagcgugaucaccccaggcaccaacaccagcaaccagguggccgugcuguaccagggcgugaacugcaccgaggugcccguggccauccacgccgaccagcugacacccaccuggcgggucuacagcaccggcagcaacguguuccagacccgggccgguugccugaucggcgccgagcacgugaacaacagcuacgagugcgacauccccaucggcgccggcaucugugccagcuaccagacccagaccaauucaccccggagggcaaggagcguggccagccagagcgugaucgccuacaccaugagccugggcgccgagaacagcguggccuacagcaacaacagcaucgccauccccaccaacuucaccaucagcgugaccaccgagauucugcccgugagcaugaccaagaccagcguggacugcaccauguacaucugcggcgacagcaccgagugcagcaaccugcugcugcaguacggcagcuucugcacccagcugaaccgggcccugaccggcaucgccguggagcaggacaagaacacccaggagguguucgcccaggugaagcagaucuacaagaccccucccaucaaggacuucggcggcuucaacuucagccagauccugcccgaccccagcaagcccagcaagcggagcuucaucgaggaccugcuguucaacaaggugacccuagccgacgccggcuucaucaagcaguacggcgacugccucggcgacauagccgcccgggaccugaucugcgcccagaaguucaacggccugaccgugcugccuccccugcugaccgacgagaugaucgcccaguacaccagcgcccuguuagccggaaccaucaccagcggcuggacuuucggcgcuggagccgcucugcagauccccuucgccaugcagauggccuaccgguucaacggcaucggcgugacccagaacgugcuguacgagaaccagaagcugaucgccaaccaguucaacagcgccaucggcaagauccaggacagccugagcagcaccgcuagcgcccugggcaagcugcaggacguggugaaccagaacgcccaggcccugaacacccuggugaagcagcugagcagcaacuucggcgccaucagcagcgugcugaacgacauccugagccggcuggacaaggucgaggccgaggugcagaucgaccggcugaucacuggccggcugcagagccugcagaccuacgugacccagcagcugauccgggccgccgagauucgggccagcgccaaccuggccgccaccaagaugagcgagugcgugcugggccagagcaagcggguggacuucugcggcaagggcuaccaccugaugagcuuuccccagagcgcaccccacggagugguguuccugcacgugaccuacgugcccgcccaggagaagaacuucaccaccgccccagccaucugccacgacggcaaggcccacuuuccccgggagggcguguucgugagcaacggcacccacugguucgugacccagcggaacuucuacgagccccagaucaucaccaccgacaacaccuucgugagcggcaacugcgacguggugaucggcaucgugaacaacaccguguacgauccccugcagcccgagcuggacagcuucaaggaggagcuggacaaguacuucaagaaucacaccagccccgacguggaccugggcgacaucagcggcaucaacgccagcguggugaacauccagaaggagaucgaucggcugaacgagguggccaagaaccugaacgagagccugaucgaccugcaggagcugggcaaguacgagcaguacaucaaguggcccugguacaucuggcugggcuucaucgccggccugaucgccaucgugauggugaccaucaugcugugcugcaugaccagcugcugcagcugccugaagggcuguugcagcugcggcagcugcugcaaguucgacgaggacgacagcgagcccgugcugaagggcgugaagcugcacuacaccugaggacuaguguccaccugucccuccugggcugcuggauugucucguuuuccugccaaauaaacaggaucagcgcuuuacagaucuaaaaaaaaaaaaaaaaaaaaaaaaaaaaaaaaaaaaaaaaaaaaaaaaaaaaaaaaaaaaaaaaaaaaaaaaaaaaaaaaaaaaaaaaaaaaaaaaaaaa

SEQ ID NO: 25216 - RNA, 4099 nt, Artificial Sequence
  SARS-CoV-2/Wuhan/WIV05/2019__EPI_ISL_402128 spike protein mRNA gc (1-1273)(H69del_V70del_Y453F_D614G_I692V_M1229I)
aggagacccgugacccggaaguuguacggcuacgcgacuuucccucccacaaacccucgcgcccuuccuuuccuacuugggcccggcagaaagcuuaccauguucguguuccuggugcugcugccccuggugagcagccagugcgugaaccugaccacccggacccagcugccaccagccuacaccaacagcuucacccggggcgucuacuaccccgacaagguguuccggagcagcguccugcacagcacccaggaccuguuccugcccuucuucagcaacgugaccugguuccacgccaucagcggcaccaacggcaccaagcgguucgacaaccccgugcugcccuucaacgacggcguguacuucgccagcaccgagaagagcaacaucauccggggcuggaucuucggcaccacccuggacagcaagacccagagccugcugaucgugaauaacgccaccaacguggugaucaaggugugcgaguuccaguucugcaacgaccccuuccugggcguguacuaccacaagaacaacaagagcuggauggagagcgaguuccggguguacagcagcgccaacaacugcaccuucgaguacgugagccagcccuuccugauggaccuggagggcaagcagggcaacuucaagaaccugcgggaguucguguucaagaacaucgacggcuacuucaagaucuacagcaagcacaccccaaucaaccuggugcgggaucugccccagggcuucucagcccuggagccccugguggaccugcccaucggcaucaacaucacccgguuccagacccugcuggcccugcaccggagcuaccugaccccaggcgacagcagcagcggguggacagcaggcgcggcugcuuacuacgugggcuaccugcagccccggaccuuccugcugaaguacaacgagaacggcaccaucaccgacgccguggacugcgcccuggacccucugagcgagaccaagugcacccugaagagcuucaccguggagaagggcaucuaccagaccagcaacuuccgggugcagcccaccgagagcaucgugcgguuccccaacaucaccaaccugugccccuucggcgagguguucaacgccacccgguucgccagcguguacgccuggaaccggaagcggaucagcaacugcguggccgacuacagcgugcuguacaacagcgccagcuucagcaccuucaagugcuacggcgugagccccaccaagcugaacgaccugugcuucaccaacguguacgccgacagcuucgugauccguggcgacgaggugcggcagaucgcacccggccagacaggcaagaucgccgacuacaacuacaagcugcccgacgacuucaccggcugcgugaucgccuggaacagcaacaaccucgacagcaaggugggcggcaacuacaacuaccuguuccggcuguuccggaagagcaaccugaagcccuucgagcgggacaucagcaccgagaucuaccaagccggcuccaccccuugcaacggcguggagggcuucaacugcuacuucccucugcagagcuacggcuuccagcccaccaacggcgugggcuaccagcccuaccgggugguggugcugagcuucgagcugcugcacgccccagccaccguguguggccccaagaagagcaccaaccuggugaagaacaagugcgugaacuucaacuucaacggccuuaccggcaccggcgugcugaccgagagcaacaagaaauuccugcccuuucagcaguucggccgggacaucgccgacaccaccgacgcugugcgggauccccagacccuggagauccuggacaucaccccuugcagcuucggcggcgugagcgugaucaccccaggcaccaacaccagcaaccagguggccgugcuguaccagggcgugaacugcaccgaggugcccguggccauccacgccgaccagcugacacccaccuggcgggucuacagcaccggcagcaacguguuccagacccgggccgguugccugaucggcgccgagcacgugaacaacagcuacgagugcgacauccccaucggcgccggcaucugugccagcuaccagacccagaccaauucaccccggagggcaaggagcguggccagccagagcgugaucgccuacaccaugagccugggcgccgagaacagcguggccuacagcaacaacagcaucgccauccccaccaacuucaccaucagcgugaccaccgagauucugcccgugagcaugaccaagaccagcguggacugcaccauguacaucugcggcgacagcaccgagugcagcaaccugcugcugcaguacggcagcuucugcacccagcugaaccgggcccugaccggcaucgccguggagcaggacaagaacacccaggagguguucgcccaggugaagcagaucuacaagaccccucccaucaaggacuucggcggcuucaacuucagccagauccugcccgaccccagcaagcccagcaagcggagcuucaucgaggaccugcuguucaacaaggugacccuagccgacgccggcuucaucaagcaguacggcgacugccucggcgacauagccgcccgggaccugaucugcgcccagaaguucaacggccugaccgugcugccuccccugcugaccgacgagaugaucgcccaguacaccagcgcccuguuagccggaaccaucaccagcggcuggacuuucggcgcuggagccgcucugcagauccccuucgccaugcagauggccuaccgguucaacggcaucggcgugacccagaacgugcuguacgagaaccagaagcugaucgccaaccaguucaacagcgccaucggcaagauccaggacagccugagcagcaccgcuagcgcccugggcaagcugcaggacguggugaaccagaacgcccaggcccugaacacccuggugaagcagcugagcagcaacuucggcgccaucagcagcgugcugaacgacauccugagccggcuggacaaggucgaggccgaggugcagaucgaccggcugaucacuggccggcugcagagccugcagaccuacgugacccagcagcugauccgggccgccgagauucgggccagcgccaaccuggccgccaccaagaugagcgagugcgugcugggccagagcaagcggguggacuucugcggcaagggcuaccaccugaugagcuuuccccagagcgcaccccacggagugguguuccugcacgugaccuacgugcccgcccaggagaagaacuucaccaccgccccagccaucugccacgacggcaaggcccacuuuccccgggagggcguguucgugagcaacggcacccacugguucgugacccagcggaacuucuacgagccccagaucaucaccaccgacaacaccuucgugagcggcaacugcgacguggugaucggcaucgugaacaacaccguguacgauccccugcagcccgagcuggacagcuucaaggaggagcuggacaaguacuucaagaaucacaccagccccgacguggaccugggcgacaucagcggcaucaacgccagcguggugaacauccagaaggagaucgaucggcugaacgagguggccaagaaccugaacgagagccugaucgaccugcaggagcugggcaaguacgagcaguacaucaaguggcccugguacaucuggcugggcuucaucgccggccugaucgccaucgugaucgugaccaucaugcugugcugcaugaccagcugcugcagcugccugaagggcuguugcagcugcggcagcugcugcaaguucgacgaggacgacagcgagcccgugcugaagggcgugaagcugcacuacaccugaggacuaguguccaccugucccuccugggcugcuggauugucucguuuuccugccaaauaaacaggaucagcgcuuuacagaucuaaaaaaaaaaaaaaaaaaaaaaaaaaaaaaaaaaaaaaaaaaaaaaaaaaaaaaaaaaaaaaaaaaaaaaaaaaaaaaaaaaaaaaaaaaaaaaaaaaaa

SEQ ID NO: 25217 - RNA, 4096 nt, Artificial Sequence
  SARS-CoV-2/Wuhan/WIV05/2019__EPI_ISL_402128 spike protein mRNA gc (1-1273)(H69del_V70del_Y144del_N501Y_A570D_D614G_P681H_T716I_S982 A_D1118H)
aggagacccgugacccggaaguuguacggcuacgcgacuuucccucccacaaacccucgcgcccuuccuuuccuacuugggcccggcagaaagcuuaccauguucguguuccuggugcugcugccccuggugagcagccagugcgugaaccugaccacccggacccagcugccaccagccuacaccaacagcuucacccggggcgucuacuaccccgacaagguguuccggagcagcguccugcacagcacccaggaccuguuccugcccuucuucagcaacgugaccugguuccacgccaucagcggcaccaacggcaccaagcgguucgacaaccccgugcugcccuucaacgacggcguguacuucgccagcaccgagaagagcaacaucauccggggcuggaucuucggcaccacccuggacagcaagacccagagccugcugaucgugaauaacgccaccaacguggugaucaaggugugcgaguuccaguucugcaacgaccccuuccugggcguguaccacaagaacaacaagagcuggauggagagcgaguuccggguguacagcagcgccaacaacugcaccuucgaguacgugagccagcccuuccugauggaccuggagggcaagcagggcaacuucaagaaccugcgggaguucguguucaagaacaucgacggcuacuucaagaucuacagcaagcacaccccaaucaaccuggugcgggaucugccccagggcuucucagcccuggagccccugguggaccugcccaucggcaucaacaucacccgguuccagacccugcuggcccugcaccggagcuaccugaccccaggcgacagcagcagcggguggacagcaggcgcggcugcuuacuacgugggcuaccugcagccccggaccuuccugcugaaguacaacgagaacggcaccaucaccgacgccguggacugcgcccuggacccucugagcgagaccaagugcacccugaagagcuucaccguggagaagggcaucuaccagaccagcaacuuccgggugcagcccaccgagagcaucgugcgguuccccaacaucaccaaccugugccccuucggcgagguguucaacgccacccgguucgccagcguguacgccuggaaccggaagcggaucagcaacugcguggccgacuacagcgugcuguacaacagcgccagcuucagcaccuucaagugcuacggcgugagccccaccaagcugaacgaccugugcuucaccaacguguacgccgacagcuucgugauccguggcgacgaggugcggcagaucgcacccggccagacaggcaagaucgccgacuacaacuacaagcugcccgacgacuucaccggcugcgugaucgccuggaacagcaacaaccucgacagcaaggugggcggcaacuacaacuaccuguaccggcuguuccggaagagcaaccugaagcccuucgagcgggacaucagcaccgagaucuaccaagccggcuccaccccuugcaacggcguggagggcuucaacugcuacuucccucugcagagcuacggcuuccagcccaccuacggcgugggcuaccagcccuaccgggugguggugcugagcuucgagcugcugcacgccccagccaccguguguggccccaagaagagcaccaaccuggugaagaacaagugcgugaacuucaacuucaacggccuuaccggcaccggcgugcugaccgagagcaacaagaaauuccugcccuuucagcaguucggccgggacaucgacgacaccaccgacgcugugcgggauccccagacccuggagauccuggacaucaccccuugcagcuucggcggcgugagcgugaucaccccaggcaccaacaccagcaaccagguggccgugcuguaccagggcgugaacugcaccgaggugcccguggccauccacgccgaccagcugacacccaccuggcgggucuacagcaccggcagcaacguguuccagacccgggccgguugccugaucggcgccgagcacgugaacaacagcuacgagugcgacauccccaucggcgccggcaucugugccagcuaccagacccagaccaauucacaccggagggcaaggagcguggccagccagagcaucaucgccuacaccaugagccugggcgccgagaacagcguggccuacagcaacaacagcaucgccauccccaucaacuucaccaucagcgugaccaccgagauucugcccgugagcaugaccaagaccagcguggacugcaccauguacaucugcggcgacagcaccgagugcagcaaccugcugcugcaguacggcagcuucugcacccagcugaaccgggcccugaccggcaucgccguggagcaggacaagaacacccaggagguguucgcccaggugaagcagaucuacaagaccccucccaucaaggacuucggcggcuucaacuucagccagauccugcccgaccccagcaagcccagcaagcggagcuucaucgaggaccugcuguucaacaaggugacccuagccgacgccggcuucaucaagcaguacggcgacugccucggcgacauagccgcccgggaccugaucugcgcccagaaguucaacggccugaccgugcugccuccccugcugaccgacgagaugaucgcccaguacaccagcgcccuguuagccggaaccaucaccagcggcuggacuuucggcgcuggagccgcucugcagauccccuucgccaugcagauggccuaccgguucaacggcaucggcgugacccagaacgugcuguacgagaaccagaagcugaucgccaaccaguucaacagcgccaucggcaagauccaggacagccugagcagcaccgcuagcgcccugggcaagcugcaggacguggugaaccagaacgcccaggcccugaacacccuggugaagcagcugagcagcaacuucggcgccaucagcagcgugcugaacgacauccuggcccggcuggacaaggucgaggccgaggugcagaucgaccggcugaucacuggccggcugcagagccugcagaccuacgugacccagcagcugauccgggccgccgagauucgggccagcgccaaccuggccgccaccaagaugagcgagugcgugcugggccagagcaagcggguggacuucugcggcaagggcuaccaccugaugagcuuuccccagagcgcaccccacggagugguguuccugcacgugaccuacgugcccgcccaggagaagaacuucaccaccgccccagccaucugccacgacggcaaggcccacuuuccccgggagggcguguucgugagcaacggcacccacugguucgugacccagcggaacuucuacgagccccagaucaucaccacccacaacaccuucgugagcggcaacugcgacguggugaucggcaucgugaacaacaccguguacgauccccugcagcccgagcuggacagcuucaaggaggagcuggacaaguacuucaagaaucacaccagccccgacguggaccugggcgacaucagcggcaucaacgccagcguggugaacauccagaaggagaucgaucggcugaacgagguggccaagaaccugaacgagagccugaucgaccugcaggagcugggcaaguacgagcaguacaucaaguggcccugguacaucuggcugggcuucaucgccggccugaucgccaucgugauggugaccaucaugcugugcugcaugaccagcugcugcagcugccugaagggcuguugcagcugcggcagcugcugcaaguucgacgaggacgacagcgagcccgugcugaagggcgugaagcugcacuacaccugaggacuaguguccaccugucccuccugggcugcuggauugucucguuuuccugccaaauaaacaggaucagcgcuuuacagaucuaaaaaaaaaaaaaaaaaaaaaaaaaaaaaaaaaaaaaaaaaaaaaaaaaaaaaaaaaaaaaaaaaaaaaaaaaaaaaaaaaaaaaaaaaaaaaaaaaaaa

SEQ ID NO: 25218 - RNA, 4105 nt, Artificial Sequence
  SARS-CoV-2/Wuhan/WIV05/2019__EPI_ISL_402128 spike protein mRNA gc (1-1273)(K417N_E484K_N501Y_D614G)
aggagacccgugacccggaaguuguacggcuacgcgacuuucccucccacaaacccucgcgcccuuccuuuccuacuugggcccggcagaaagcuuaccauguucguguuccuggugcugcugccccuggugagcagccagugcgugaaccugaccacccggacccagcugccaccagccuacaccaacagcuucacccggggcgucuacuaccccgacaagguguuccggagcagcguccugcacagcacccaggaccuguuccugcccuucuucagcaacgugaccugguuccacgccauccacgugagcggcaccaacggcaccaagcgguucgacaaccccgugcugcccuucaacgacggcguguacuucgccagcaccgagaagagcaacaucauccggggcuggaucuucggcaccacccuggacagcaagacccagagccugcugaucgugaauaacgccaccaacguggugaucaaggugugcgaguuccaguucugcaacgaccccuuccugggcguguacuaccacaagaacaacaagagcuggauggagagcgaguuccggguguacagcagcgccaacaacugcaccuucgaguacgugagccagcccuuccugauggaccuggagggcaagcagggcaacuucaagaaccugcgggaguucguguucaagaacaucgacggcuacuucaagaucuacagcaagcacaccccaaucaaccuggugcgggaucugccccagggcuucucagcccuggagccccugguggaccugcccaucggcaucaacaucacccgguuccagacccugcuggcccugcaccggagcuaccugaccccaggcgacagcagcagcggguggacagcaggcgcggcugcuuacuacgugggcuaccugcagccccggaccuuccugcugaaguacaacgagaacggcaccaucaccgacgccguggacugcgcccuggacccucugagcgagaccaagugcacccugaagagcuucaccguggagaagggcaucuaccagaccagcaacuuccgggugcagcccaccgagagcaucgugcgguuccccaacaucaccaaccugugccccuucggcgagguguucaacgccacccgguucgccagcguguacgccuggaaccggaagcggaucagcaacugcguggccgacuacagcgugcuguacaacagcgccagcuucagcaccuucaagugcuacggcgugagccccaccaagcugaacgaccugugcuucaccaacguguacgccgacagcuucgugauccguggcgacgaggugcggcagaucgcacccggccagacaggcaacaucgccgacuacaacuacaagcugcccgacgacuucaccggcugcgugaucgccuggaacagcaacaaccucgacagcaaggugggcggcaacuacaacuaccuguaccggcuguuccggaagagcaaccugaagcccuucgagcgggacaucagcaccgagaucuaccaagccggcuccaccccuugcaacggcgugaagggcuucaacugcuacuucccucugcagagcuacggcuuccagcccaccuacggcgugggcuaccagcccuaccgggugguggugcugagcuucgagcugcugcacgccccagccaccguguguggccccaagaagagcaccaaccuggugaagaacaagugcgugaacuucaacuucaacggccuuaccggcaccggcgugcugaccgagagcaacaagaaauuccugcccuuucagcaguucggccgggacaucgccgacaccaccgacgcugugcgggauccccagacccuggagauccuggacaucaccccuugcagcuucggcggcgugagcgugaucaccccaggcaccaacaccagcaaccagguggccgugcuguaccagggcgugaacugcaccgaggugcccguggccauccacgccgaccagcugacacccaccuggcgggucuacagcaccggcagcaacguguuccagacccgggccgguugccugaucggcgccgagcacgugaacaacagcuacgagugcgacauccccaucggcgccggcaucugugccagcuaccagacccagaccaauucaccccggagggcaaggagcguggccagccagagcaucaucgccuacaccaugagccugggcgccgagaacagcguggccuacagcaacaacagcaucgccauccccaccaacuucaccaucagcgugaccaccgagauucugcccgugagcaugaccaagaccagcguggacugcaccauguacaucugcggcgacagcaccgagugcagcaaccugcugcugcaguacggcagcuucugcacccagcugaaccgggcccugaccggcaucgccguggagcaggacaagaacacccaggagguguucgcccaggugaagcagaucuacaagaccccucccaucaaggacuucggcggcuucaacuucagccagauccugcccgaccccagcaagcccagcaagcggagcuucaucgaggaccugcuguucaacaaggugacccuagccgacgccggcuucaucaagcaguacggcgacugccucggcgacauagccgcccgggaccugaucugcgcccagaaguucaacggccugaccgugcugccuccccugcugaccgacgagaugaucgcccaguacaccagcgcccuguuagccggaaccaucaccagcggcuggacuuucggcgcuggagccgcucugcagauccccuucgccaugcagauggccuaccgguucaacggcaucggcgugacccagaacgugcuguacgagaaccagaagcugaucgccaaccaguucaacagcgccaucggcaagauccaggacagccugagcagcaccgcuagcgcccugggcaagcugcaggacguggugaaccagaacgcccaggcccugaacacccuggugaagcagcugagcagcaacuucggcgccaucagcagcgugcugaacgacauccugagccggcuggacaaggucgaggccgaggugcagaucgaccggcugaucacuggccggcugcagagccugcagaccuacgugacccagcagcugauccgggccgccgagauucgggccagcgccaaccuggccgccaccaagaugagcgagugcgugcugggccagagcaagcggguggacuucugcggcaagggcuaccaccugaugagcuuuccccagagcgcaccccacggagugguguuccugcacgugaccuacgugcccgcccaggagaagaacuucaccaccgccccagccaucugccacgacggcaaggcccacuuuccccgggagggcguguucgugagcaacggcacccacugguucgugacccagcggaacuucuacgagccccagaucaucaccaccgacaacaccuucgugagcggcaacugcgacguggugaucggcaucgugaacaacaccguguacgauccccugcagcccgagcuggacagcuucaaggaggagcuggacaaguacuucaagaaucacaccagccccgacguggaccugggcgacaucagcggcaucaacgccagcguggugaacauccagaaggagaucgaucggcugaacgagguggccaagaaccugaacgagagccugaucgaccugcaggagcugggcaaguacgagcaguacaucaaguggcccugguacaucuggcugggcuucaucgccggccugaucgccaucgugauggugaccaucaugcugugcugcaugaccagcugcugcagcugccugaagggcuguugcagcugcggcagcugcugcaaguucgacgaggacgacagcgagcccgugcugaagggcgugaagcugcacuacaccugaggacuaguguccaccugucccuccugggcugcuggauugucucguuuuccugccaaauaaacaggaucagcgcuuuacagaucuaaaaaaaaaaaaaaaaaaaaaaaaaaaaaaaaaaaaaaaaaaaaaaaaaaaaaaaaaaaaaaaaaaaaaaaaaaaaaaaaaaaaaaaaaaaaaaaaaaaa

SEQ ID NO: 25219 - RNA, 4096 nt, Artificial Sequence
  SARS-CoV-2/Wuhan/WIV05/2019__EPI_ISL_402128 spike protein mRNA gc (1-1273)(L18F_D80A_D215G_L242del_A243del_L244del_R246I_K417N_E484 K_N501Y_D614G_A701V)
aggagacccgugacccggaaguuguacggcuacgcgacuuucccucccacaaacccucgcgcccuuccuuuccuacuugggcccggcagaaagcuuaccauguucguguuccuggugcugcugccccuggugagcagccagugcgugaacuucaccacccggacccagcugccaccagccuacaccaacagcuucacccggggcgucuacuaccccgacaagguguuccggagcagcguccugcacagcacccaggaccuguuccugcccuucuucagcaacgugaccugguuccacgccauccacgugagcggcaccaacggcaccaagcgguucgccaaccccgugcugcccuucaacgacggcguguacuucgccagcaccgagaagagcaacaucauccggggcuggaucuucggcaccacccuggacagcaagacccagagccugcugaucgugaauaacgccaccaacguggugaucaaggugugcgaguuccaguucugcaacgaccccuuccugggcguguacuaccacaagaacaacaagagcuggauggagagcgaguuccggguguacagcagcgccaacaacugcaccuucgaguacgugagccagcccuuccugauggaccuggagggcaagcagggcaacuucaagaaccugcgggaguucguguucaagaacaucgacggcuacuucaagaucuacagcaagcacaccccaaucaaccuggugcggggccugccccagggcuucucagcccuggagccccugguggaccugcccaucggcaucaacaucacccgguuccagacccugcacaucagcuaccugaccccaggcgacagcagcagcggguggacagcaggcgcggcugcuuacuacgugggcuaccugcagccccggaccuuccugcugaaguacaacgagaacggcaccaucaccgacgccguggacugcgcccuggacccucugagcgagaccaagugcacccugaagagcuucaccguggagaagggcaucuaccagaccagcaacuuccgggugcagcccaccgagagcaucgugcgguuccccaacaucaccaaccugugccccuucggcgagguguucaacgccacccgguucgccagcguguacgccuggaaccggaagcggaucagcaacugcguggccgacuacagcgugcuguacaacagcgccagcuucagcaccuucaagugcuacggcgugagccccaccaagcugaacgaccugugcuucaccaacguguacgccgacagcuucgugauccguggcgacgaggugcggcagaucgcacccggccagacaggcaacaucgccgacuacaacuacaagcugcccgacgacuucaccggcugcgugaucgccuggaacagcaacaaccucgacagcaaggugggcggcaacuacaacuaccuguaccggcuguuccggaagagcaaccugaagcccuucgagcgggacaucagcaccgagaucuaccaagccggcuccaccccuugcaacggcgugaagggcuucaacugcuacuucccucugcagagcuacggcuuccagcccaccuacggcgugggcuaccagcccuaccgggugguggugcugagcuucgagcugcugcacgccccagccaccguguguggccccaagaagagcaccaaccuggugaagaacaagugcgugaacuucaacuucaacggccuuaccggcaccggcgugcugaccgagagcaacaagaaauuccugcccuuucagcaguucggccgggacaucgccgacaccaccgacgcugugcgggauccccagacccuggagauccuggacaucaccccuugcagcuucggcggcgugagcgugaucaccccaggcaccaacaccagcaaccagguggccgugcuguaccagggcgugaacugcaccgaggugcccguggccauccacgccgaccagcugacacccaccuggcgggucuacagcaccggcagcaacguguuccagacccgggccgguugccugaucggcgccgagcacgugaacaacagcuacgagugcgacauccccaucggcgccggcaucugugccagcuaccagacccagaccaauucaccccggagggcaaggagcguggccagccagagcaucaucgccuacaccaugagccugggcguggagaacagcguggccuacagcaacaacagcaucgccauccccaccaacuucaccaucagcgugaccaccgagauucugcccgugagcaugaccaagaccagcguggacugcaccauguacaucugcggcgacagcaccgagugcagcaaccugcugcugcaguacggcagcuucugcacccagcugaaccgggcccugaccggcaucgccguggagcaggacaagaacacccaggagguguucgcccaggugaagcagaucuacaagaccccucccaucaaggacuucggcggcuucaacuucagccagauccugcccgaccccagcaagcccagcaagcggagcuucaucgaggaccugcuguucaacaaggugacccuagccgacgccggcuucaucaagcaguacggcgacugccucggcgacauagccgcccgggaccugaucugcgcccagaaguucaacggccugaccgugcugccuccccugcugaccgacgagaugaucgcccaguacaccagcgcccuguuagccggaaccaucaccagcggcuggacuuucggcgcuggagccgcucugcagauccccuucgccaugcagauggccuaccgguucaacggcaucggcgugacccagaacgugcuguacgagaaccagaagcugaucgccaaccaguucaacagcgccaucggcaagauccaggacagccugagcagcaccgcuagcgcccugggcaagcugcaggacguggugaaccagaacgcccaggcccugaacacccuggugaagcagcugagcagcaacuucggcgccaucagcagcgugcugaacgacauccugagccggcuggacaaggucgaggccgaggugcagaucgaccggcugaucacuggccggcugcagagccugcagaccuacgugacccagcagcugauccgggccgccgagauucgggccagcgccaaccuggccgccaccaagaugagcgagugcgugcugggccagagcaagcggguggacuucugcggcaagggcuaccaccugaugagcuuuccccagagcgcaccccacggagugguguuccugcacgugaccuacgugcccgcccaggagaagaacuucaccaccgccccagccaucugccacgacggcaaggcccacuuuccccgggagggcguguucgugagcaacggcacccacugguucgugacccagcggaacuucuacgagccccagaucaucaccaccgacaacaccuucgugagcggcaacugcgacguggugaucggcaucgugaacaacaccguguacgauccccugcagcccgagcuggacagcuucaaggaggagcuggacaaguacuucaagaaucacaccagccccgacguggaccugggcgacaucagcggcaucaacgccagcguggugaacauccagaaggagaucgaucggcugaacgagguggccaagaaccugaacgagagccugaucgaccugcaggagcugggcaaguacgagcaguacaucaaguggcccugguacaucuggcugggcuucaucgccggccugaucgccaucgugauggugaccaucaugcugugcugcaugaccagcugcugcagcugccugaagggcuguugcagcugcggcagcugcugcaaguucgacgaggacgacagcgagcccgugcugaagggcgugaagcugcacuacaccugaggacuaguguccaccugucccuccugggcugcuggauugucucguuuuccugccaaauaaacaggaucagcgcuuuacagaucuaaaaaaaaaaaaaaaaaaaaaaaaaaaaaaaaaaaaaaaaaaaaaaaaaaaaaaaaaaaaaaaaaaaaaaaaaaaaaaaaaaaaaaaaaaaaaaaaaaaa

SEQ ID NO: 25220 - RNA, 4105 nt, Artificial Sequence
  SARS-CoV-2/Wuhan/WIV05/2019__EPI_ISL_402128 spike protein mRNA gc (1-1273)(E484K_D614G)
aggagacccgugacccggaaguuguacggcuacgcgacuuucccucccacaaacccucgcgcccuuccuuuccuacuugggcccggcagaaagcuuaccauguucguguuccuggugcugcugccccuggugagcagccagugcgugaaccugaccacccggacccagcugccaccagccuacaccaacagcuucacccggggcgucuacuaccccgacaagguguuccggagcagcguccugcacagcacccaggaccuguuccugcccuucuucagcaacgugaccugguuccacgccauccacgugagcggcaccaacggcaccaagcgguucgacaaccccgugcugcccuucaacgacggcguguacuucgccagcaccgagaagagcaacaucauccggggcuggaucuucggcaccacccuggacagcaagacccagagccugcugaucgugaauaacgccaccaacguggugaucaaggugugcgaguuccaguucugcaacgaccccuuccugggcguguacuaccacaagaacaacaagagcuggauggagagcgaguuccggguguacagcagcgccaacaacugcaccuucgaguacgugagccagcccuuccugauggaccuggagggcaagcagggcaacuucaagaaccugcgggaguucguguucaagaacaucgacggcuacuucaagaucuacagcaagcacaccccaaucaaccuggugcgggaucugccccagggcuucucagcccuggagccccugguggaccugcccaucggcaucaacaucacccgguuccagacccugcuggcccugcaccggagcuaccugaccccaggcgacagcagcagcggguggacagcaggcgcggcugcuuacuacgugggcuaccugcagccccggaccuuccugcugaaguacaacgagaacggcaccaucaccgacgccguggacugcgcccuggacccucugagcgagaccaagugcacccugaagagcuucaccguggagaagggcaucuaccagaccagcaacuuccgggugcagcccaccgagagcaucgugcgguuccccaacaucaccaaccugugccccuucggcgagguguucaacgccacccgguucgccagcguguacgccuggaaccggaagcggaucagcaacugcguggccgacuacagcgugcuguacaacagcgccagcuucagcaccuucaagugcuacggcgugagccccaccaagcugaacgaccugugcuucaccaacguguacgccgacagcuucgugauccguggcgacgaggugcggcagaucgcacccggccagacaggcaagaucgccgacuacaacuacaagcugcccgacgacuucaccggcugcgugaucgccuggaacagcaacaaccucgacagcaaggugggcggcaacuacaacuaccuguaccggcuguuccggaagagcaaccugaagcccuucgagcgggacaucagcaccgagaucuaccaagccggcuccaccccuugcaacggcgugaagggcuucaacugcuacuucccucugcagagcuacggcuuccagcccaccaacggcgugggcuaccagcccuaccgggugguggugcugagcuucgagcugcugcacgccccagccaccguguguggccccaagaagagcaccaaccuggugaagaacaagugcgugaacuucaacuucaacggccuuaccggcaccggcgugcugaccgagagcaacaagaaauuccugcccuuucagcaguucggccgggacaucgccgacaccaccgacgcugugcgggauccccagacccuggagauccuggacaucaccccuugcagcuucggcggcgugagcgugaucaccccaggcaccaacaccagcaaccagguggccgugcuguaccagggcgugaacugcaccgaggugcccguggccauccacgccgaccagcugacacccaccuggcgggucuacagcaccggcagcaacguguuccagacccgggccgguugccugaucggcgccgagcacgugaacaacagcuacgagugcgacauccccaucggcgccggcaucugugccagcuaccagacccagaccaauucaccccggagggcaaggagcguggccagccagagcaucaucgccuacaccaugagccugggcgccgagaacagcguggccuacagcaacaacagcaucgccauccccaccaacuucaccaucagcgugaccaccgagauucugcccgugagcaugaccaagaccagcguggacugcaccauguacaucugcggcgacagcaccgagugcagcaaccugcugcugcaguacggcagcuucugcacccagcugaaccgggcccugaccggcaucgccguggagcaggacaagaacacccaggagguguucgcccaggugaagcagaucuacaagaccccucccaucaaggacuucggcggcuucaacuucagccagauccugcccgaccccagcaagcccagcaagcggagcuucaucgaggaccugcuguucaacaaggugacccuagccgacgccggcuucaucaagcaguacggcgacugccucggcgacauagccgcccgggaccugaucugcgcccagaaguucaacggccugaccgugcugccuccccugcugaccgacgagaugaucgcccaguacaccagcgcccuguuagccggaaccaucaccagcggcuggacuuucggcgcuggagccgcucugcagauccccuucgccaugcagauggccuaccgguucaacggcaucggcgugacccagaacgugcuguacgagaaccagaagcugaucgccaaccaguucaacagcgccaucggcaagauccaggacagccugagcagcaccgcuagcgcccugggcaagcugcaggacguggugaaccagaacgcccaggcccugaacacccuggugaagcagcugagcagcaacuucggcgccaucagcagcgugcugaacgacauccugagccggcuggacaaggucgaggccgaggugcagaucgaccggcugaucacuggccggcugcagagccugcagaccuacgugacccagcagcugauccgggccgccgagauucgggccagcgccaaccuggccgccaccaagaugagcgagugcgugcugggccagagcaagcggguggacuucugcggcaagggcuaccaccugaugagcuuuccccagagcgcaccccacggagugguguuccugcacgugaccuacgugcccgcccaggagaagaacuucaccaccgccccagccaucugccacgacggcaaggcccacuuuccccgggagggcguguucgugagcaacggcacccacugguucgugacccagcggaacuucuacgagccccagaucaucaccaccgacaacaccuucgugagcggcaacugcgacguggugaucggcaucgugaacaacaccguguacgauccccugcagcccgagcuggacagcuucaaggaggagcuggacaaguacuucaagaaucacaccagccccgacguggaccugggcgacaucagcggcaucaacgccagcguggugaacauccagaaggagaucgaucggcugaacgagguggccaagaaccugaacgagagccugaucgaccugcaggagcugggcaaguacgagcaguacaucaaguggcccugguacaucuggcugggcuucaucgccggccugaucgccaucgugauggugaccaucaugcugugcugcaugaccagcugcugcagcugccugaagggcuguugcagcugcggcagcugcugcaaguucgacgaggacgacagcgagcccgugcugaagggcgugaagcugcacuacaccugaggacuaguguccaccugucccuccugggcugcuggauugucucguuuuccugccaaauaaacaggaucagcgcuuuacagaucuaaaaaaaaaaaaaaaaaaaaaaaaaaaaaaaaaaaaaaaaaaaaaaaaaaaaaaaaaaaaaaaaaaaaaaaaaaaaaaaaaaaaaaaaaaaaaaaaaaaa

SEQ ID NO: 25221 - RNA, 4105 nt, Artificial Sequence
  SARS-CoV-2/Wuhan/WIV05/2019__EPI_ISL_402128 spike protein mRNA gc (1-1273)(L18F_T20N_P26S_D138Y_R190S_K417T_E484K_N501Y_D614G_H655Y _T1027I)
aggagacccgugacccggaaguuguacggcuacgcgacuuucccucccacaaacccucgcgcccuuccuuuccuacuugggcccggcagaaagcuuaccauguucguguuccuggugcugcugccccuggugagcagccagugcgugaacuucaccaaccggacccagcugccaagcgccuacaccaacagcuucacccggggcgucuacuaccccgacaagguguuccggagcagcguccugcacagcacccaggaccuguuccugcccuucuucagcaacgugaccugguuccacgccauccacgugagcggcaccaacggcaccaagcgguucgacaaccccgugcugcccuucaacgacggcguguacuucgccagcaccgagaagagcaacaucauccggggcuggaucuucggcaccacccuggacagcaagacccagagccugcugaucgugaauaacgccaccaacguggugaucaaggugugcgaguuccaguucugcaacuaccccuuccugggcguguacuaccacaagaacaacaagagcuggauggagagcgaguuccggguguacagcagcgccaacaacugcaccuucgaguacgugagccagcccuuccugauggaccuggagggcaagcagggcaacuucaagaaccugagcgaguucguguucaagaacaucgacggcuacuucaagaucuacagcaagcacaccccaaucaaccuggugcgggaucugccccagggcuucucagcccuggagccccugguggaccugcccaucggcaucaacaucacccgguuccagacccugcuggcccugcaccggagcuaccugaccccaggcgacagcagcagcggguggacagcaggcgcggcugcuuacuacgugggcuaccugcagccccggaccuuccugcugaaguacaacgagaacggcaccaucaccgacgccguggacugcgcccuggacccucugagcgagaccaagugcacccugaagagcuucaccguggagaagggcaucuaccagaccagcaacuuccgggugcagcccaccgagagcaucgugcgguuccccaacaucaccaaccugugccccuucggcgagguguucaacgccacccgguucgccagcguguacgccuggaaccggaagcggaucagcaacugcguggccgacuacagcgugcuguacaacagcgccagcuucagcaccuucaagugcuacggcgugagccccaccaagcugaacgaccugugcuucaccaacguguacgccgacagcuucgugauccguggcgacgaggugcggcagaucgcacccggccagacaggcaccaucgccgacuacaacuacaagcugcccgacgacuucaccggcugcgugaucgccuggaacagcaacaaccucgacagcaaggugggcggcaacuacaacuaccuguaccggcuguuccggaagagcaaccugaagcccuucgagcgggacaucagcaccgagaucuaccaagccggcuccaccccuugcaacggcgugaagggcuucaacugcuacuucccucugcagagcuacggcuuccagcccaccuacggcgugggcuaccagcccuaccgggugguggugcugagcuucgagcugcugcacgccccagccaccguguguggccccaagaagagcaccaaccuggugaagaacaagugcgugaacuucaacuucaacggccuuaccggcaccggcgugcugaccgagagcaacaagaaauuccugcccuuucagcaguucggccgggacaucgccgacaccaccgacgcugugcgggauccccagacccuggagauccuggacaucaccccuugcagcuucggcggcgugagcgugaucaccccaggcaccaacaccagcaaccagguggccgugcuguaccagggcgugaacugcaccgaggugcccguggccauccacgccgaccagcugacacccaccuggcgggucuacagcaccggcagcaacguguuccagacccgggccgguugccugaucggcgccgaguacgugaacaacagcuacgagugcgacauccccaucggcgccggcaucugugccagcuaccagacccagaccaauucaccccggagggcaaggagcguggccagccagagcaucaucgccuacaccaugagccugggcgccgagaacagcguggccuacagcaacaacagcaucgccauccccaccaacuucaccaucagcgugaccaccgagauucugcccgugagcaugaccaagaccagcguggacugcaccauguacaucugcggcgacagcaccgagugcagcaaccugcugcugcaguacggcagcuucugcacccagcugaaccgggcccugaccggcaucgccguggagcaggacaagaacacccaggagguguucgcccaggugaagcagaucuacaagaccccucccaucaaggacuucggcggcuucaacuucagccagauccugcccgaccccagcaagcccagcaagcggagcuucaucgaggaccugcuguucaacaaggugacccuagccgacgccggcuucaucaagcaguacggcgacugccucggcgacauagccgcccgggaccugaucugcgcccagaaguucaacggccugaccgugcugccuccccugcugaccgacgagaugaucgcccaguacaccagcgcccuguuagccggaaccaucaccagcggcuggacuuucggcgcuggagccgcucugcagauccccuucgccaugcagauggccuaccgguucaacggcaucggcgugacccagaacgugcuguacgagaaccagaagcugaucgccaaccaguucaacagcgccaucggcaagauccaggacagccugagcagcaccgcuagcgcccugggcaagcugcaggacguggugaaccagaacgcccaggcccugaacacccuggugaagcagcugagcagcaacuucggcgccaucagcagcgugcugaacgacauccugagccggcuggacaaggucgaggccgaggugcagaucgaccggcugaucacuggccggcugcagagccugcagaccuacgugacccagcagcugauccgggccgccgagauucgggccagcgccaaccuggccgccaucaagaugagcgagugcgugcugggccagagcaagcggguggacuucugcggcaagggcuaccaccugaugagcuuuccccagagcgcaccccacggagugguguuccugcacgugaccuacgugcccgcccaggagaagaacuucaccaccgccccagccaucugccacgacggcaaggcccacuuuccccgggagggcguguucgugagcaacggcacccacugguucgugacccagcggaacuucuacgagccccagaucaucaccaccgacaacaccuucgugagcggcaacugcgacguggugaucggcaucgugaacaacaccguguacgauccccugcagcccgagcuggacagcuucaaggaggagcuggacaaguacuucaagaaucacaccagccccgacguggaccugggcgacaucagcggcaucaacgccagcguggugaacauccagaaggagaucgaucggcugaacgagguggccaagaaccugaacgagagccugaucgaccugcaggagcugggcaaguacgagcaguacaucaaguggcccugguacaucuggcugggcuucaucgccggccugaucgccaucgugauggugaccaucaugcugugcugcaugaccagcugcugcagcugccugaagggcuguugcagcugcggcagcugcugcaaguucgacgaggacgacagcgagcccgugcugaagggcgugaagcugcacuacaccugaggacuaguguccaccugucccuccugggcugcuggauugucucguuuuccugccaaauaaacaggaucagcgcuuuacagaucuaaaaaaaaaaaaaaaaaaaaaaaaaaaaaaaaaaaaaaaaaaaaaaaaaaaaaaaaaaaaaaaaaaaaaaaaaaaaaaaaaaaaaaaaaaaaaaaaaaaa

SEQ ID NO: 25222 - RNA, 4105 nt, Artificial Sequence
  SARS-CoV-2/Wuhan/WIV05/2019__EPI_ISL_402128 spike protein mRNA gc (1-1273)(S13I_W152C_L452R_D614G)
aggagacccgugacccggaaguuguacggcuacgcgacuuucccucccacaaacccucgcgcccuuccuuuccuacuugggcccggcagaaagcuuaccauguucguguuccuggugcugcugccccuggugagcauccagugcgugaaccugaccacccggacccagcugccaccagccuacaccaacagcuucacccggggcgucuacuaccccgacaagguguuccggagcagcguccugcacagcacccaggaccuguuccugcccuucuucagcaacgugaccugguuccacgccauccacgugagcggcaccaacggcaccaagcgguucgacaaccccgugcugcccuucaacgacggcguguacuucgccagcaccgagaagagcaacaucauccggggcuggaucuucggcaccacccuggacagcaagacccagagccugcugaucgugaauaacgccaccaacguggugaucaaggugugcgaguuccaguucugcaacgaccccuuccugggcguguacuaccacaagaacaacaagagcugcauggagagcgaguuccggguguacagcagcgccaacaacugcaccuucgaguacgugagccagcccuuccugauggaccuggagggcaagcagggcaacuucaagaaccugcgggaguucguguucaagaacaucgacggcuacuucaagaucuacagcaagcacaccccaaucaaccuggugcgggaucugccccagggcuucucagcccuggagccccugguggaccugcccaucggcaucaacaucacccgguuccagacccugcuggcccugcaccggagcuaccugaccccaggcgacagcagcagcggguggacagcaggcgcggcugcuuacuacgugggcuaccugcagccccggaccuuccugcugaaguacaacgagaacggcaccaucaccgacgccguggacugcgcccuggacccucugagcgagaccaagugcacccugaagagcuucaccguggagaagggcaucuaccagaccagcaacuuccgggugcagcccaccgagagcaucgugcgguuccccaacaucaccaaccugugccccuucggcgagguguucaacgccacccgguucgccagcguguacgccuggaaccggaagcggaucagcaacugcguggccgacuacagcgugcuguacaacagcgccagcuucagcaccuucaagugcuacggcgugagccccaccaagcugaacgaccugugcuucaccaacguguacgccgacagcuucgugauccguggcgacgaggugcggcagaucgcacccggccagacaggcaagaucgccgacuacaacuacaagcugcccgacgacuucaccggcugcgugaucgccuggaacagcaacaaccucgacagcaaggugggcggcaacuacaacuaccgcuaccggcuguuccggaagagcaaccugaagcccuucgagcgggacaucagcaccgagaucuaccaagccggcuccaccccuugcaacggcguggagggcuucaacugcuacuucccucugcagagcuacggcuuccagcccaccaacggcgugggcuaccagcccuaccgggugguggugcugagcuucgagcugcugcacgccccagccaccguguguggccccaagaagagcaccaaccuggugaagaacaagugcgugaacuucaacuucaacggccuuaccggcaccggcgugcugaccgagagcaacaagaaauuccugcccuuucagcaguucggccgggacaucgccgacaccaccgacgcugugcgggauccccagacccuggagauccuggacaucaccccuugcagcuucggcggcgugagcgugaucaccccaggcaccaacaccagcaaccagguggccgugcuguaccagggcgugaacugcaccgaggugcccguggccauccacgccgaccagcugacacccaccuggcgggucuacagcaccggcagcaacguguuccagacccgggccgguugccugaucggcgccgagcacgugaacaacagcuacgagugcgacauccccaucggcgccggcaucugugccagcuaccagacccagaccaauucaccccggagggcaaggagcguggccagccagagcaucaucgccuacaccaugagccugggcgccgagaacagcguggccuacagcaacaacagcaucgccauccccaccaacuucaccaucagcgugaccaccgagauucugcccgugagcaugaccaagaccagcguggacugcaccauguacaucugcggcgacagcaccgagugcagcaaccugcugcugcaguacggcagcuucugcacccagcugaaccgggcccugaccggcaucgccguggagcaggacaagaacacccaggagguguucgcccaggugaagcagaucuacaagaccccucccaucaaggacuucggcggcuucaacuucagccagauccugcccgaccccagcaagcccagcaagcggagcuucaucgaggaccugcuguucaacaaggugacccuagccgacgccggcuucaucaagcaguacggcgacugccucggcgacauagccgcccgggaccugaucugcgcccagaaguucaacggccugaccgugcugccuccccugcugaccgacgagaugaucgcccaguacaccagcgcccuguuagccggaaccaucaccagcggcuggacuuucggcgcuggagccgcucugcagauccccuucgccaugcagauggccuaccgguucaacggcaucggcgugacccagaacgugcuguacgagaaccagaagcugaucgccaaccaguucaacagcgccaucggcaagauccaggacagccugagcagcaccgcuagcgcccugggcaagcugcaggacguggugaaccagaacgcccaggcccugaacacccuggugaagcagcugagcagcaacuucggcgccaucagcagcgugcugaacgacauccugagccggcuggacaaggucgaggccgaggugcagaucgaccggcugaucacuggccggcugcagagccugcagaccuacgugacccagcagcugauccgggccgccgagauucgggccagcgccaaccuggccgccaccaagaugagcgagugcgugcugggccagagcaagcggguggacuucugcggcaagggcuaccaccugaugagcuuuccccagagcgcaccccacggagugguguuccugcacgugaccuacgugcccgcccaggagaagaacuucaccaccgccccagccaucugccacgacggcaaggcccacuuuccccgggagggcguguucgugagcaacggcacccacugguucgugacccagcggaacuucuacgagccccagaucaucaccaccgacaacaccuucgugagcggcaacugcgacguggugaucggcaucgugaacaacaccguguacgauccccugcagcccgagcuggacagcuucaaggaggagcuggacaaguacuucaagaaucacaccagccccgacguggaccugggcgacaucagcggcaucaacgccagcguggugaacauccagaaggagaucgaucggcugaacgagguggccaagaaccugaacgagagccugaucgaccugcaggagcugggcaaguacgagcaguacaucaaguggcccugguacaucuggcugggcuucaucgccggccugaucgccaucgugauggugaccaucaugcugugcugcaugaccagcugcugcagcugccugaagggcuguugcagcugcggcagcugcugcaaguucgacgaggacgacagcgagcccgugcugaagggcgugaagcugcacuacaccugaggacuaguguccaccugucccuccugggcugcuggauugucucguuuuccugccaaauaaacaggaucagcgcuuuacagaucuaaaaaaaaaaaaaaaaaaaaaaaaaaaaaaaaaaaaaaaaaaaaaaaaaaaaaaaaaaaaaaaaaaaaaaaaaaaaaaaaaaaaaaaaaaaaaaaaaaaa

SEQ ID NO: 25223 - RNA, 4105 nt, Artificial Sequence
  SARS-CoV-2/Wuhan/WIV05/2019__EPI_ISL_402128 spike protein mRNA gc (1-1273)
aggagacccgugacccggaaguuguacggcuacgcgacuuucccucccacaaacccucgcgcccuuccuuuccuacuugggcccggcagaaagcuuaccauguucguguuccuggugcugcugccccuggugagcagccagugcgugaaccugaccacccggacccagcugcccccugccuacaccaacagcuucacccggggcguguacuaccccgacaagguguuccggagcagcgugcugcacagcacccaggaccuguuccugcccuucuucagcaacgugaccugguuccacgccauccacgugagcggcaccaacggcaccaagcgguucgacaacccagugcugcccuucaacgacggcguguacuucgccagcaccgagaagucaaacaucauccggggcuggaucuucggcaccacccuggacagcaagacacagagccugcugaucgugaacaacgccaccaacguggugaucaaggugugcgaguuucaguucugcaacgaccccuuccugggcguguacuaccacaagaacaacaagagcuggauggagagcgaguuccgggucuacagcagcgcuaacaauugcaccuucgaguacgugagccagcccuuccugauggaccucgagggcaagcagggcaacuucaagaaccugcgggaguucguguucaagaacaucgauggcuacuucaagaucuacagcaagcacacccccaucaaccuggugcgggaccugccccagggauucagcgcccuggagccucugguggaccugcccaucggcaucaacaucaccagguuccagacccugcuggcccugcaccggagcuaccugacccccggcgacagcagcagcggcuggaccgccggcgccgccgcauacuacgugggcuaccugcagccacggaccuuccugcugaaguacaacgagaacggcaccaucaccgacgccguggacugcgcccuggacccccugagcgagaccaagugcacccuaaagagcuucaccguggagaagggcaucuaccagaccagcaacuuccgggugcagcccacugagagcaucgugcgguuccccaacauuaccaaccugugucccuucggcgagguguucaacgccacccgguucgccagcguguacgccuggaaccggaagcggaucagcaacugcguggccgacuacagcgugcuguacaacagcgccagcuucagcaccuucaagugcuacggcgugagcccuaccaagcugaacgaccugugcuucaccaacguguacgcugacagcuucgugauccggggcgacgaggugcggcagaucgcccccggccagaccggcaagaucgccgacuacaacuacaagcugcccgacgacuucaccggcugcgugaucgccuggaacagcaacaaccuggacagcaaggugggcggcaacuacaacuaccuguaccggcuguuccguaagagcaaccugaagccauucgagcgggacaucagcaccgagaucuaccaggccggcagcacccccugcaacgguguggagggcuuuaacugcuacuucccccugcagagcuacggcuuccagcccaccaacggcgugggcuaccagcccuaccgggugguggugcugagcuucgagcugcugcacgcccccgccaccgugugcggcccuaaaaagagcaccaaccuggugaagaacaagugcgugaacuucaauuucaacggccugaccggcaccggcgugcugaccgagagcaacaagaaguuccugcccuuccagcaguucggccgggauaucgccgacaccaccgacgcagugcgggacccccagacccuggagauccuggacaucaccccaugcagcuucggcggcgugagcgucaucacccccggcacaaacaccagcaaccagguggccgugcuguaccaggacgugaacugcaccgaggugcccguggccauccacgccgaccagcugacccccaccuggcggguguacagcaccggaagcaacguguuccagacccgggccggcugccugaucggcgccgagcacgugaacaacuccuacgagugcgacauccccaucggcgcuggcaucugcgccagcuaccagacccagaccaacagcccccggcgggcccggagcguggccagccagagcaucaucgccuacaccaugagcuuaggcgccgagaacagcguggccuacagcaacaacagcaucgcgaucccuaccaacuucaccaucagcgugaccaccgagauacugcccgugagcaugaccaagaccagcguggacuguaccauguacaucugcggcgacagcaccgagugcagcaaccugcugcugcaguacggcagcuucugcacccagcugaaccgggcccugaccggcaucgccguggagcaggacaagaacacccaagagguguucgcccaggugaagcagaucuacaagacucccccaaucaaggacuucggcggcuucaacuucagccagauccugcccgaccccagcaagcccagcaagcggagcuucaucgaggaccugcuguucaacaaggugacccuggccgacgccggcuucaucaagcaguacggcgauugccugggcgacaucgccgcucgggaccugaucugcgcccagaaguucaacgggcugaccgugcugcccccucugcugaccgacgagaugaucgcccaguacaccagcgcccugcuugccggcaccaucaccagcggcuggaccuucggcgccggcgcagcccugcagauccccuucgccaugcagauggccuaccgguucaacggcaucggcgugacccagaacgugcuguacgagaaccagaagcugaucgccaaccaguucaacagcgccaucggcaagauccaggacagccugagcagcaccgccagcgcccugggcaagcugcaggacguggugaaccagaacgcucaggcccugaacacccuggugaagcagcugagcagcaacuucggcgccaucagcucagugcugaaugacauccugagcaggcuggacaagguggaggccgaggugcagaucgaccggcugaucaccggccggcugcagagccugcagaccuacgugacccagcagcugauccgggccgccgagauccgggccagcgccaaccuggcagccaccaagaugagcgagugcgugcugggccagagcaagcggguggacuuuugcggcaagggcuaccaccugaugagcuucccccagagcgccccacacggcgugguguuccuccacgucacauacgugcccgcccaggagaagaacuucaccaccgcccccgccauuugccacgacggcaaggcucacuucccccgggagggcguguucgugagcaacggaacccacugguucgugacccagcggaacuucuacgagccccagaucaucaccaccgacaacaccuucgugagcggcaacugcgacguggugaucggcaucgugaacaacaccguguacgacccccugcagccugagcuggacagcuucaaggaggagcuggacaaguacuucaagaaccacaccagccccgauguggaccugggcgacaucagcggcaucaacgccagcguggugaacauccagaaggagaucgaccggcugaacgagguggccaagaaccugaacgagagccugaucgaccugcaggagcugggcaaguacgagcaguacaucaaguggcccugguacaucuggcugggcuucaucgccggccugaucgccaucgugauggugaccaucaugcugugcugcaugaccagcugcuguagcugccugaagggcugcugcagcugcggcagcugcugcaaguucgacgaggacgacagcgagccagugcugaagggcgugaagcugcacuacaccugaggacuaguguccaccugucccuccugggcugcuggauugucucguuuuccugccaaauaaacaggaucagcgcuuuacagaucuaaaaaaaaaaaaaaaaaaaaaaaaaaaaaaaaaaaaaaaaaaaaaaaaaaaaaaaaaaaaaaaaaaaaaaaaaaaaaaaaaaaaaaaaaaaaaaaaaaaa

SEQ ID NO: 25224 - RNA, 4105 nt, Artificial Sequence
  SARS-CoV-2/Wuhan/WIV05/2019__EPI_ISL_402128 spike protein mRNA gc (1-1273)(D614G)
aggagacccgugacccggaaguuguacggcuacgcgacuuucccucccacaaacccucgcgcccuuccuuuccuacuugggcccggcagaaagcuuaccauguucguguuccuggugcugcugccccuggugagcagccagugcgugaaccugaccacccggacccagcugcccccugccuacaccaacagcuucacccggggcguguacuaccccgacaagguguuccggagcagcgugcugcacagcacccaggaccuguuccugcccuucuucagcaacgugaccugguuccacgccauccacgugagcggcaccaacggcaccaagcgguucgacaacccagugcugcccuucaacgacggcguguacuucgccagcaccgagaagucaaacaucauccggggcuggaucuucggcaccacccuggacagcaagacacagagccugcugaucgugaacaacgccaccaacguggugaucaaggugugcgaguuucaguucugcaacgaccccuuccugggcguguacuaccacaagaacaacaagagcuggauggagagcgaguuccgggucuacagcagcgcuaacaauugcaccuucgaguacgugagccagcccuuccugauggaccucgagggcaagcagggcaacuucaagaaccugcgggaguucguguucaagaacaucgauggcuacuucaagaucuacagcaagcacacccccaucaaccuggugcgggaccugccccagggauucagcgcccuggagccucugguggaccugcccaucggcaucaacaucaccagguuccagacccugcuggcccugcaccggagcuaccugacccccggcgacagcagcagcggcuggaccgccggcgccgccgcauacuacgugggcuaccugcagccacggaccuuccugcugaaguacaacgagaacggcaccaucaccgacgccguggacugcgcccuggacccccugagcgagaccaagugcacccuaaagagcuucaccguggagaagggcaucuaccagaccagcaacuuccgggugcagcccacugagagcaucgugcgguuccccaacauuaccaaccugugucccuucggcgagguguucaacgccacccgguucgccagcguguacgccuggaaccggaagcggaucagcaacugcguggccgacuacagcgugcuguacaacagcgccagcuucagcaccuucaagugcuacggcgugagcccuaccaagcugaacgaccugugcuucaccaacguguacgcugacagcuucgugauccggggcgacgaggugcggcagaucgcccccggccagaccggcaagaucgccgacuacaacuacaagcugcccgacgacuucaccggcugcgugaucgccuggaacagcaacaaccuggacagcaaggugggcggcaacuacaacuaccuguaccggcuguuccguaagagcaaccugaagccauucgagcgggacaucagcaccgagaucuaccaggccggcagcacccccugcaacgguguggagggcuuuaacugcuacuucccccugcagagcuacggcuuccagcccaccaacggcgugggcuaccagcccuaccgggugguggugcugagcuucgagcugcugcacgcccccgccaccgugugcggcccuaaaaagagcaccaaccuggugaagaacaagugcgugaacuucaauuucaacggccugaccggcaccggcgugcugaccgagagcaacaagaaguuccugcccuuccagcaguucggccgggauaucgccgacaccaccgacgcagugcgggacccccagacccuggagauccuggacaucaccccaugcagcuucggcggcgugagcgucaucacccccggcacaaacaccagcaaccagguggccgugcuguaccagggagugaacugcaccgaggugcccguggccauccacgccgaccagcugacccccaccuggcggguguacagcaccggcagcaacguguuccagacccgggccggcugccugaucggcgccgagcacgugaacaacuccuacgagugcgacauccccaucggcgcuggcaucugcgccagcuaccagacccagaccaacagcccccggcgggcccggagcguggccagccagagcaucaucgccuacaccaugagcuuaggcgccgagaacagcguggccuacagcaacaacagcaucgcgaucccuaccaacuucaccaucagcgugaccaccgagauacugcccgugagcaugaccaagaccagcguggacuguaccauguacaucugcggcgacagcaccgagugcagcaaccugcugcugcaguacggcagcuucugcacccagcugaaccgggcccugaccggcaucgccguggagcaggacaagaacacccaagagguguucgcccaggugaagcagaucuacaagacucccccaaucaaggacuucggcggcuucaacuucagccagauccugcccgaccccagcaagcccagcaagcggagcuucaucgaggaccugcuguucaacaaggugacccuggccgacgccggcuucaucaagcaguacggcgacugccugggggauaucgccgcucgggaccugaucugcgcccagaaguucaacggccugaccgugcugcccccucugcugaccgacgagaugaucgcccaguacaccagcgcccugcuugccggcaccaucaccagcggcuggaccuucggcgccggcgcagcccugcagauccccuucgccaugcagauggccuaccgguucaacggcaucggcgugacccagaacgugcuguacgagaaccagaagcugaucgccaaccaguucaacagcgccaucggcaagauccaggacagccugagcagcaccgccagcgcccugggcaagcugcaggacguggugaaccagaacgcucaggcccugaacacccuggugaagcagcugagcagcaacuucggcgccaucagcucagugcugaaugacauccugagcaggcuggacaagguggaggccgaggugcagaucgaccggcugaucaccggccggcugcagagccugcagaccuacgugacccagcagcugauccgggccgccgagauccgggccagcgccaaccuggcagccaccaagaugagcgagugcgugcugggccagagcaagcggguggacuuuugcggcaagggcuaccaccugaugagcuucccccagagcgccccacacggcgugguguuccuccacgucacauacgugcccgcccaggagaagaacuucaccaccgcccccgccauuugccacgacggcaaggcucacuucccccgggagggaguguucgugagcaacggcacccacugguucgugacccagcggaacuucuacgagccccagaucaucaccaccgacaacaccuucgugagcggcaacugcgacguggugaucggcaucgugaacaacaccguguacgacccccugcagccugagcuggacagcuucaaggaggagcuggacaaguacuucaagaaccacaccagccccgacguggaucugggcgacaucagcggcaucaacgccagcguggugaacauccagaaggagaucgaccggcugaacgagguggccaagaaccugaacgagagccugaucgaccugcaggagcugggcaaguacgagcaguacaucaaguggcccugguacaucuggcugggcuucaucgccggccugaucgccaucgugauggugaccaucaugcugugcugcaugaccagcugcuguagcugccugaagggcugcugcagcugcggcagcugcugcaaguucgacgaggacgacagcgagccagugcugaagggcgugaagcugcacuacaccugaggacuaguguccaccugucccuccugggcugcuggauugucucguuuuccugccaaauaaacaggaucagcgcuuuacagaucuaaaaaaaaaaaaaaaaaaaaaaaaaaaaaaaaaaaaaaaaaaaaaaaaaaaaaaaaaaaaaaaaaaaaaaaaaaaaaaaaaaaaaaaaaaaaaaaaaaaa

SEQ ID NO: 25225 - RNA, 4105 nt, Artificial Sequence
  SARS-CoV-2/Wuhan/WIV05/2019__EPI_ISL_402128 spike protein mRNA gc (1-1273)(A222V_D614G)
aggagacccgugacccggaaguuguacggcuacgcgacuuucccucccacaaacccucgcgcccuuccuuuccuacuugggcccggcagaaagcuuaccauguucguguuccuggugcugcugccccuggugagcagccagugcgugaaccugaccacccggacccagcugcccccugccuacaccaacagcuucacccggggcguguacuaccccgacaagguguuccggagcagcgugcugcacagcacccaggaccuguuccugcccuucuucagcaacgugaccugguuccacgccauccacgugagcggcaccaacggcaccaagcgguucgacaacccagugcugcccuucaacgacggcguguacuucgccagcaccgagaagucaaacaucauccggggcuggaucuucggcaccacccuggacagcaagacacagagccugcugaucgugaacaacgccaccaacguggugaucaaggugugcgaguuucaguucugcaacgaccccuuccugggcguguacuaccacaagaacaacaagagcuggauggagagcgaguuccgggucuacagcagcgcuaacaauugcaccuucgaguacgugagccagcccuuccugauggaccucgagggcaagcagggcaacuucaagaaccugcgggaguucguguucaagaacaucgauggcuacuucaagaucuacagcaagcacacccccaucaaccuggugcgggaccugccccagggauucagcgugcuggagccucugguggaccugcccaucggcaucaacaucaccagguuccagacccugcuggcccugcaccggagcuaccugacccccggcgacagcagcagcggcuggaccgccggcgccgccgccuacuacgugggcuaccugcagccacggaccuuccugcugaaguacaacgagaacggcaccaucaccgacgcaguggacugcgcccuggacccccugagcgagaccaagugcacccuaaagagcuucaccguggagaagggcaucuaccagaccagcaacuuccgggugcagcccacugagagcaucgugcgguuccccaacauuaccaaccugugucccuucggcgagguguucaacgccacccgguucgccagcguguacgccuggaaccggaagcggaucagcaacugcguggccgacuacagcgugcuguacaacagcgccagcuucagcaccuucaagugcuacggcgugagcccuaccaagcugaacgaccugugcuucaccaacguguacgccgacagcuucgugauccggggcgacgaggugcggcagaucgcucccggccagaccggcaagaucgccgacuacaacuacaagcugcccgacgacuucaccggcugcgugaucgccuggaacagcaacaaccuggacagcaaggugggcggcaacuacaacuaccuguaccggcuguuccguaagagcaaccugaagccauucgagcgggacaucagcaccgagaucuaccaggccggcagcacccccugcaacgguguggagggcuuuaacugcuacuucccccugcagagcuacggcuuccagcccaccaacggcgugggcuaccagcccuaccgggugguggugcugagcuucgagcugcugcacgcccccgccaccgugugcggcccuaaaaagagcaccaaccuggugaagaacaagugcgugaacuucaauuucaacggccugaccggcaccggcgugcugaccgagagcaacaagaaguuccugcccuuccagcaguucggccgggauaucgccgacaccaccgacgccgugcgggacccccagacccuggagauccuggacaucaccccaugcagcuucggcggcgucagcgugaucacccccggcacaaacaccagcaaccagguggcagugcuguaccagggagugaacugcaccgaggugcccguggccauccacgccgaccagcugacccccaccuggcggguguacagcaccggcagcaacguguuccagacccgggccggcugccugaucggcgccgagcacgugaacaacuccuacgagugcgacauccccaucggcgccggcaucugcgcuagcuaccagacccagaccaacagcccccggcgggcccggagcguggccagccagagcaucaucgccuacaccaugagcuuaggcgccgagaacagcguggccuacagcaacaacagcaucgccaucccuaccaacuucaccaucagcgugaccaccgagauacugcccgugagcaugaccaagaccagcguggacuguaccauguacaucugcggcgacagcaccgagugcagcaaccugcugcugcaguacggcagcuucugcacccagcugaaccgggcgcugaccggcaucgccguggagcaggacaagaacacccaagagguguucgcccaggugaagcagaucuacaagacucccccaaucaaggacuucggcggcuucaacuucagccagauccugcccgaccccagcaagcccagcaagcggagcuucaucgaggaccugcuguucaacaaggugacccuggccgacgccggcuucaucaagcaguacggcgacugccugggggauaucgccgcccgggaccugaucugcgcucagaaguucaacggccugaccgugcugcccccucugcugaccgacgagaugaucgcccaguacaccagcgcccugcuugccggcaccaucaccagcggcuggaccuucggcgccggcgccgcacugcagauccccuucgccaugcagauggccuaccgguucaacggcaucggcgugacccagaacgugcuguacgagaaccagaagcugaucgccaaccaguucaacagcgccaucggcaagauccaggacagccugagcagcaccgccagcgcccugggcaagcugcaggacguggugaaccagaacgcccaggcucugaacacccuggugaagcagcugagcagcaacuucggcgccaucagcucagugcugaaugacauccugagcaggcuggacaagguggaggccgaggugcagaucgaccggcugaucaccggccggcugcagagccugcagaccuacgugacccagcagcugauccgggccgccgagauccgggccagcgccaaccuggccgcaaccaagaugagcgagugcgugcugggccagagcaagcggguggacuuuugcggcaagggcuaccaccugaugagcuucccccagagcgccccacacggcguggucuuccuccacgugacauacgugcccgcccaggagaagaacuucaccaccgcccccgccauuugccacgacggcaaggcccacuucccccgggagggaguguucgugagcaacggcacccacugguucgugacccagcggaacuucuacgagccccagaucaucaccaccgacaacaccuucgugagcggcaacugcgacguggugaucggcaucgugaacaacaccguguacgacccccugcagccugagcuggacagcuucaaggaggagcuggacaaguacuucaagaaccacaccagccccgacguggaucugggcgacaucagcggcaucaacgcuagcguggugaacauccagaaggagaucgaccggcugaacgagguggccaagaaccugaacgagagccugaucgaccugcaggagcugggcaaguacgagcaguacaucaaguggcccugguacaucuggcugggcuucaucgccggccugaucgccaucgugauggugaccaucaugcugugcugcaugaccagcugcuguagcugccugaagggcugcugcagcugcggcagcugcugcaaguucgacgaggacgacagcgagccagugcugaagggcgugaagcugcacuacaccugaggacuaguguccaccugucccuccugggcugcuggauugucucguuuuccugccaaauaaacaggaucagcgcuuuacagaucuaaaaaaaaaaaaaaaaaaaaaaaaaaaaaaaaaaaaaaaaaaaaaaaaaaaaaaaaaaaaaaaaaaaaaaaaaaaaaaaaaaaaaaaaaaaaaaaaaaaa

SEQ ID NO: 25226 - RNA, 4105 nt, Artificial Sequence
  SARS-CoV-2/Wuhan/WIV05/2019__EPI_ISL_402128 spike protein mRNA gc (1-1273)(N439K_D614G)
aggagacccgugacccggaaguuguacggcuacgcgacuuucccucccacaaacccucgcgcccuuccuuuccuacuugggcccggcagaaagcuuaccauguucguguuccuggugcugcugccccuggugagcagccagugcgugaaccugaccacccggacccagcugcccccugccuacaccaacagcuucacccggggcguguacuaccccgacaagguguuccggagcagcgugcugcacagcacccaggaccuguuccugcccuucuucagcaacgugaccugguuccacgccauccacgugagcggcaccaacggcaccaagcgguucgacaacccagugcugcccuucaacgacggcguguacuucgccagcaccgagaagucaaacaucauccggggcuggaucuucggcaccacccuggacagcaagacacagagccugcugaucgugaacaacgccaccaacguggugaucaaggugugcgaguuucaguucugcaacgaccccuuccugggcguguacuaccacaagaacaacaagagcuggauggagagcgaguuccgggucuacagcagcgcuaacaauugcaccuucgaguacgugagccagcccuuccugauggaccucgagggcaagcagggcaacuucaagaaccugcgggaguucguguucaagaacaucgauggcuacuucaagaucuacagcaagcacacccccaucaaccuggugcgggaccugccccagggauucagcgcccuggagccucugguggaccugcccaucggcaucaacaucaccagguuccagacccugcuggcccugcaccggagcuaccugacccccggcgacagcagcagcggcuggaccgccggcgccgccgcauacuacgugggcuaccugcagccacggaccuuccugcugaaguacaacgagaacggcaccaucaccgacgccguggacugcgcccuggacccccugagcgagaccaagugcacccuaaagagcuucaccguggagaagggcaucuaccagaccagcaacuuccgggugcagcccacugagagcaucgugcgguuccccaacauuaccaaccugugucccuucggcgagguguucaacgccacccgguucgccagcguguacgccuggaaccggaagcggaucagcaacugcguggccgacuacagcgugcuguacaacagcgccagcuucagcaccuucaagugcuacggcgugagcccuaccaagcugaacgaccugugcuucaccaacguguacgcugacagcuucgugauccggggcgacgaggugcggcagaucgcccccggccagaccggcaagaucgccgacuacaacuacaagcugcccgacgacuucaccggcugcgugaucgccuggaacagcaagaaccuggacagcaaggugggcggcaacuacaacuaccuguaccggcuguuccguaagagcaaccugaagccauucgagcgggacaucagcaccgagaucuaccaggccggcagcacccccugcaacgguguggagggcuuuaacugcuacuucccccugcagagcuacggcuuccagcccaccaacggcgugggcuaccagcccuaccgggugguggugcugagcuucgagcugcugcacgcccccgccaccgugugcggcccuaaaaagagcaccaaccuggugaagaacaagugcgugaacuucaacuucaauggccugaccggcaccggcgugcugaccgagagcaacaagaaguuccugcccuuccagcaguucggccgggauaucgccgacaccaccgacgcagugcgggacccccagacccuggagauccuggacaucaccccaugcagcuucggcggcgugagcgucaucacccccggcacaaacaccagcaaccagguggccgugcuguaccagggagugaacugcaccgaggugcccguggccauccacgccgaccagcugacccccaccuggcggguguacagcaccggcagcaacguguuccagacccgggccggcugccugaucggcgccgagcacgugaacaacuccuacgagugcgacauccccaucggcgcuggcaucugcgccagcuaccagacccagaccaacagcccccggcgggcccggagcguggccagccagagcaucaucgccuacaccaugagcuuaggcgccgagaacagcguggccuacagcaacaacagcaucgcgaucccuaccaacuucaccaucagcgugaccaccgagauacugcccgugagcaugaccaagaccagcguggacuguaccauguacaucugcggcgacagcaccgagugcagcaaccugcugcugcaguacggcagcuucugcacccagcugaaccgggcccugaccggcaucgccguggagcaggacaagaacacccaagagguguucgcccaggugaagcagaucuacaagacucccccaaucaaggacuucggcggcuucaacuucagccagauccugcccgaccccagcaagcccagcaagcggagcuucaucgaggaccugcuguucaacaaggugacccuggccgacgccggcuucaucaagcaguacggcgacugccugggggauaucgccgcucgggaccugaucugcgcccagaaguucaacggccugaccgugcugcccccucugcugaccgacgagaugaucgcccaguacaccagcgcccugcuugccggcaccaucaccagcggcuggaccuucggcgccggcgcagcccugcagauccccuucgccaugcagauggccuaccgguucaacggcaucggcgugacccagaacgugcuguacgagaaccagaagcugaucgccaaccaguucaacagcgccaucggcaagauccaggacagccugagcagcaccgccagcgcccugggcaagcugcaggacguggugaaccagaacgcucaggcccugaacacccuggugaagcagcugagcagcaacuucggcgccaucagcucagugcugaacgacauccugagcaggcuggacaagguggaggccgaggugcagaucgaccggcugaucaccggccggcugcagagccugcagaccuacgugacccagcagcugauccgggccgccgagauccgggccagcgccaaucuggcagccaccaagaugagcgagugcgugcugggccagagcaagcggguggacuuuugcggcaagggcuaccaccugaugagcuucccccagagcgccccacacggcgugguguuccuccacgucacauacgugcccgcccaggagaagaacuucaccaccgcccccgccauuugccacgacggcaaggcucacuucccccgggagggaguguucgugagcaacggcacccacugguucgugacccagcggaacuucuacgagccccagaucaucaccaccgacaacaccuucgugagcggcaacugcgacguggugaucggcaucgugaacaacaccguguacgacccccugcagccugagcuggacagcuucaaggaggagcuggacaaguacuucaagaaccacaccagccccgacguggaucugggcgacaucagcggcaucaacgccagcguggugaacauccagaaggagaucgaccggcugaacgagguggccaagaaccugaacgagagccugaucgaccugcaggagcugggcaaguacgagcaguacaucaaguggcccugguacaucuggcugggcuucaucgccggccugaucgccaucgugauggugaccaucaugcugugcugcaugaccagcugcuguagcugccugaagggcugcugcagcugcggcagcugcugcaaguucgacgaggacgacagcgagccagugcugaagggcgugaagcugcacuacaccugaggacuaguguccaccugucccuccugggcugcuggauugucucguuuuccugccaaauaaacaggaucagcgcuuuacagaucuaaaaaaaaaaaaaaaaaaaaaaaaaaaaaaaaaaaaaaaaaaaaaaaaaaaaaaaaaaaaaaaaaaaaaaaaaaaaaaaaaaaaaaaaaaaaaaaaaaaa

SEQ ID NO: 25227 - RNA, 4105 nt, Artificial Sequence
  SARS-CoV-2/Wuhan/WIV05/2019__EPI_ISL_402128 spike protein mRNA gc (1-1273)(S477N_D614G)
aggagacccgugacccggaaguuguacggcuacgcgacuuucccucccacaaacccucgcgcccuuccuuuccuacuugggcccggcagaaagcuuaccauguucguguuccuggugcugcugccccuggugagcagccagugcgugaaccugaccacccggacccagcugcccccugccuacaccaacagcuucacccggggcguguacuaccccgacaagguguuccggagcagcgugcugcacagcacccaggaccuguuccugcccuucuucagcaacgugaccugguuccacgccauccacgugagcggcaccaacggcaccaagcgguucgacaacccagugcugcccuucaacgacggcguguacuucgccagcaccgagaagucaaacaucauccggggcuggaucuucggcaccacccuggacagcaagacacagagccugcugaucgugaacaacgccaccaacguggugaucaaggugugcgaguuucaguucugcaacgaccccuuccugggcguguacuaccacaagaacaacaagagcuggauggagagcgaguuccgggucuacagcagcgcuaacaauugcaccuucgaguacgugagccagcccuuccugauggaccucgagggcaagcagggcaacuucaagaaccugcgggaguucguguucaagaacaucgauggcuacuucaagaucuacagcaagcacacccccaucaaccuggugcgggaccugccccagggauucagcgcccuggagccucugguggaccugcccaucggcaucaacaucaccagguuccagacccugcuggcccugcaccggagcuaccugacccccggcgacagcagcagcggcuggaccgccggcgccgccgcauacuacgugggcuaccugcagccacggaccuuccugcugaaguacaacgagaacggcaccaucaccgacgccguggacugcgcccuggacccccugagcgagaccaagugcacccuaaagagcuucaccguggagaagggcaucuaccagaccagcaacuuccgggugcagcccacugagagcaucgugcgguuccccaacauuaccaaccugugucccuucggcgagguguucaacgccacccgguucgccagcguguacgccuggaaccggaagcggaucagcaacugcguggccgacuacagcgugcuguacaacagcgccagcuucagcaccuucaagugcuacggcgugagcccuaccaagcugaacgaccugugcuucaccaacguguacgcugacagcuucgugauccggggcgacgaggugcggcagaucgcccccggccagaccggcaagaucgccgacuacaacuacaagcugcccgacgacuucaccggcugcgugaucgccuggaacagcaacaaccuggacagcaaggugggcggcaacuacaacuaccuguaccggcuguuccguaagagcaaccugaagccauucgagcgggacaucagcaccgagaucuaccaggccggcaacacccccugcaacgguguggagggcuuuaacugcuacuucccccugcagagcuacggcuuccagcccaccaacggcgugggcuaccagcccuaccgggugguggugcugagcuucgagcugcugcacgcccccgccaccgugugcggcccuaaaaagagcaccaaccuggugaagaacaagugcgugaauuucaacuucaacggccugaccggcaccggcgugcugaccgagagcaacaagaaguuccugcccuuccagcaguucggccgggauaucgccgacaccaccgacgcagugcgggacccccagacccuggagauccuggacaucaccccaugcagcuucggcggcgugagcgucaucacccccggcacaaacaccagcaaccagguggccgugcuguaccagggagugaacugcaccgaggugcccguggccauccacgccgaccagcugacccccaccuggcggguguacagcaccggcagcaacguguuccagacccgggccggcugccugaucggcgccgagcacgugaacaacagcuacgagugcgacauccccaucggcgcuggcaucugcgccuccuaccagacccagaccaacagcccccggcgggcccggagcguggccagccagagcaucaucgccuacaccaugagcuuaggcgccgagaacagcguggccuacagcaacaacagcaucgcgaucccuaccaacuucaccaucagcgugaccaccgagauacugcccgugagcaugaccaagaccagcguggacuguaccauguacaucugcggcgacagcaccgagugcagcaaccugcugcugcaguacggcagcuucugcacccagcugaaccgggcccugaccggcaucgccguggagcaggacaagaacacccaagagguguucgcccaggugaagcagaucuacaagacucccccaaucaaggacuucggcggcuucaacuucagccagauccugcccgaccccagcaagcccagcaagcggagcuucaucgaggaccugcuguucaacaaggugacccuggccgacgccggcuucaucaagcaguacggcgacugccugggggauaucgccgcucgggaccugaucugcgcccagaaguucaacggccugaccgugcugcccccucugcugaccgacgagaugaucgcccaguacaccagcgcccugcuugccggcaccaucaccagcggcuggaccuucggcgccggcgcagcccugcagauccccuucgccaugcagauggccuaccgguucaacggcaucggcgugacccagaacgugcuguacgagaaccagaagcugaucgccaaccaguucaacagcgccaucggcaagauccaggacagccugagcagcaccgccagcgcccugggcaagcugcaggacguggugaaccagaacgcucaggcccugaacacccuggugaagcagcugagcagcaauuucggcgccaucagcagcgugcugaacgacauccugucaaggcuggacaagguggaggccgaggugcagaucgaccggcugaucaccggccggcugcagagccugcagaccuacgugacccagcagcugauccgggccgccgagauccgggccagcgccaaccuggcagccaccaagaugagcgagugcgugcugggccagagcaagcggguggacuuuugcggcaagggcuaccaccugaugagcuucccccagagcgccccacacggcgugguguuccuccacgucacauacgugcccgcccaggagaagaacuucaccaccgcccccgccauuugccacgacggcaaggcucacuucccccgggagggaguguucgugagcaacggcacccacugguucgugacccagcggaacuucuacgagccccagaucaucaccaccgacaacaccuucgugagcggcaacugcgacguggugaucggcaucgugaacaacaccguguacgacccccugcagccugagcuggacagcuucaaggaggagcuggacaaguacuucaagaaccacaccagccccgacguggaucugggcgacaucagcggcaucaacgccagcguggugaacauccagaaggagaucgaccggcugaacgagguggccaagaaccugaacgagagccugaucgaccugcaggagcugggcaaguacgagcaguacaucaaguggcccugguacaucuggcugggcuucaucgccggccugaucgccaucgugauggugaccaucaugcugugcugcaugaccagcugcuguagcugccugaagggcugcugcagcugcggcagcugcugcaaguucgacgaggacgacagcgagccagugcugaagggcgugaagcugcacuacaccugaggacuaguguccaccugucccuccugggcugcuggauugucucguuuuccugccaaauaaacaggaucagcgcuuuacagaucuaaaaaaaaaaaaaaaaaaaaaaaaaaaaaaaaaaaaaaaaaaaaaaaaaaaaaaaaaaaaaaaaaaaaaaaaaaaaaaaaaaaaaaaaaaaaaaaaaaaa

SEQ ID NO: 25228 - RNA, 4105 nt, Artificial Sequence
  SARS-CoV-2/Wuhan/WIV05/2019__EPI_ISL_402128 spike protein mRNA gc (1-1273)(N501Y_D614G)
aggagacccgugacccggaaguuguacggcuacgcgacuuucccucccacaaacccucgcgcccuuccuuuccuacuugggcccggcagaaagcuuaccauguucguguuccuggugcugcugccccuggugagcagccagugcgugaaccugaccacccggacccagcugcccccugccuacaccaacagcuucacccggggcguguacuaccccgacaagguguuccggagcagcgugcugcacagcacccaggaccuguuccugcccuucuucagcaacgugaccugguuccacgccauccacgugagcggcaccaacggcaccaagcgguucgacaacccagugcugcccuucaacgacggcguguacuucgccagcaccgagaagucaaacaucauccggggcuggaucuucggcaccacccuggacagcaagacacagagccugcugaucgugaacaacgccaccaacguggugaucaaggugugcgaguuucaguucugcaacgaccccuuccugggcguguacuaccacaagaacaacaagagcuggauggagagcgaguuccgggucuacagcagcgcuaacaauugcaccuucgaguacgugagccagcccuuccugauggaccucgagggcaagcagggcaacuucaagaaccugcgggaguucguguucaagaacaucgauggcuacuucaagaucuacagcaagcacacccccaucaaccuggugcgggaccugccccagggauucagcgcccuggagccucugguggaccugcccaucggcaucaacaucaccagguuccagacccugcuggcccugcaccggagcuaccugacccccggcgacagcagcagcggcuggaccgccggcgccgccgcauacuacgugggcuaccugcagccacggaccuuccugcugaaguacaacgagaacggcaccaucaccgacgccguggacugcgcccuggacccccugagcgagaccaagugcacccuaaagagcuucaccguggagaagggcaucuaccagaccagcaacuuccgggugcagcccacugagagcaucgugcgguuccccaacauuaccaaccugugucccuucggcgagguguucaacgccacccgguucgccagcguguacgccuggaaccggaagcggaucagcaacugcguggccgacuacagcgugcuguacaacagcgccagcuucagcaccuucaagugcuacggcgugagcccuaccaagcugaacgaccugugcuucaccaacguguacgcugacagcuucgugauccggggcgacgaggugcggcagaucgcccccggccagaccggcaagaucgccgacuacaacuacaagcugcccgacgacuucaccggcugcgugaucgccuggaacagcaacaaccuggacagcaaggugggcggcaacuacaacuaccuguaccggcuguuccguaagagcaaccugaagccauucgagcgggacaucagcaccgagaucuaccaggccggcagcacccccugcaacgguguggagggcuuuaacugcuacuucccccugcagagcuacggcuuccagcccaccuacggcgugggcuaccagcccuaccgggugguggugcugagcuucgagcugcugcacgcccccgccaccgugugcggcccuaaaaagagcaccaaccuggugaagaacaagugcgugaacuucaacuucaauggccugaccggcaccggcgugcugaccgagagcaacaagaaguuccugcccuuccagcaguucggccgggauaucgccgacaccaccgacgcagugcgggacccccagacccuggagauccuggacaucaccccaugcagcuucggcggcgugagcgucaucacccccggcacaaacaccagcaaccagguggccgugcuguaccagggagugaacugcaccgaggugcccguggccauccacgccgaccagcugacccccaccuggcggguguacagcaccggcagcaacguguuccagacccgggccggcugccugaucggcgccgagcacgugaacaacuccuacgagugcgacauccccaucggcgcuggcaucugcgccagcuaccagacccagaccaacagcccccggcgggcccggagcguggccagccagagcaucaucgccuacaccaugagcuuaggcgccgagaacagcguggccuacagcaacaacagcaucgcgaucccuaccaacuucaccaucagcgugaccaccgagauacugcccgugagcaugaccaagaccagcguggacuguaccauguacaucugcggcgacagcaccgagugcagcaaccugcugcugcaguacggcagcuucugcacccagcugaaccgggcccugaccggcaucgccguggagcaggacaagaacacccaagagguguucgcccaggugaagcagaucuacaagacucccccaaucaaggacuucggcggcuucaacuucagccagauccugcccgaccccagcaagcccagcaagcggagcuucaucgaggaccugcuguucaacaaggugacccuggccgacgccggcuucaucaagcaguacggcgacugccugggggauaucgccgcucgggaccugaucugcgcccagaaguucaacggccugaccgugcugcccccucugcugaccgacgagaugaucgcccaguacaccagcgcccugcuugccggcaccaucaccagcggcuggaccuucggcgccggcgcagcccugcagauccccuucgccaugcagauggccuaccgguucaacggcaucggcgugacccagaacgugcuguacgagaaccagaagcugaucgccaaccaguucaacagcgccaucggcaagauccaggacagccugagcagcaccgccagcgcccugggcaagcugcaggacguggugaaccagaacgcucaggcccugaacacccuggugaagcagcugagcagcaacuucggcgccaucagcucagugcugaacgacauccugagcaggcuggacaagguggaggccgaggugcagaucgaccggcugaucaccggccggcugcagagccugcagaccuacgugacccagcagcugauccgggccgccgagauccgggccagcgccaaucuggcagccaccaagaugagcgagugcgugcugggccagagcaagcggguggacuuuugcggcaagggcuaccaccugaugagcuucccccagagcgccccacacggcgugguguuccuccacgucacauacgugcccgcccaggagaagaacuucaccaccgcccccgccauuugccacgacggcaaggcucacuucccccgggagggaguguucgugagcaacggcacccacugguucgugacccagcggaacuucuacgagccccagaucaucaccaccgacaacaccuucgugagcggcaacugcgacguggugaucggcaucgugaacaacaccguguacgacccccugcagccugagcuggacagcuucaaggaggagcuggacaaguacuucaagaaccacaccagccccgacguggaucugggcgacaucagcggcaucaacgccagcguggugaacauccagaaggagaucgaccggcugaacgagguggccaagaaccugaacgagagccugaucgaccugcaggagcugggcaaguacgagcaguacaucaaguggcccugguacaucuggcugggcuucaucgccggccugaucgccaucgugauggugaccaucaugcugugcugcaugaccagcugcuguagcugccugaagggcugcugcagcugcggcagcugcugcaaguucgacgaggacgacagcgagccagugcugaagggcgugaagcugcacuacaccugaggacuaguguccaccugucccuccugggcugcuggauugucucguuuuccugccaaauaaacaggaucagcgcuuuacagaucuaaaaaaaaaaaaaaaaaaaaaaaaaaaaaaaaaaaaaaaaaaaaaaaaaaaaaaaaaaaaaaaaaaaaaaaaaaaaaaaaaaaaaaaaaaaaaaaaaaaa

SEQ ID NO: 25229 - RNA, 4099 nt, Artificial Sequence
  SARS-CoV-2/Wuhan/WIV05/2019__EPI_ISL_402128 spike protein mRNA gc (1-1273)(H69del_V70del_D614G)
aggagacccgugacccggaaguuguacggcuacgcgacuuucccucccacaaacccucgcgcccuuccuuuccuacuugggcccggcagaaagcuuaccauguucguguuccuggugcugcugccccuggugagcagccagugcgugaaccugaccacccggacccagcugcccccugccuacaccaacagcuucacccggggcguguacuaccccgacaagguguuccggagcagcgugcugcacagcacccaggaccuguuccugcccuucuucagcaacgugaccugguuccacgccaucagcggcaccaacggcaccaagcgguucgacaacccagugcugcccuucaacgacggcguguacuucgccagcaccgagaagucaaacaucauccggggcuggaucuucggcaccacccuggacagcaagacacagagccugcugaucgugaacaacgccaccaacguggugaucaaggugugcgaguuucaguucugcaacgaccccuuccugggcguguacuaccacaagaacaacaagagcuggauggagagcgaguuccggguguacagcagcgcuaacaauugcaccuucgaguacgucagccagcccuuccugauggaccucgagggcaagcagggcaacuucaagaaccugcgggaguucguguucaagaacaucgauggcuacuucaagaucuacagcaagcacacccccaucaaccuggugcgggaccugccccagggauucagcgcccuggagccucugguggaccugcccaucggcaucaacaucaccagguuccagacccugcuggcccugcaccggagcuaccugacccccggcgacagcagcagcggcuggaccgccggcgccgccgcauacuacgugggcuaccugcagccacggaccuuccugcugaaguacaacgagaacggcaccaucaccgacgccguggacugcgcccuggacccccugagcgagaccaagugcacccuaaagagcuucaccguggagaagggcaucuaccagaccagcaacuuccgggugcagcccacugagagcaucgugcgguuccccaacauuaccaaccugugucccuucggcgagguguucaacgccacccgguucgccagcguguacgccuggaaccggaagcggaucagcaacugcguggccgacuacagcgugcuguacaacagcgccagcuucagcaccuucaagugcuacggcgugagcccuaccaagcugaacgaccugugcuucaccaacguguacgcugacagcuucgugauccggggcgacgaggugcggcagaucgcccccggccagaccggcaagaucgccgacuacaacuacaagcugcccgacgacuucaccggcugcgugaucgccuggaacagcaacaaccuggacagcaaggugggcggcaacuacaacuaccuguaccggcuguuccguaagagcaaccugaagccauucgagcgggacaucagcaccgagaucuaccaggccggcagcacccccugcaacgguguggagggcuuuaacugcuacuucccccugcagagcuacggcuuccagcccaccaacggcgugggcuaccagcccuaccgggugguggugcugagcuucgagcugcugcacgcccccgccaccgugugcggcccuaaaaagagcaccaaccuggugaagaacaagugcgugaacuucaauuucaacggccugaccggcaccggcgugcugaccgagagcaacaagaaguuccugcccuuccagcaguucggccgggauaucgccgacaccaccgacgcagugcgggacccccagacccuggagauccuggacaucaccccaugcagcuucggcggcgugagcgugaucacccccggcacaaacaccagcaaccaggucgccgugcuguaccagggagugaacugcaccgaggugcccguggccauccacgccgaccagcugacccccaccuggcggguguacagcaccggcagcaacguguuccagacccgggccggcugccugaucggcgccgagcacgugaacaacuccuacgagugcgacauccccaucggcgcuggcaucugcgccagcuaccagacccagaccaacagcccccggcgggcccggagcguggccagccagagcaucaucgccuacaccaugagcuuaggcgccgagaacagcguggccuacagcaacaacagcaucgcgaucccuaccaacuucaccaucagcgugaccaccgagauacugcccgugagcaugaccaagaccagcguggacuguaccauguacaucugcggcgacagcaccgagugcagcaaccugcugcugcaguacggcagcuucugcacccagcugaaccgggcccugaccggcaucgccguggagcaggacaagaacacccaagagguguucgcccaggugaagcagaucuacaagacucccccaaucaaggacuucggcggcuucaacuucagccagauccugcccgaccccagcaagcccagcaagcggagcuucaucgaggaccugcuguucaacaaggugacccuggccgacgccggcuucaucaagcaguacggcgacugccugggggauaucgccgcucgggaccugaucugcgcccagaaguucaacggccugaccgugcugcccccucugcugaccgacgagaugaucgcccaguacaccagcgcccugcuugccggcaccaucaccagcggcuggaccuucggcgccggcgcagcccugcagauccccuucgccaugcagauggccuaccgguucaacggcaucggcgugacccagaacgugcuguacgagaaccagaagcugaucgccaaccaguucaacagcgccaucggcaagauccaggacagccugagcagcaccgccagcgcccugggcaagcugcaggacguggugaaccagaacgcucaggcccugaacacccuggugaagcagcugagcagcaacuucggcgccaucagcucagugcugaaugacauccugagcaggcuggacaagguggaggccgaggugcagaucgaccggcugaucaccggccggcugcagagccugcagaccuacgugacccagcagcugauccgggccgccgagauccgggccagcgccaaccuggcagccaccaagaugagcgagugcgugcugggccagagcaagcggguggacuuuugcggcaagggcuaccaccugaugagcuucccccagagcgccccacacggcgugguguuccuccacgugacauacguccccgcccaggagaagaacuucaccaccgcccccgccauuugccacgacggcaaggcucacuucccccgggagggaguguucgugagcaacggcacccacugguucgugacccagcggaacuucuacgagccccagaucaucaccaccgacaacaccuucgugagcggcaacugcgacguggugaucggcaucgugaacaacaccguguacgacccccugcagccugagcuggacagcuucaaggaggagcuggacaaguacuucaagaaccacaccagccccgacguggaucugggcgacaucagcggcaucaacgccagcguggugaacauccagaaggagaucgaccggcugaacgagguggccaagaaccugaacgagagccugaucgaccugcaggagcugggcaaguacgagcaguacaucaaguggcccugguacaucuggcugggcuucaucgccggccugaucgccaucgugauggugaccaucaugcugugcugcaugaccagcugcuguagcugccugaagggcugcugcagcugcggcagcugcugcaaguucgacgaggacgacagcgagccagugcugaagggcgugaagcugcacuacaccugaggacuaguguccaccugucccuccugggcugcuggauugucucguuuuccugccaaauaaacaggaucagcgcuuuacagaucuaaaaaaaaaaaaaaaaaaaaaaaaaaaaaaaaaaaaaaaaaaaaaaaaaaaaaaaaaaaaaaaaaaaaaaaaaaaaaaaaaaaaaaaaaaaaaaaaaaaa

SEQ ID NO: 25230 - RNA, 4105 nt, Artificial Sequence
  SARS-CoV-2/Wuhan/WIV05/2019__EPI_ISL_402128 spike protein mRNA gc (1-1273)(Y453F_D614G)
aggagacccgugacccggaaguuguacggcuacgcgacuuucccucccacaaacccucgcgcccuuccuuuccuacuugggcccggcagaaagcuuaccauguucguguuccuggugcugcugccccuggugagcagccagugcgugaaccugaccacccggacccagcugcccccugccuacaccaacagcuucacccggggcguguacuaccccgacaagguguuccggagcagcgugcugcacagcacccaggaccuguuccugcccuucuucagcaacgugaccugguuccacgccauccacgugagcggcaccaacggcaccaagcgguucgacaacccagugcugcccuucaacgacggcguguacuucgccagcaccgagaagucaaacaucauccggggcuggaucuucggcaccacccuggacagcaagacacagagccugcugaucgugaacaacgccaccaacguggugaucaaggugugcgaguuucaguucugcaacgaccccuuccugggcguguacuaccacaagaacaacaagagcuggauggagagcgaguuccgggucuacagcagcgcuaacaauugcaccuucgaguacgugagccagcccuuccugauggaccucgagggcaagcagggcaacuucaagaaccugcgggaguucguguucaagaacaucgauggcuacuucaagaucuacagcaagcacacccccaucaaccuggugcgggaccugccccagggauucagcgcccuggagccucugguggaccugcccaucggcaucaacaucaccagguuccagacccugcuggcccugcaccggagcuaccugacccccggcgacagcagcagcggcuggaccgccggcgccgccgcauacuacgugggcuaccugcagccacggaccuuccugcugaaguacaacgagaacggcaccaucaccgacgccguggacugcgcccuggacccccugagcgagaccaagugcacccuaaagagcuucaccguggagaagggcaucuaccagaccagcaacuuccgggugcagcccacugagagcaucgugcgguuccccaacauuaccaaccugugucccuucggcgagguguucaacgccacccgguucgccagcguguacgccuggaaccggaagcggaucagcaacugcguggccgacuacagcgugcuguacaacagcgccagcuucagcaccuucaagugcuacggcgugagcccuaccaagcugaacgaccugugcuucaccaacguguacgcugacagcuucgugauccggggcgacgaggugcggcagaucgcccccggccagaccggcaagaucgccgacuacaacuacaagcugcccgacgacuucaccggcugcgugaucgccuggaacagcaacaaccuggacagcaaggugggcggcaacuacaacuaccuguuccggcuguuccguaagagcaaccugaagccauuugagcgggacaucagcaccgagaucuaccaggccggcagcacccccugcaacgguguggagggcuucaacugcuacuucccccugcagagcuacggcuuccagcccaccaacggcgugggcuaccagcccuaccgggugguggugcugagcuucgagcugcugcacgcccccgccaccgugugcggcccuaaaaagagcaccaaccuggugaagaacaagugcgugaacuucaauuucaacggccugaccggcaccggcgugcugaccgagagcaacaagaaguuccugcccuuccagcaguucggccgggauaucgccgacaccaccgacgcagugcgggacccccagacccuggagauccuggacaucaccccaugcagcuucggcggcgugagcgucaucacccccggcacaaacaccagcaaccagguggccgugcuguaccagggagugaacugcaccgaggugcccguggccauccacgccgaccagcugacccccaccuggcggguguacagcaccggcagcaacguguuccagacccgggccggcugccugaucggcgccgagcacgugaacaacuccuacgagugcgacauccccaucggcgcuggcaucugcgccagcuaccagacccagaccaacagcccccggcgggcccggagcguggccagccagagcaucaucgccuacaccaugagcuuaggcgccgagaacagcguggccuacagcaacaacagcaucgcgaucccuaccaacuucaccaucagcgugaccaccgagauacugcccgugagcaugaccaagaccagcguggacuguaccauguacaucugcggcgacagcaccgagugcagcaaccugcugcugcaguacggcagcuucugcacccagcugaaccgggcccugaccggcaucgccguggagcaggacaagaacacccaagagguguucgcccaggugaagcagaucuacaagacucccccaaucaaggacuucggcggcuucaacuucagccagauccugcccgaccccagcaagcccagcaagcggagcuucaucgaggaccugcuguucaacaaggugacccuggccgacgccggcuucaucaagcaguacggcgacugccugggggauaucgccgcucgggaccugaucugcgcccagaaguucaacggccugaccgugcugcccccucugcugaccgacgagaugaucgcccaguacaccagcgcccugcuugccggcaccaucaccagcggcuggaccuucggcgccggcgcagcccugcagauccccuucgccaugcagauggccuaccgguucaacggcaucggcgugacccagaacgugcuguacgagaaccagaagcugaucgccaaccaguucaacagcgccaucggcaagauccaggacagccugagcagcaccgccagcgcccugggcaagcugcaggacguggugaaccagaacgcucaggcccugaacacccuggugaagcagcugagcagcaacuuuggcgccaucagcucagugcugaaugacauccugagcaggcuggacaagguggaggccgaggugcagaucgaccggcugaucaccggccggcugcagagccugcagaccuacgugacccagcagcugauccgggccgccgagauccgggccagcgccaaccuggcagccaccaagaugagcgagugcgugcugggccagagcaagcggguggacuucugcggcaagggcuaccaccugaugagcuucccccagagcgccccacacggcgugguguuccuccacgucacauacgugcccgcccaggagaagaacuucaccaccgcccccgccauuugccacgacggcaaggcucacuucccccgggagggaguguucgugagcaacggcacccacugguucgugacccagcggaacuucuacgagccccagaucaucaccaccgacaacaccuucgugagcggcaacugcgacguggugaucggcaucgugaacaacaccguguacgacccccugcagccugagcuggacagcuucaaggaggagcuggacaaguacuucaagaaccacaccagccccgacguggaucugggcgacaucagcggcaucaacgccagcguggugaacauccagaaggagaucgaccggcugaacgagguggccaagaaccugaacgagagccugaucgaccugcaggagcugggcaaguacgagcaguacaucaaguggcccugguacaucuggcugggcuucaucgccggccugaucgccaucgugauggugaccaucaugcugugcugcaugaccagcugcuguagcugccugaagggcugcugcagcugcggcagcugcugcaaguucgacgaggacgacagcgagccagugcugaagggcgugaagcugcacuacaccugaggacuaguguccaccugucccuccugggcugcuggauugucucguuuuccugccaaauaaacaggaucagcgcuuuacagaucuaaaaaaaaaaaaaaaaaaaaaaaaaaaaaaaaaaaaaaaaaaaaaaaaaaaaaaaaaaaaaaaaaaaaaaaaaaaaaaaaaaaaaaaaaaaaaaaaaaaa

SEQ ID NO: 25231 - RNA, 4105 nt, Artificial Sequence
  SARS-CoV-2/Wuhan/WIV05/2019__EPI_ISL_402128 spike protein mRNA gc (1-1273)(D614G_I692V)
aggagacccgugacccggaaguuguacggcuacgcgacuuucccucccacaaacccucgcgcccuuccuuuccuacuugggcccggcagaaagcuuaccauguucguguuccuggugcugcugccccuggugagcagccagugcgugaaccugaccacccggacccagcugcccccugccuacaccaacagcuucacccggggcguguacuaccccgacaagguguuccggagcagcgugcugcacagcacccaggaccuguuccugcccuucuucagcaacgugaccugguuccacgccauccacgugagcggcaccaacggcaccaagcgguucgacaacccagugcugcccuucaacgacggcguguacuucgccagcaccgagaagucaaacaucauccggggcuggaucuucggcaccacccuggacagcaagacacagagccugcugaucgugaacaacgccaccaacguggugaucaaggugugcgaguuucaguucugcaacgaccccuuccugggcguguacuaccacaagaacaacaagagcuggauggagagcgaguuccgggucuacagcagcgcuaacaauugcaccuucgaguacgugagccagcccuuccugauggaccucgagggcaagcagggcaacuucaagaaccugcgggaguucguguucaagaacaucgauggcuacuucaagaucuacagcaagcacacccccaucaaccuggugcgggaccugccccagggauucagcgcccuggagccucugguggaccugcccaucggcaucaacaucaccagguuccagacccugcuggcccugcaccggagcuaccugacccccggcgacagcagcagcggcuggaccgccggcgccgccgcauacuacgugggcuaccugcagccacggaccuuccugcugaaguacaacgagaacggcaccaucaccgacgccguggacugcgcccuggacccccugagcgagaccaagugcacccuaaagagcuucaccguggagaagggcaucuaccagaccagcaacuuccgggugcagcccacugagagcaucgugcgguuccccaacauuaccaaccugugucccuucggcgagguguucaacgccacccgguucgccagcguguacgccuggaaccggaagcggaucagcaacugcguggccgacuacagcgugcuguacaacagcgccagcuucagcaccuucaagugcuacggcgugagcccuaccaagcugaacgaccugugcuucaccaacguguacgcugacagcuucgugauccggggcgacgaggugcggcagaucgcccccggccagaccggcaagaucgccgacuacaacuacaagcugcccgacgacuucaccggcugcgugaucgccuggaacagcaacaaccuggacagcaaggugggcggcaacuacaacuaccuguaccggcuguuccguaagagcaaccugaagccauucgagcgggacaucagcaccgagaucuaccaggccggcagcacccccugcaacgguguggagggcuuuaacugcuacuucccccugcagagcuacggcuuccagcccaccaacggcgugggcuaccagcccuaccgggugguggugcugagcuucgagcugcugcacgcccccgccaccgugugcggcccuaaaaagagcaccaaccuggugaagaacaagugcgugaacuucaauuucaacggccugaccggcaccggcgugcugaccgagagcaacaagaaguuccugcccuuccagcaguucggccgggauaucgccgacaccaccgacgcagugcgggacccccagacccuggagauccuggacaucaccccaugcagcuucggcggcgugagcgucaucacccccggcacaaacaccagcaaccagguggccgugcuguaccagggagugaacugcaccgaggugcccguggccauccacgccgaccagcugacccccaccuggcggguguacagcaccggcagcaacguguuccagacccgggccggcugccugaucggcgccgagcacgugaacaacuccuacgagugcgacauccccaucggcgcuggcaucugcgccagcuaccagacccagaccaacagcccccggcgggcccggagcguggccagccagagcgugaucgccuacaccaugagcuuaggcgccgagaacagcguggccuacagcaacaacagcaucgcgaucccuaccaacuucaccaucagcgugaccaccgagauccugcccgugagcaugaccaagaccagcguggacuguaccauguacauaugcggcgacagcaccgagugcagcaaccugcugcugcaguacggcagcuucugcacccagcugaaccgggcccugaccggcaucgccguggagcaggacaagaacacccaagagguguucgcccaggugaagcagaucuacaagacucccccaaucaaggacuucggcggcuucaacuucagccagauccugcccgaccccagcaagcccagcaagcggagcuucaucgaggaccugcuguucaacaaggugacccuggccgacgccggcuucaucaagcaguacggcgacugccugggggauaucgccgcucgggaccugaucugcgcccagaaguucaacggccugaccgugcugcccccucugcugaccgacgagaugaucgcccaguacaccagcgcccugcuugccggcaccaucaccagcggcuggaccuucggcgccggcgcagcccugcagauccccuucgccaugcagauggccuaccgguucaacggcaucggcgugacccagaacgugcuguacgagaaccagaagcugaucgccaaccaguucaacagcgccaucggcaagauccaggacagccugagcagcaccgccagcgcccugggcaagcugcaggacguggugaaccagaacgcucaggcccugaacacccuggugaagcagcugagcagcaacuucggcgccaucagcucagugcugaaugacauccugagcaggcuggacaagguggaggccgaggugcagaucgaccggcugaucaccggccggcugcagagccugcagaccuacgugacccagcagcugauccgggccgccgagauccgggccagcgccaaccuggcagccaccaagaugagcgagugcgugcugggccagagcaagcggguggacuuuugcggcaagggcuaccaccugaugagcuucccccagagcgccccacacggcguggucuuccuccacgugacauacgugcccgcccaggagaagaacuucaccaccgcccccgccaucugccacgacggcaaggcucacuucccccgggagggaguguucgugagcaacggcacccacugguucgugacccagcggaacuucuacgagccccagauuaucaccaccgacaacaccuucgugagcggcaacugcgacguggugaucggcaucgugaacaacaccguguacgacccccugcagccugagcuggacagcuucaaggaggagcuggacaaguacuucaagaaccacaccagccccgacguggaucugggcgacaucagcggcaucaacgccagcguggugaacauccagaaggagaucgaccggcugaacgagguggccaagaaccugaacgagagccugaucgaccugcaggagcugggcaaguacgagcaguacaucaaguggcccugguacaucuggcugggcuucaucgccggccugaucgccaucgugauggugaccaucaugcugugcugcaugaccagcugcuguagcugccugaagggcugcugcagcugcggcagcugcugcaaguucgacgaggacgacagcgagccagugcugaagggcgugaagcugcacuacaccugaggacuaguguccaccugucccuccugggcugcuggauugucucguuuuccugccaaauaaacaggaucagcgcuuuacagaucuaaaaaaaaaaaaaaaaaaaaaaaaaaaaaaaaaaaaaaaaaaaaaaaaaaaaaaaaaaaaaaaaaaaaaaaaaaaaaaaaaaaaaaaaaaaaaaaaaaaa

SEQ ID NO: 25232 - RNA, 4105 nt, Artificial Sequence
  SARS-CoV-2/Wuhan/WIV05/2019__EPI_ISL_402128 spike protein mRNA gc (1-1273)(D614G_M1229I)
aggagacccgugacccggaaguuguacggcuacgcgacuuucccucccacaaacccucgcgcccuuccuuuccuacuugggcccggcagaaagcuuaccauguucguguuccuggugcugcugccccuggugagcagccagugcgugaaccugaccacccggacccagcugcccccugccuacaccaacagcuucacccggggcguguacuaccccgacaagguguuccggagcagcgugcugcacagcacccaggaccuguuccugcccuucuucagcaacgugaccugguuccacgccauccacgugagcggcaccaacggcaccaagcgguucgacaacccagugcugcccuucaacgacggcguguacuucgccagcaccgagaagucaaacaucauccggggcuggaucuucggcaccacccuggacagcaagacacagagccugcugaucgugaacaacgccaccaacguggugaucaaggugugcgaguuucaguucugcaacgaccccuuccugggcguguacuaccacaagaacaacaagagcuggauggagagcgaguuccgggucuacagcagcgcuaacaauugcaccuucgaguacgugagccagcccuuccugauggaccucgagggcaagcagggcaacuucaagaaccugcgggaguucguguucaagaacaucgauggcuacuucaagaucuacagcaagcacacccccaucaaccuggugcgggaccugccccagggauucagcgcccuggagccucugguggaccugcccaucggcaucaacaucaccagguuccagacccugcuggcccugcaccggagcuaccugacccccggcgacagcagcagcggcuggaccgccggcgccgccgcauacuacgugggcuaccugcagccacggaccuuccugcugaaguacaacgagaacggcaccaucaccgacgccguggacugcgcccuggacccccugagcgagaccaagugcacccuaaagagcuucaccguggagaagggcaucuaccagaccagcaacuuccgggugcagcccacugagagcaucgugcgguuccccaacauuaccaaccugugucccuucggcgagguguucaacgccacccgguucgccagcguguacgccuggaaccggaagcggaucagcaacugcguggccgacuacagcgugcuguacaacagcgccagcuucagcaccuucaagugcuacggcgugagcccuaccaagcugaacgaccugugcuucaccaacguguacgcugacagcuucgugauccggggcgacgaggugcggcagaucgcccccggccagaccggcaagaucgccgacuacaacuacaagcugcccgacgacuucaccggcugcgugaucgccuggaacagcaacaaccuggacagcaaggugggcggcaacuacaacuaccuguaccggcuguuccguaagagcaaccugaagccauucgagcgggacaucagcaccgagaucuaccaggccggcagcacccccugcaacgguguggagggcuuuaacugcuacuucccccugcagagcuacggcuuccagcccaccaacggcgugggcuaccagcccuaccgggugguggugcugagcuucgagcugcugcacgcccccgccaccgugugcggcccuaaaaagagcaccaaccuggugaagaacaagugcgugaacuucaauuucaacggccugaccggcaccggcgugcugaccgagagcaacaagaaguuccugcccuuccagcaguucggccgggauaucgccgacaccaccgacgcagugcgggacccccagacccuggagauccuggacaucaccccaugcagcuucggcggcgugagcgucaucacccccggcacaaacaccagcaaccagguggccgugcuguaccagggagugaacugcaccgaggugcccguggccauccacgccgaccagcugacccccaccuggcggguguacagcaccggcagcaacguguuccagacccgggccggcugccugaucggcgccgagcacgugaacaacuccuacgagugcgacauccccaucggcgcuggcaucugcgccagcuaccagacccagaccaacagcccccggcgggcccggagcguggccagccagagcaucaucgccuacaccaugagcuuaggcgccgagaacagcguggccuacagcaacaacagcaucgcgaucccuaccaacuucaccaucagcgugaccaccgagauacugcccgugagcaugaccaagaccagcguggacuguaccauguacaucugcggcgacagcaccgagugcagcaaccugcugcugcaguacggcagcuucugcacccagcugaaccgggcccugaccggcaucgccguggagcaggacaagaacacccaagagguguucgcccaggugaagcagaucuacaagacucccccaaucaaggacuucggcggcuucaacuucagccagauccugcccgaccccagcaagcccagcaagcggagcuucaucgaggaccugcuguucaacaaggugacccuggccgacgccggcuucaucaagcaguacggcgacugccugggggauaucgccgcucgggaccugaucugcgcccagaaguucaacggccugaccgugcugcccccucugcugaccgacgagaugaucgcccaguacaccagcgcccugcuugccggcaccaucaccagcggcuggaccuucggcgccggcgcagcccugcagauccccuucgccaugcagauggccuaccgguucaacggcaucggcgugacccagaacgugcuguacgagaaccagaagcugaucgccaaccaguucaacagcgccaucggcaagauccaggacagccugagcagcaccgccagcgcccugggcaagcugcaggacguggugaaccagaacgcucaggcccugaacacccuggugaagcagcugagcagcaacuucggcgccaucagcucagugcugaaugacauccugagcaggcuggacaagguggaggccgaggugcagaucgaccggcugaucaccggccggcugcagagccugcagaccuacgugacccagcagcugauccgggccgccgagauccgggccagcgccaaccuggcagccaccaagaugagcgagugcgugcugggccagagcaagcggguggacuuuugcggcaagggcuaccaccugaugagcuucccccagagcgccccacacggcgugguguuccuccacgucacauacgugcccgcccaggagaagaacuucaccaccgcccccgccauuugccacgacggcaaggcucacuucccccgggagggaguguucgugagcaacggcacccacugguucgugacccagcggaacuucuacgagccccagaucaucaccaccgacaacaccuucgugagcggcaacugcgacguggugaucggcaucgugaacaacaccguguacgacccccugcagccugagcuggacagcuucaaggaggagcuggacaaguacuucaagaaccacaccagccccgacguggaucugggcgacaucagcggcaucaacgccagcguggugaacauccagaaggagaucgaccggcugaacgagguggccaagaaccugaacgagagccugaucgaccugcaggagcugggcaaguacgagcaguacaucaaguggcccugguacaucuggcugggcuucaucgccggccugaucgccaucgugaucgugaccaucaugcugugcugcaugaccagcugcuguagcugccugaagggcugcugcagcugcggcagcugcugcaaguucgacgaggacgacagcgagccagugcugaagggcgugaagcugcacuacaccugaggacuaguguccaccugucccuccugggcugcuggauugucucguuuuccugccaaauaaacaggaucagcgcuuuacagaucuaaaaaaaaaaaaaaaaaaaaaaaaaaaaaaaaaaaaaaaaaaaaaaaaaaaaaaaaaaaaaaaaaaaaaaaaaaaaaaaaaaaaaaaaaaaaaaaaaaaa

SEQ ID NO: 25233 - RNA, 4099 nt, Artificial Sequence
  SARS-CoV-2/Wuhan/WIV05/2019__EPI_ISL_402128 spike protein mRNA gc (1-1273)(H69del_V70del_A222V_Y453F_S477N_D614G_I692V)
aggagacccgugacccggaaguuguacggcuacgcgacuuucccucccacaaacccucgcgcccuuccuuuccuacuugggcccggcagaaagcuuaccauguucguguuccuggugcugcugccccuggugagcagccagugcgugaaccugaccacccggacccagcugcccccugccuacaccaacagcuucacccggggcguguacuaccccgacaagguguuccggagcagcgugcugcacagcacccaggaccuguuccugcccuucuucagcaacgugaccugguuccacgccaucagcggcaccaacggcaccaagcgguucgacaacccagugcugcccuucaacgacggcguguacuucgccagcaccgagaagucaaacaucauccggggcuggaucuucggcaccacccuggacagcaagacacagagccugcugaucgugaacaacgccaccaacguggugaucaaggugugcgaguuucaguucugcaacgaccccuuccugggcguguacuaccacaagaacaacaagagcuggauggagagcgaguuccggguguacagcagcgcuaacaauugcaccuucgaguacgucagccagcccuuccugauggaccucgagggcaagcagggcaacuucaagaaccugcgggaguucguguucaagaacaucgauggcuacuucaagaucuacagcaagcacacccccaucaaccuggugcgggaccugccccagggauucagcgugcuggagccucugguggaccugcccaucggcaucaacaucaccagguuccagacccugcuggcccugcaccggagcuaccugacccccggcgacagcagcagcggcuggaccgccggcgccgccgccuacuacgugggcuaccugcagccacggaccuuccugcugaaguacaacgagaacggcaccaucaccgacgcaguggacugcgcccuggacccccugagcgagaccaagugcacccuaaagagcuucaccguggagaagggcaucuaccagaccagcaacuuccgggugcagcccacugagagcaucgugcgguuccccaacauuaccaaccugugucccuucggcgagguguucaacgccacccgguucgccagcguguacgccuggaaccggaagcggaucagcaacugcguggccgacuacagcgugcuguacaacagcgccagcuucagcaccuucaagugcuacggcgugagcccuaccaagcugaacgaccugugcuucaccaacguguacgccgacagcuucgugauccggggcgacgaggugcggcagaucgcucccggccagaccggcaagaucgccgacuacaacuacaagcugcccgacgacuucaccggcugcgugaucgccuggaacagcaacaaccuggacagcaaggugggcggcaacuacaacuaccuguuccggcuguuccguaagagcaaccugaagccauuugagcgggacaucagcaccgagaucuaccaggccggcaacacccccugcaacgguguggagggcuucaacugcuacuucccccugcagagcuacggcuuccagcccaccaacggcgugggcuaccagcccuaccgggugguggugcugagcuucgagcugcugcacgcccccgccaccgugugcggcccuaaaaagagcaccaaccuggugaagaacaagugcgugaauuucaacuucaacggccugaccggcaccggcgugcugaccgagagcaacaagaaguuccugcccuuccagcaguucggccgggauaucgccgacaccaccgacgccgugcgggacccccagacccuggagauccuggacaucaccccaugcagcuucggcggcgugagcgucaucacccccggcacaaacaccagcaaccagguggcagugcuguaccagggagugaacugcaccgaggugcccguggccauccacgccgaccagcugacccccaccuggcggguguacagcaccggcagcaacguguuccagacccgggccggcugccugaucggcgccgagcacgugaacaacagcuacgagugcgacauccccaucggcgccggcaucugcgcuuccuaccagacccagaccaacagcccccggcgggcccggagcguggccagccagagcgugaucgccuacaccaugagcuuaggcgccgagaacagcguggccuacagcaacaacagcaucgccaucccuaccaacuucaccaucagcgugaccaccgagauccugcccgugagcaugaccaagaccagcguggacuguaccauguacauaugcggcgacagcaccgagugcagcaaccugcugcugcaguacggcagcuucugcacccagcugaaccgggcgcugaccggcaucgccguggagcaggacaagaacacccaagagguguucgcccaggugaagcagaucuacaagacucccccaaucaaggacuucggcggcuucaacuucagccagauccugcccgaccccagcaagcccagcaagcggagcuucaucgaggaccugcuguucaacaaggugacccuggccgacgccggcuucaucaagcaguacggcgacugccugggggauaucgccgcccgggaccugaucugcgcucagaaguucaacggccugaccgugcugcccccucugcugaccgacgagaugaucgcccaguacaccagcgcccugcuugccggcaccaucaccagcggcuggaccuucggcgccggcgccgcacugcagauccccuucgccaugcagauggccuaccgguucaacggcaucggcgugacccagaacgugcuguacgagaaccagaagcugaucgccaaccaguucaacagcgccaucggcaagauccaggacagccugagcagcaccgccagcgcccugggcaagcugcaggacguggugaaccagaacgcccaggcucugaacacccuggugaagcagcugagcagcaauuuuggcgccaucagcagcgugcugaacgacauccugucaaggcuggacaagguggaggccgaggugcagaucgaccggcugaucaccggccggcugcagagccugcagaccuacgugacccagcagcugauccgggccgccgagauccgggccagcgccaaccuggccgcaaccaagaugagcgagugcgugcugggccagagcaagcggguggacuucugcggcaagggcuaccaccugaugagcuucccccagagcgccccacacggcguggucuuccuccacgugacauacgugcccgcccaggagaagaacuucaccaccgcccccgccaucugccacgacggcaaggcccacuucccccgggagggaguguucgugagcaacggcacccacugguucgugacccagcggaacuucuacgagccccagauuaucaccaccgacaacaccuucgugagcggcaacugcgacguggugaucggcaucgugaacaacaccguguacgacccccugcagccugagcuggacagcuucaaggaggagcuggacaaguacuucaagaaccacaccagccccgacguggaucugggcgacaucagcggcaucaacgcuagcguggugaacauccagaaggagaucgaccggcugaacgagguggccaagaaccugaacgagagccugaucgaccugcaggagcugggcaaguacgagcaguacaucaaguggcccugguacaucuggcugggcuucaucgccggccugaucgccaucgugauggugaccaucaugcugugcugcaugaccagcugcuguagcugccugaagggcugcugcagcugcggcagcugcugcaaguucgacgaggacgacagcgagccagugcugaagggcgugaagcugcacuacaccugaggacuaguguccaccugucccuccugggcugcuggauugucucguuuuccugccaaauaaacaggaucagcgcuuuacagaucuaaaaaaaaaaaaaaaaaaaaaaaaaaaaaaaaaaaaaaaaaaaaaaaaaaaaaaaaaaaaaaaaaaaaaaaaaaaaaaaaaaaaaaaaaaaaaaaaaaaa

SEQ ID NO: 25234 - RNA, 4099 nt, Artificial Sequence
  SARS-CoV-2/Wuhan/WIV05/2019__EPI_ISL_402128 spike protein mRNA gc (1-1273)(H69del_V70del_Y453F_D614G_I692V_M1229I)
aggagacccgugacccggaaguuguacggcuacgcgacuuucccucccacaaacccucgcgcccuuccuuuccuacuugggcccggcagaaagcuuaccauguucguguuccuggugcugcugccccuggugagcagccagugcgugaaccugaccacccggacccagcugcccccugccuacaccaacagcuucacccggggcguguacuaccccgacaagguguuccggagcagcgugcugcacagcacccaggaccuguuccugcccuucuucagcaacgugaccugguuccacgccaucagcggcaccaacggcaccaagcgguucgacaacccagugcugcccuucaacgacggcguguacuucgccagcaccgagaagucaaacaucauccggggcuggaucuucggcaccacccuggacagcaagacacagagccugcugaucgugaacaacgccaccaacguggugaucaaggugugcgaguuucaguucugcaacgaccccuuccugggcguguacuaccacaagaacaacaagagcuggauggagagcgaguuccggguguacagcagcgcuaacaauugcaccuucgaguacgucagccagcccuuccugauggaccucgagggcaagcagggcaacuucaagaaccugcgggaguucguguucaagaacaucgauggcuacuucaagaucuacagcaagcacacccccaucaaccuggugcgggaccugccccagggauucagcgcccuggagccucugguggaccugcccaucggcaucaacaucaccagguuccagacccugcuggcccugcaccggagcuaccugacccccggcgacagcagcagcggcuggaccgccggcgccgccgcauacuacgugggcuaccugcagccacggaccuuccugcugaaguacaacgagaacggcaccaucaccgacgccguggacugcgcccuggacccccugagcgagaccaagugcacccuaaagagcuucaccguggagaagggcaucuaccagaccagcaacuuccgggugcagcccacugagagcaucgugcgguuccccaacauuaccaaccugugucccuucggcgagguguucaacgccacccgguucgccagcguguacgccuggaaccggaagcggaucagcaacugcguggccgacuacagcgugcuguacaacagcgccagcuucagcaccuucaagugcuacggcgugagcccuaccaagcugaacgaccugugcuucaccaacguguacgcugacagcuucgugauccggggcgacgaggugcggcagaucgcccccggccagaccggcaagaucgccgacuacaacuacaagcugcccgacgacuucaccggcugcgugaucgccuggaacagcaacaaccuggacagcaaggugggcggcaacuacaacuaccuguuccggcuguuccguaagagcaaccugaagccauuugagcgggacaucagcaccgagaucuaccaggccggcagcacccccugcaacgguguggagggcuucaacugcuacuucccccugcagagcuacggcuuccagcccaccaacggcgugggcuaccagcccuaccgggugguggugcugagcuucgagcugcugcacgcccccgccaccgugugcggcccuaaaaagagcaccaaccuggugaagaacaagugcgugaacuucaauuucaacggccugaccggcaccggcgugcugaccgagagcaacaagaaguuccugcccuuccagcaguucggccgggauaucgccgacaccaccgacgcagugcgggacccccagacccuggagauccuggacaucaccccaugcagcuucggcggcgugagcgugaucacccccggcacaaacaccagcaaccaggucgccgugcuguaccagggagugaacugcaccgaggugcccguggccauccacgccgaccagcugacccccaccuggcggguguacagcaccggcagcaacguguuccagacccgggccggcugccugaucggcgccgagcacgugaacaacuccuacgagugcgacauccccaucggcgcuggcaucugcgccagcuaccagacccagaccaacagcccccggcgggcccggagcguggccagccagagcgugaucgccuacaccaugagcuuaggcgccgagaacagcguggccuacagcaacaacagcaucgcgaucccuaccaacuucaccaucagcgugaccaccgagauccugcccgugagcaugaccaagaccagcguggacuguaccauguacauaugcggcgacagcaccgagugcagcaaccugcugcugcaguacggcagcuucugcacccagcugaaccgggcccugaccggcaucgccguggagcaggacaagaacacccaagagguguucgcccaggugaagcagaucuacaagacucccccaaucaaggacuucggcggcuucaacuucagccagauccugcccgaccccagcaagcccagcaagcggagcuucaucgaggaccugcuguucaacaaggugacccuggccgacgccggcuucaucaagcaguacggcgacugccugggggauaucgccgcucgggaccugaucugcgcccagaaguucaacggccugaccgugcugcccccucugcugaccgacgagaugaucgcccaguacaccagcgcccugcuugccggcaccaucaccagcggcuggaccuucggcgccggcgcagcccugcagauccccuucgccaugcagauggccuaccgguucaacggcaucggcgugacccagaacgugcuguacgagaaccagaagcugaucgccaaccaguucaacagcgccaucggcaagauccaggacagccugagcagcaccgccagcgcccugggcaagcugcaggacguggugaaccagaacgcucaggcccugaacacccuggugaagcagcugagcagcaacuuuggcgccaucagcucagugcugaaugacauccugagcaggcuggacaagguggaggccgaggugcagaucgaccggcugaucaccggccggcugcagagccugcagaccuacgugacccagcagcugauccgggccgccgagauccgggccagcgccaaccuggcagccaccaagaugagcgagugcgugcugggccagagcaagcggguggacuucugcggcaagggcuaccaccugaugagcuucccccagagcgccccacacggcgugguguuccuccacgucacauacgugcccgcccaggagaagaacuucaccaccgcccccgccaucugccacgacggcaaggcucacuucccccgggagggaguguucgugagcaacggcacccacugguucgugacccagcggaacuucuacgagccccagauuaucaccaccgacaacaccuucgugagcggcaacugcgacguggugaucggcaucgugaacaacaccguguacgacccccugcagccugagcuggacagcuucaaggaggagcuggacaaguacuucaagaaccacaccagccccgacguggaucugggcgacaucagcggcaucaacgccagcguggugaacauccagaaggagaucgaccggcugaacgagguggccaagaaccugaacgagagccugaucgaccugcaggagcugggcaaguacgagcaguacaucaaguggcccugguacaucuggcugggcuucaucgccggccugaucgccaucgugaucgugaccaucaugcugugcugcaugaccagcugcuguagcugccugaagggcugcugcagcugcggcagcugcugcaaguucgacgaggacgacagcgagccagugcugaagggcgugaagcugcacuacaccugaggacuaguguccaccugucccuccugggcugcuggauugucucguuuuccugccaaauaaacaggaucagcgcuuuacagaucuaaaaaaaaaaaaaaaaaaaaaaaaaaaaaaaaaaaaaaaaaaaaaaaaaaaaaaaaaaaaaaaaaaaaaaaaaaaaaaaaaaaaaaaaaaaaaaaaaaaa

SEQ ID NO: 25235 - RNA, 4096 nt, Artificial Sequence
  SARS-CoV-2/Wuhan/WIV05/2019__EPI_ISL_402128 spike protein mRNA gc (1-1273)(H69del_V70del_Y144del_N501Y_A570D_D614G_P681H_T716I_S982 A_D1118H)
aggagacccgugacccggaaguuguacggcuacgcgacuuucccucccacaaacccucgcgcccuuccuuuccuacuugggcccggcagaaagcuuaccauguucguguuccuggugcugcugccccuggugagcagccagugcgugaaccugaccacccggacccagcugcccccugccuacaccaacagcuucacccggggcguguacuaccccgacaagguguuccggagcagcgugcugcacagcacccaggaccuguuccugcccuucuucagcaacgugaccugguuccacgccaucagcggcaccaacggcaccaagcgguucgacaacccagugcugcccuucaacgacggcguguacuucgccagcaccgagaagucaaacaucauccggggcuggaucuucggcaccacccuggacagcaagacacagagccugcugaucgugaacaacgccaccaacguggugaucaaggugugcgaguuucaguucugcaacgaccccuuccugggcguguaccacaagaacaacaagagcuggauggagagcgaguuccggguguacagcagcgcuaacaauugcaccuucgaguacgucagccagcccuuccugauggaccucgagggcaagcagggcaacuucaagaaccugcgggaguucguguucaagaacaucgauggcuacuucaagaucuacagcaagcacacccccaucaaccuggugcgggaccugccccagggauucagcgcccuggagccucugguggaccugcccaucggcaucaacaucaccagguuccagacccugcuggcccugcaccggagcuaccugacccccggcgacagcagcagcggcuggaccgccggcgccgccgcauacuacgugggcuaccugcagccacggaccuuccugcugaaguacaacgagaacggcaccaucaccgacgccguggacugcgcccuggacccccugagcgagaccaagugcacccuaaagagcuucaccguggagaagggcaucuaccagaccagcaacuuccgggugcagcccacugagagcaucgugcgguuccccaacauuaccaaccugugucccuucggcgagguguucaacgccacccgguucgccagcguguacgccuggaaccggaagcggaucagcaacugcguggccgacuacagcgugcuguacaacagcgccagcuucagcaccuucaagugcuacggcgugagcccuaccaagcugaacgaccugugcuucaccaacguguacgcugacagcuucgugauccggggcgacgaggugcggcagaucgcccccggccagaccggcaagaucgccgacuacaacuacaagcugcccgacgacuucaccggcugcgugaucgccuggaacagcaacaaccuggacagcaaggugggcggcaacuacaacuaccuguaccggcuguuccguaagagcaaccugaagccauucgagcgggacaucagcaccgagaucuaccaggccggcagcacccccugcaacgguguggagggcuuuaacugcuacuucccccugcagagcuacggcuuccagcccaccuacggcgugggcuaccagcccuaccgggugguggugcugagcuucgagcugcugcacgcccccgccaccgugugcggcccuaaaaagagcaccaaccuggugaagaacaagugcgugaacuucaacuucaauggccugaccggcaccggcgugcugaccgagagcaacaagaaguuccugcccuuccagcaguucggccgggauaucgacgacaccaccgacgccgugcgggacccccagacccuggagauccuggacaucaccccaugcagcuucggcggcgugagcgugaucacccccggcacaaacaccagcaaccaggucgcagugcuguaccagggagugaacugcaccgaggugcccguggccauccacgccgaccagcugacccccaccuggcggguguacagcaccggcagcaacguguuccagacccgggccggcugccugaucggcgccgagcacgugaacaacuccuacgagugcgacauccccaucggcgccggcaucugcgcuagcuaccagacccagaccaacagccaccggcgggcccggagcguggccagccagagcaucaucgccuacaccaugagcuuaggcgccgagaacagcguggccuacagcaacaacagcaucgccauccccaucaacuucaccauaagcgugaccaccgagauccugccugugagcaugaccaagaccagcguggacuguaccauguacaucugcggcgacagcaccgagugcagcaaccugcugcugcaguacggcagcuucugcacccagcugaaccgggcgcugaccggcaucgccguggagcaggacaagaacacccaagagguguucgcccaggugaagcagaucuacaagaccccacccaucaaggacuucggcggcuucaacuucagccagauccugcccgaccccagcaagcccagcaagcggagcuucaucgaggaccugcuguucaacaaggugacucuggccgacgccggcuucaucaagcaguacggcgauugccugggggacaucgccgcccgggaccugaucugcgcucagaaguucaacggccugaccgugcugccuccccugcugaccgacgagaugaucgcccaguacaccagcgcccugcuugccggcaccaucaccagcggcuggaccuucggcgccggcgccgcacugcagauccccuucgccaugcagauggccuaccgguucaacggcaucggcgugacccagaacgugcuguacgagaaccagaagcugaucgccaaccaguucaacagcgccaucggcaagauccaggacagccugagcagcaccgccagcgcccugggcaagcugcaggacguggugaaccagaacgcccaggcucugaacacccuggugaagcagcugagcagcaacuucggcgccaucagcucagugcugaacgacauccuggccaggcuggacaagguggaggccgaggugcagaucgaccggcugaucaccggccggcugcagagccugcagaccuacgugacccagcagcugauccgggccgccgagauucgggccagcgccaaucuggcagccaccaagaugagcgagugcgugcugggccagagcaagcggguggacuuuugcggcaagggcuaccaccugaugagcuucccccagagcgcuccccacggcgugguguuccuccacgugaccuacgucccagcccaggagaagaacuucacaaccgcccccgccaucugccacgacggcaaggcccacuucccccgggagggaguguucgugagcaacggcacccacugguucgugacccagcggaacuucuacgagccccagaucaucaccacccacaacaccuucgugagcggcaacugcgacguggugaucggcaucgugaacaacaccguguacgacccccugcagcccgagcuggacagcuucaaggaggagcuggacaaguacuucaagaaccacaccagcccugacguggaucugggcgacaucagcggcaucaacgccagcguggugaacauccagaaggagaucgaccggcugaacgagguggccaagaaccugaacgagagccugaucgaccugcaggagcugggcaaguacgagcaguacaucaaguggcccugguacaucuggcugggcuucaucgccggccugaucgccaucgugauggugaccaucaugcugugcugcaugaccagcugcuguagcugccugaagggcugcugcagcugcggcagcugcugcaaguucgacgaggacgacagcgagcccgugcugaagggcgugaagcugcacuacaccugaggacuaguguccaccugucccuccugggcugcuggauugucucguuuuccugccaaauaaacaggaucagcgcuuuacagaucuaaaaaaaaaaaaaaaaaaaaaaaaaaaaaaaaaaaaaaaaaaaaaaaaaaaaaaaaaaaaaaaaaaaaaaaaaaaaaaaaaaaaaaaaaaaaaaaaaaaa

SEQ ID NO: 25236 - RNA, 4105 nt, Artificial Sequence
  SARS-CoV-2/Wuhan/WIV05/2019__EPI_ISL_402128 spike protein mRNA gc (1-1273)(K417N_E484K_N501Y_D614G)
aggagacccgugacccggaaguuguacggcuacgcgacuuucccucccacaaacccucgcgcccuuccuuuccuacuugggcccggcagaaagcuuaccauguucguguuccuggugcugcugccccuggugagcagccagugcgugaaccugaccacccggacccagcugcccccugccuacaccaacagcuucacccggggcguguacuaccccgacaagguguuccggagcagcgugcugcacagcacccaggaccuguuccugcccuucuucagcaacgugaccugguuccacgccauccacgugagcggcaccaacggcaccaagcgguucgacaacccagugcugcccuucaacgacggcguguacuucgccagcaccgagaagucaaacaucauccggggcuggaucuucggcaccacccuggacagcaagacacagagccugcugaucgugaacaacgccaccaacguggugaucaaggugugcgaguuucaguucugcaacgaccccuuccugggcguguacuaccacaagaacaacaagagcuggauggagagcgaguuccgggucuacagcagcgcuaacaauugcaccuucgaguacgugagccagcccuuccugauggaccucgagggcaagcagggcaacuucaagaaccugcgggaguucguguucaagaacaucgauggcuacuucaagaucuacagcaagcacacccccaucaaccuggugcgggaccugccccagggauucagcgcccuggagccucugguggaccugcccaucggcaucaacaucaccagguuccagacccugcuggcccugcaccggagcuaccugacccccggcgacagcagcagcggcuggaccgccggcgccgccgcauacuacgugggcuaccugcagccacggaccuuccugcugaaguacaacgagaacggcaccaucaccgacgccguggacugcgcccuggacccccugagcgagaccaagugcacccuaaagagcuucaccguggagaagggcaucuaccagaccagcaacuuccgggugcagcccacugagagcaucgugcgguuccccaacauuaccaaccugugucccuucggcgagguguucaacgccacccgguucgccagcguguacgccuggaaccggaagcggaucagcaacugcguggccgacuacagcgugcuguacaacagcgccagcuucagcaccuucaagugcuacggcgugagcccuaccaagcugaacgaccugugcuucaccaacguguacgcugacagcuucgugauccggggcgacgaggugcggcagaucgcccccggccagaccggcaacaucgccgacuacaacuacaagcugcccgacgacuucaccggcugcgugaucgccuggaacagcaacaaccuggacagcaaggugggcggcaacuacaacuaccuguaccggcuguuccguaagagcaaccugaagccauucgagcgggacaucagcaccgagaucuaccaggccggcagcacccccugcaacggugugaagggcuuuaacugcuacuucccccugcagagcuacggcuuccagcccaccuacggcgugggcuaccagcccuaccgggugguggugcugagcuucgagcugcugcacgcccccgccaccgugugcggcccuaaaaagagcaccaaccuggugaagaacaagugcgugaacuucaauuucaacggccugaccggcaccggcgugcugaccgagagcaacaagaaguuccugcccuuccagcaguucggccgggauaucgccgacaccaccgacgcagugcgggacccccagacccuggagauccuggacaucaccccaugcagcuucggcggcgugagcgucaucacccccggcacaaacaccagcaaccagguggccgugcuguaccagggagugaacugcaccgaggugcccguggccauccacgccgaccagcugacccccaccuggcggguguacagcaccggcagcaacguguuccagacccgggccggcugccugaucggcgccgagcacgugaacaacuccuacgagugcgacauccccaucggcgcuggcaucugcgccagcuaccagacccagaccaacagcccccggcgggcccggagcguggccagccagagcaucaucgccuacaccaugagcuuaggcgccgagaacagcguggccuacagcaacaacagcaucgcgaucccuaccaacuucaccaucagcgugaccaccgagauacugcccgugagcaugaccaagaccagcguggacuguaccauguacaucugcggcgacagcaccgagugcagcaaccugcugcugcaguacggcagcuucugcacccagcugaaccgggcccugaccggcaucgccguggagcaggacaagaacacccaagagguguucgcccaggugaagcagaucuacaagacucccccaaucaaggacuucggcggcuucaacuucagccagauccugcccgaccccagcaagcccagcaagcggagcuucaucgaggaccugcuguucaacaaggugacccuggccgacgccggcuucaucaagcaguacggcgacugccugggggauaucgccgcucgggaccugaucugcgcccagaaguucaacggccugaccgugcugcccccucugcugaccgacgagaugaucgcccaguacaccagcgcccugcuugccggcaccaucaccagcggcuggaccuucggcgccggcgcagcccugcagauccccuucgccaugcagauggccuaccgguucaacggcaucggcgugacccagaacgugcuguacgagaaccagaagcugaucgccaaccaguucaacagcgccaucggcaagauccaggacagccugagcagcaccgccagcgcccugggcaagcugcaggacguggugaaccagaacgcucaggcccugaacacccuggugaagcagcugagcagcaacuucggcgccaucagcucagugcugaaugacauccugagcaggcuggacaagguggaggccgaggugcagaucgaccggcugaucaccggccggcugcagagccugcagaccuacgugacccagcagcugauccgggccgccgagauccgggccagcgccaaccuggcagccaccaagaugagcgagugcgugcugggccagagcaagcggguggacuuuugcggcaagggcuaccaccugaugagcuucccccagagcgccccacacggcgugguguuccuccacgucacauacgugcccgcccaggagaagaacuucaccaccgcccccgccauuugccacgacggcaaggcucacuucccccgggagggaguguucgugagcaacggcacccacugguucgugacccagcggaacuucuacgagccccagaucaucaccaccgacaacaccuucgugagcggcaacugcgacguggugaucggcaucgugaacaacaccguguacgacccccugcagccugagcuggacagcuucaaggaggagcuggacaaguacuucaagaaccacaccagccccgacguggaucugggcgacaucagcggcaucaacgccagcguggugaacauccagaaggagaucgaccggcugaacgagguggccaagaaccugaacgagagccugaucgaccugcaggagcugggcaaguacgagcaguacaucaaguggcccugguacaucuggcugggcuucaucgccggccugaucgccaucgugauggugaccaucaugcugugcugcaugaccagcugcuguagcugccugaagggcugcugcagcugcggcagcugcugcaaguucgacgaggacgacagcgagccagugcugaagggcgugaagcugcacuacaccugaggacuaguguccaccugucccuccugggcugcuggauugucucguuuuccugccaaauaaacaggaucagcgcuuuacagaucuaaaaaaaaaaaaaaaaaaaaaaaaaaaaaaaaaaaaaaaaaaaaaaaaaaaaaaaaaaaaaaaaaaaaaaaaaaaaaaaaaaaaaaaaaaaaaaaaaaaa

SEQ ID NO: 25237 - RNA, 4096 nt, Artificial Sequence
  SARS-CoV-2/Wuhan/WIV05/2019__EPI_ISL_402128 spike protein mRNA gc (1-1273)(L18F_D80A_D215G_L242del_A243del_L244del_R246I_K417N_E484 K_N501Y_D614G_A701V)
aggagacccgugacccggaaguuguacggcuacgcgacuuucccucccacaaacccucgcgcccuuccuuuccuacuugggcccggcagaaagcuuaccauguucguguuccuggugcugcugccccuggugagcagccagugcgugaacuucaccacccggacccagcugcccccugccuacaccaacagcuucacccggggcguguacuaccccgacaagguguuccggagcagcgugcugcacagcacccaggaccuguuccugcccuucuucagcaacgugaccugguuccacgccauccacgugagcggcaccaacggcaccaagcgguucgccaacccagugcugcccuucaacgacggcguguacuucgccagcaccgagaagucaaacaucauccggggcuggaucuuuggcaccacccuggacagcaagacacagagccugcugaucgugaacaacgcuaccaacguggugaucaaggugugcgaguuccaguucugcaacgaccccuuccugggcguguacuaccacaagaacaacaagagcuggauggagagcgaguuccgggucuacagcagcgccaacaauugcaccuucgaguacgugagccagcccuuccugauggaccuggagggcaagcagggcaacuucaagaaccuccgggaguucguguucaagaacaucgacggcuacuucaagaucuacagcaagcacacccccaucaaccuggugcggggacugccccagggcuucagcgcccuggagccucugguggaucugcccaucggcaucaacaucaccagguuccagacccugcacaucagcuaccugacccccggcgacagcagcagcggcuggaccgccggcgccgccgcauacuacgugggcuaccugcagccacggaccuuccugcugaaguacaacgagaacggcaccaucaccgacgccguggacugcgcccuggacccccugagcgagaccaagugcacccuuaagagcuucaccguggagaagggcaucuaccagaccagcaacuuccgggugcagcccacugagagcauugugcgguuccccaacaucaccaaccugugucccuucggcgagguguucaacgccacccgguucgccagcguguacgccuggaaccggaagcggaucagcaacugcguggccgacuacagcgugcuguacaacagcgccagcuucagcaccuucaagugcuacggcgugagcccuaccaagcugaacgaccugugcuucaccaacguguacgcugacagcuucgugauccggggcgacgaggugcggcagaucgcccccggccagaccggcaacaucgccgacuacaacuacaagcugcccgacgacuucaccggcugcgugaucgccuggaacagcaacaaccuggacagcaaggugggcggcaacuacaacuaccuguaccggcuauuccguaagagcaaccugaagccauuugagcgggacaucagcaccgagaucuaccaggccgguagcacccccugcaacggcgugaagggcuucaacugcuacuucccccugcagagcuacggcuuccagcccaccuacggcgugggcuaccagcccuaccgggugguggugcugagcuucgagcugcugcacgcccccgccaccgugugcggcccuaaaaagagcaccaaccuggugaagaacaagugcgugaacuucaauuucaacggccugaccggcaccggcgugcugaccgagagcaacaagaaguuccugcccuuccagcaguucggccgggacaucgccgacaccaccgaugcagugcgggacccccagacccuggagauccuggacaucaccccaugcagcuucggcggcgugagcgucaucacccccggaacaaacaccagcaaccagguggccgugcuguaccagggcgugaacugcaccgaggugcccguggccauccacgccgaccagcugacccccaccuggcggguguacagcaccggcagcaacguguuccagacccgggccggcugccugaucggcgccgagcacgugaacaacuccuacgagugcgacauccccaucggcgcuggcaucugcgccagcuaccagacccagaccaacagcccccggcgggcccggagcguggccagccagagcaucaucgccuacaccaugagccugggcguggagaacagcguggccuacagcaacaacagcaucgccaucccuaccaacuucaccauaagcgugaccaccgagauccugcccgugagcaugaccaagaccagcguggacuguaccauguacaucugcggcgacagcaccgagugcagcaaccuguuacugcaguacggcagcuucugcacccagcugaaccgggcgcugaccggcaucgccguggagcaggacaagaacacccaagagguguucgcccaggugaagcagaucuacaagacucccccaaucaaggacuucggcggcuucaacuucagccagauccugcccgaccccagcaagcccagcaagcggagcuucaucgaggaccugcuguucaacaaggugacccuggccgacgccggcuucaucaagcaguacggggacugccugggcgacaucgccgcccgggaccugaucugcgcucagaaguucaacggccugaccgugcugcccccucugcugaccgaugagaugaucgcccaguacaccagcgcccugcuggccggcaccaucaccagcggcuggaccuucggcgccggcgccgcacugcagauccccuucgccaugcagauggccuaccgguucaacggcaucggcgugacccagaacgugcuguacgagaaccagaagcugaucgccaaccaguucaacagcgccaucggcaagauccaggacagccugagcagcaccgccagcgcccugggcaagcugcaggacguggugaaccagaacgcccaggcucugaacacccuggugaagcagcugagcagcaacuuuggcgccaucagcucagugcugaaugacauccugagccggcuggacaagguggaggccgaggugcagaucgacaggcugaucaccggccggcugcagagccugcagaccuacgugacccagcagcugauccgggccgccgagauucgggccagcgccaaccuggccgcaaccaagaugagcgagugcgugcugggccagagcaagcggguggacuucugcggcaagggcuaccaccugaugagcuucccccagagcgccccacacggcguggucuuccugcacgugacauacgugcccgcccaggagaagaacuucaccaccgcccccgccaucugccacgacggaaaggcccacuucccccgggagggcguguucgugagcaacggcacccacugguucgugacccagcggaacuucuacgagccccagaucaucaccaccgacaacaccuucgugagcggcaacugcgacguggugaucggcaucgugaacaacaccguguacgacccccugcagccugagcuggacagcuucaaggaggagcucgacaaguacuucaagaaccacaccagccccgacguggaccugggcgacaucagcggcaucaacgcuagcguggugaacauccagaaggagaucgaucggcugaacgagguggccaagaaccugaacgagagccugaucgaccugcaggagcugggcaaguacgagcaguacaucaaguggcccugguacaucuggcugggcuucaucgccggccugaucgccaucgugauggugaccaucaugcugugcugcaugaccagcugcuguagcugccugaagggcugcugcagcugcggcagcugcugcaaguucgacgaggacgacagcgagccagugcugaagggcgugaagcugcacuacaccugaggacuaguguccaccugucccuccugggcugcuggauugucucguuuuccugccaaauaaacaggaucagcgcuuuacagaucuaaaaaaaaaaaaaaaaaaaaaaaaaaaaaaaaaaaaaaaaaaaaaaaaaaaaaaaaaaaaaaaaaaaaaaaaaaaaaaaaaaaaaaaaaaaaaaaaaaaa

SEQ ID NO: 25238 - RNA, 4105 nt, Artificial Sequence
  SARS-CoV-2/Wuhan/WIV05/2019__EPI_ISL_402128 spike protein mRNA gc (1-1273)(E484K_D614G)
aggagacccgugacccggaaguuguacggcuacgcgacuuucccucccacaaacccucgcgcccuuccuuuccuacuugggcccggcagaaagcuuaccauguucguguuccuggugcugcugccccuggugagcagccagugcgugaaccugaccacccggacccagcugcccccugccuacaccaacagcuucacccggggcguguacuaccccgacaagguguuccggagcagcgugcugcacagcacccaggaccuguuccugcccuucuucagcaacgugaccugguuccacgccauccacgugagcggcaccaacggcaccaagcgguucgacaacccagugcugcccuucaacgacggcguguacuucgccagcaccgagaagucaaacaucauccggggcuggaucuucggcaccacccuggacagcaagacacagagccugcugaucgugaacaacgccaccaacguggugaucaaggugugcgaguuucaguucugcaacgaccccuuccugggcguguacuaccacaagaacaacaagagcuggauggagagcgaguuccgggucuacagcagcgcuaacaauugcaccuucgaguacgugagccagcccuuccugauggaccucgagggcaagcagggcaacuucaagaaccugcgggaguucguguucaagaacaucgauggcuacuucaagaucuacagcaagcacacccccaucaaccuggugcgggaccugccccagggauucagcgcccuggagccucugguggaccugcccaucggcaucaacaucaccagguuccagacccugcuggcccugcaccggagcuaccugacccccggcgacagcagcagcggcuggaccgccggcgccgccgcauacuacgugggcuaccugcagccacggaccuuccugcugaaguacaacgagaacggcaccaucaccgacgccguggacugcgcccuggacccccugagcgagaccaagugcacccuaaagagcuucaccguggagaagggcaucuaccagaccagcaacuuccgggugcagcccacugagagcaucgugcgguuccccaacauuaccaaccugugucccuucggcgagguguucaacgccacccgguucgccagcguguacgccuggaaccggaagcggaucagcaacugcguggccgacuacagcgugcuguacaacagcgccagcuucagcaccuucaagugcuacggcgugagcccuaccaagcugaacgaccugugcuucaccaacguguacgcugacagcuucgugauccggggcgacgaggugcggcagaucgcccccggccagaccggcaagaucgccgacuacaacuacaagcugcccgacgacuucaccggcugcgugaucgccuggaacagcaacaaccuggacagcaaggugggcggcaacuacaacuaccuguaccggcuguuccguaagagcaaccugaagccauucgagcgggacaucagcaccgagaucuaccaggccggcagcacccccugcaacggugugaagggcuuuaacugcuacuucccccugcagagcuacggcuuccagcccaccaacggcgugggcuaccagcccuaccgggugguggugcugagcuucgagcugcugcacgcccccgccaccgugugcggcccuaaaaagagcaccaaccuggugaagaacaagugcgugaacuucaauuucaacggccugaccggcaccggcgugcugaccgagagcaacaagaaguuccugcccuuccagcaguucggccgggauaucgccgacaccaccgacgcagugcgggacccccagacccuggagauccuggacaucaccccaugcagcuucggcggcgugagcgucaucacccccggcacaaacaccagcaaccagguggccgugcuguaccagggagugaacugcaccgaggugcccguggccauccacgccgaccagcugacccccaccuggcggguguacagcaccggcagcaacguguuccagacccgggccggcugccugaucggcgccgagcacgugaacaacuccuacgagugcgacauccccaucggcgcuggcaucugcgccagcuaccagacccagaccaacagcccccggcgggcccggagcguggccagccagagcaucaucgccuacaccaugagcuuaggcgccgagaacagcguggccuacagcaacaacagcaucgcgaucccuaccaacuucaccaucagcgugaccaccgagauacugcccgugagcaugaccaagaccagcguggacuguaccauguacaucugcggcgacagcaccgagugcagcaaccugcugcugcaguacggcagcuucugcacccagcugaaccgggcccugaccggcaucgccguggagcaggacaagaacacccaagagguguucgcccaggugaagcagaucuacaagacucccccaaucaaggacuucggcggcuucaacuucagccagauccugcccgaccccagcaagcccagcaagcggagcuucaucgaggaccugcuguucaacaaggugacccuggccgacgccggcuucaucaagcaguacggcgacugccugggggauaucgccgcucgggaccugaucugcgcccagaaguucaacggccugaccgugcugcccccucugcugaccgacgagaugaucgcccaguacaccagcgcccugcuugccggcaccaucaccagcggcuggaccuucggcgccggcgcagcccugcagauccccuucgccaugcagauggccuaccgguucaacggcaucggcgugacccagaacgugcuguacgagaaccagaagcugaucgccaaccaguucaacagcgccaucggcaagauccaggacagccugagcagcaccgccagcgcccugggcaagcugcaggacguggugaaccagaacgcucaggcccugaacacccuggugaagcagcugagcagcaacuucggcgccaucagcucagugcugaaugacauccugagcaggcuggacaagguggaggccgaggugcagaucgaccggcugaucaccggccggcugcagagccugcagaccuacgugacccagcagcugauccgggccgccgagauccgggccagcgccaaccuggcagccaccaagaugagcgagugcgugcugggccagagcaagcggguggacuuuugcggcaagggcuaccaccugaugagcuucccccagagcgccccacacggcgugguguuccuccacgucacauacgugcccgcccaggagaagaacuucaccaccgcccccgccauuugccacgacggcaaggcucacuucccccgggagggaguguucgugagcaacggcacccacugguucgugacccagcggaacuucuacgagccccagaucaucaccaccgacaacaccuucgugagcggcaacugcgacguggugaucggcaucgugaacaacaccguguacgacccccugcagccugagcuggacagcuucaaggaggagcuggacaaguacuucaagaaccacaccagccccgacguggaucugggcgacaucagcggcaucaacgccagcguggugaacauccagaaggagaucgaccggcugaacgagguggccaagaaccugaacgagagccugaucgaccugcaggagcugggcaaguacgagcaguacaucaaguggcccugguacaucuggcugggcuucaucgccggccugaucgccaucgugauggugaccaucaugcugugcugcaugaccagcugcuguagcugccugaagggcugcugcagcugcggcagcugcugcaaguucgacgaggacgacagcgagccagugcugaagggcgugaagcugcacuacaccugaggacuaguguccaccugucccuccugggcugcuggauugucucguuuuccugccaaauaaacaggaucagcgcuuuacagaucuaaaaaaaaaaaaaaaaaaaaaaaaaaaaaaaaaaaaaaaaaaaaaaaaaaaaaaaaaaaaaaaaaaaaaaaaaaaaaaaaaaaaaaaaaaaaaaaaaaaa

SEQ ID NO: 25239 - RNA, 4105 nt, Artificial Sequence
  SARS-CoV-2/Wuhan/WIV05/2019__EPI_ISL_402128 spike protein mRNA gc (1-1273)(L18F_T20N_P26S_D138Y_R190S_K417T_E484K_N501Y_D614G_H655Y _T1027I)
aggagacccgugacccggaaguuguacggcuacgcgacuuucccucccacaaacccucgcgcccuuccuuuccuacuugggcccggcagaaagcuuaccauguucguguuccuggugcugcugccccuggugagcagccagugcgugaacuucaccaaccggacccagcugcccagcgccuacaccaacagcuucacccggggcguguacuacccugacaagguguuccggagcagcgugcugcacagcacccaggaccuguuccugcccuucuucagcaacgugaccugguuccacgccauccacgugagcggcaccaacggcaccaagcgguucgacaaccccgugcugccauucaacgacggcguguacuucgccagcaccgagaagucaaacaucauccggggcuggaucuuuggcaccacccuggacagcaagacccagagccugcugaucgugaacaacgccacaaacguggugaucaaggugugcgaguuccaguucugcaacuaccccuuccugggcguguacuaccacaagaacaacaagagcuggauggagagcgaguuccgggucuacagcagcgcuaauaacugcaccuucgaguacgugagccagcccuuccugauggaccuggagggcaagcagggcaacuucaagaaccucagcgaguucguguucaagaacaucgacggcuacuucaagaucuacagcaagcacacccccaucaaccuggugcgggaucugccccagggauucagcgcccuggagccccugguggaccugccuaucggcaucaacaucacccgguuccagacccugcuggcccugcacaggagcuaccugacccccggcgacagcagcagcggcuggaccgccggcgccgccgcauacuacgugggcuaccugcagccccggaccuuccugcugaaguacaacgagaacggcaccaucaccgacgccguggacugcgcccuggacccacugagcgagaccaagugcacccuaaagagcuucaccguggagaagggcaucuaccagaccagcaacuuccgggugcagcccaccgagagcaucgugcgguuccccaacauuacuaaccugugucccuucggcgagguguucaacgccacccgguucgccagcguguacgccuggaaccggaagcggaucagcaacugcguggccgacuacagcgugcuguacaacagcgccagcuucagcaccuucaagugcuacggcgugagccccaccaagcugaacgaccugugcuucaccaacguguacgcugacagcuucgugauccggggcgacgaggugcggcagaucgccccuggccagaccggcaccaucgccgacuacaacuacaagcugcccgacgacuucaccggcugcgugaucgccuggaacagcaacaaccuggacagcaaggugggcggcaacuacaacuaccuguaccggcuguuccguaagagcaaccugaagcccuuugagcgggacaucagcaccgagaucuaccaggccggcagcaccccaugcaacggugugaagggcuucaacugcuacuucccccugcagagcuacggcuuccagcccaccuacggcgugggcuaccagcccuaccgggugguggugcugagcuucgagcugcugcacgcccccgccaccgugugcggccccaaaaagagcaccaaccuggugaagaacaagugcgugaacuucaauuucaacggccugaccggcaccggcgugcugaccgagagcaacaagaaguuccugccuuuccagcaguucggccgggacaucgccgauaccaccgacgcagugcgggacccccagacccuggagauccuggacaucacccccugcagcuucggcggcgugagcgucaucaccccaggcacaaacaccagcaaccagguggccgugcuguaccagggagugaacugcaccgaggugcccguggccauccacgccgaccagcugacccccaccuggcggguguacuccaccggcagcaacguguuccagacccgggccggcugccugaucggcgccgaguacgugaacaacagcuacgagugcgacauccccaucggcgcuggcaucugcgccagcuaccagacccagaccaacagcccccggcgggcccggagcguggccagccagagcaucaucgccuacaccaugagccugggcgccgagaacagcguggccuacagcaacaacagcaucgcgauccccaccaacuucaccaucagcgugaccaccgagauauuaccugugagcaugaccaagaccagcguggacuguaccauguacaucugcggcgacagcaccgagugcagcaaccugcugcugcaguacggcagcuucugcacccagcugaaccgggcccugaccggcaucgccguggagcaggacaagaacacccaagagguguucgcccaggugaagcagaucuacaagacuccacccaucaaggacuucggcggcuucaacuucagccagauccugcccgaccccagcaagcccagcaagcggagcuucaucgaggaccugcuguucaacaaggugacccuggccgacgccggcuucaucaagcaguacggcgacugccugggggacaucgccgcucgggaucugaucugcgcccagaaguucaacggccugaccgugcugccuccccugcugaccgacgagaugaucgcccaguacaccagcgcccugcuggccggcaccaucaccagcggcuggaccuucggcgccggcgcagcccuucagauccccuucgccaugcagauggccuaccgguucaacggcaucggcgugacccagaacgugcuguacgagaaccagaagcugaucgccaaccaguucaacagcgccaucggcaagauccaggacagccugagcagcaccgccagcgcccugggcaagcugcaggacguggugaaccagaacgcucaggcccugaacacccuggugaagcagcugagcucaaacuuuggcgccaucagcagcgugcugaaugacauccugagccggcuggacaagguggaggccgaggugcagaucgacaggcugaucaccggccggcugcagagccugcagaccuacgugacccagcagcugauccgggccgccgagauccgggccagcgccaaccuggcagccauuaagaugagcgagugcgugcugggccagagcaagcggguggacuucugcggcaagggcuaccaccugaugagcuucccccagagcgcuccccacggcgugguguuccugcacgucaccuacgugccagcccaggagaagaacuucacaaccgcccccgccaucugccacgacggcaaggcccacuucccccgggagggaguguucgugagcaacggcacccacugguucgugacccagcggaacuucuacgagccccagaucaucaccaccgacaacaccuucgugagcggcaacugcgacguggugaucggcaucgugaacaacaccguguacgacccccuccagcccgagcuggacagcuucaaggaggagcuggacaaguacuucaagaaccacaccagcccugacguggaccugggcgauaucagcggcaucaacgccagcguggugaacauccagaaggagaucgaccggcugaacgagguggccaagaaccugaacgagagccugaucgaccugcaggagcugggcaaguacgagcaguacaucaaguggcccugguacaucuggcugggcuucaucgccggccugaucgccaucgugauggugaccaucaugcugugcugcaugaccagcugcuguagcugccugaagggcugcugcagcugcggcagcugcugcaaguucgacgaggacgacagcgagcccgugcugaagggcgugaagcugcacuacaccugaggacuaguguccaccugucccuccugggcugcuggauugucucguuuuccugccaaauaaacaggaucagcgcuuuacagaucuaaaaaaaaaaaaaaaaaaaaaaaaaaaaaaaaaaaaaaaaaaaaaaaaaaaaaaaaaaaaaaaaaaaaaaaaaaaaaaaaaaaaaaaaaaaaaaaaaaaa

SEQ ID NO: 25240 - RNA, 4105 nt, Artificial Sequence
  SARS-CoV-2/Wuhan/WIV05/2019__EPI_ISL_402128 spike protein mRNA gc (1-1273)(S13I_W152C_L452R_D614G)
aggagacccgugacccggaaguuguacggcuacgcgacuuucccucccacaaacccucgcgcccuuccuuuccuacuugggcccggcagaaagcuuaccauguucguguuccuggugcugcugccccuggugagcauccagugcgugaaccugaccacccggacccagcugcccccugccuacaccaacagcuucacccggggcguguacuaccccgacaagguguuccggagcagcgugcugcacagcacccaggaccuguuccugcccuucuucagcaacgugaccugguuccacgccauccacgugagcggcaccaacggcaccaagcgguucgacaacccagugcugcccuucaacgacggcguguacuucgccagcaccgagaagucaaacaucauccggggcuggaucuucggcaccacccuggacagcaagacacagagccugcugaucgugaacaacgccaccaacguggugaucaaggugugcgaguuucaguucugcaacgaccccuuccugggcguguacuaccacaagaacaacaagagcugcauggagagcgaguuccgggucuacagcagcgcuaacaauugcaccuucgaguacgugagccagcccuuccugauggaccucgagggcaagcagggcaacuucaagaaccugcgggaguucguguucaagaacaucgauggcuacuucaagaucuacagcaagcacacccccaucaaccuggugcgggaccugccccagggauucagcgcccuggagccucugguggaccugcccaucggcaucaacaucaccagguuccagacccugcuggcccugcaccggagcuaccugacccccggcgacagcagcagcggcuggaccgccggcgccgccgcauacuacgugggcuaccugcagccacggaccuuccugcugaaguacaacgagaacggcaccaucaccgacgccguggacugcgcccuggacccccugagcgagaccaaguguacccuaaagagcuucaccguggagaagggcaucuaccagaccagcaacuuccgggugcagcccacugagagcauugugcgguuccccaacaucaccaaccugugccccuucggcgagguguucaacgccacccgguucgccagcguguacgccuggaaccggaagcggaucagcaacugcguggccgacuacagcgugcuguacaacagcgccagcuucagcaccuucaagugcuacggcgugagcccuaccaagcugaacgaccugugcuucaccaacguguacgcugacagcuucgugauccggggcgacgaggugcggcagaucgcccccggccagaccggcaagaucgccgacuacaacuacaagcugcccgacgacuucaccggcugcgugaucgccuggaacagcaacaaccuggacagcaaggugggcggcaacuacaacuaccgguaccggcuguuccguaagagcaaccugaagccauucgagcgggacaucagcaccgagaucuaccaggccggcagcacccccugcaacgguguggagggcuuuaacugcuacuucccccugcagagcuacggcuuccagcccaccaacggcgugggcuaccagcccuaccgggugguggugcugagcuucgagcugcugcacgcccccgccaccgugugcggcccuaaaaagagcaccaaccuggugaagaacaagugcgugaacuucaauuucaacggccugaccggcaccggcgugcugaccgagagcaacaagaaguuccugcccuuccagcaguucggccgggauaucgccgacaccaccgacgcagugcgggacccccagacccuggagauccuggacaucaccccaugcagcuucggcggcgugagcgucaucacccccggcacaaacaccagcaaccagguggccgugcuguaccagggagugaacugcaccgaggugcccguggccauccacgccgaccagcugacccccaccuggcggguguacagcaccggcagcaacguguuccagacccgggccggcugccugaucggcgccgagcacgugaacaacagcuacgagugcgacauccccaucggcgcuggcaucugugccuccuaccagacccagaccaacagcccccggcgggcccggagcguggccagccagagcaucaucgccuacaccaugagccugggcgccgagaacagcguggccuacagcaacaacagcaucgcgaucccuaccaacuucaccauaagcgugaccaccgagaucuuacccgugagcaugaccaagaccagcguggacugcaccauguacaucugcggcgacagcaccgagugcagcaaccugcugcugcaguacggcagcuucugcacccagcugaaccgggcccugaccggcaucgccguggagcaggacaagaacacccaagagguguucgcccaggugaagcagaucuacaagacucccccaaucaaggacuucggcggcuucaacuucagccagauccugcccgaccccagcaagcccagcaagcggagcuucaucgaggaccugcuguucaacaaggugacccuggccgacgccggcuucaucaagcaguacggcgacugccugggggauaucgccgcucgggaccugaucugcgcccagaaguucaacggccugaccgugcugcccccucugcugaccgacgagaugaucgcccaguacaccagcgcccugcuggccggcaccaucaccagcggcuggaccuucggcgccggcgcagcccuucagauccccuucgccaugcagauggccuacagguucaacggcaucggcgugacccagaacgugcuguacgagaaccagaagcugaucgccaaccaguucaacagcgccaucggcaagauccaggacagccugagcagcaccgccagcgcccugggcaagcugcaggacguggugaaccagaacgcucaggcccugaacacccuggugaagcagcugagcagcaacuucggcgccaucagcagcgugcugaaugacauccugucacggcuggacaagguggaggccgaggugcagaucgaccggcugaucaccggccggcugcagagccugcagaccuacgugacccagcagcugauccgggccgccgagauucgggccagcgccaaccuggcagccaccaagaugagcgagugcgugcugggccagagcaagcggguggacuuuugcggcaagggcuaccaccugaugagcuucccccagagcgccccacacggcgugguguuccugcacgucacauacgugcccgcccaggagaagaacuucaccaccgcccccgccaucugccacgacggcaaggcucacuucccccgggagggaguguucgugagcaacggcacccacugguucgugacccagcggaacuucuacgagccccagaucaucaccaccgacaacaccuucgugagcggcaacugcgacguggugaucggcaucgugaacaacaccguguacgacccccuccagccugagcuggacagcuucaaggaggagcuggacaaguacuucaagaaccacaccagccccgacguggaucugggcgacaucagcggcaucaacgccagcguggugaacauccagaaggagaucgaccggcugaacgagguggccaagaaccugaacgagagccugaucgaccugcaggagcugggcaaguacgagcaguacaucaaguggcccugguacaucuggcugggcuucaucgccggccugaucgccaucgugauggugaccaucaugcugugcugcaugaccagcuguugcagcugccugaagggcugcugcagcugcggcagcugcugcaaguucgacgaggacgacagcgagccagugcugaagggcgugaagcugcacuacaccugaggacuaguguccaccugucccuccugggcugcuggauugucucguuuuccugccaaauaaacaggaucagcgcuuuacagaucuaaaaaaaaaaaaaaaaaaaaaaaaaaaaaaaaaaaaaaaaaaaaaaaaaaaaaaaaaaaaaaaaaaaaaaaaaaaaaaaaaaaaaaaaaaaaaaaaaaaa

SEQ ID NO: 25241 - RNA, 4105 nt, Artificial Sequence
  SARS-CoV-2/Wuhan/WIV05/2019__EPI_ISL_402128 spike protein mRNA gc mod (1-1273)
aggagacccgugacccggaaguuguacggcuacgcgacuuucccucccacaaacccucgcgcccuuccuuuccuacuugggcccggcagaaagcuuaccauguucguguuucuggugcugcugccccugguguccagccagugugugaaccugaccaccagaacacagcugccuccagccuacaccaacagcuucaccagaggcguguacuaccccgacaagguguucagauccagcgugcugcacucuacccaggaccuguuccugccuuucuucagcaacgugaccugguuccacgccauccacguguccggcaccaauggcaccaagagauucgacaaccccgugcugcccuucaacgacgggguguacuuugccagcaccgagaaguccaacaucaucagaggcuggaucuucggcaccacacuggacagcaagacccagagccugcugaucgugaacaacgccaccaacguggucaucaaagugugcgaguuccaguucugcaacgaccccuuccugggcgucuacuaccacaagaacaacaagagcuggauggaaagcgaguuccggguguacagcagcgccaacaacugcaccuucgaguacgugucccagccuuuccugauggaccuggaaggcaagcagggcaacuucaagaaccugcgcgaguucguguucaagaacaucgacggcuacuucaaaaucuacagcaagcacaccccuaucaaccucgugcgggaucugccucagggcuucucugcucuggaaccccugguggaucugcccaucggcaucaacaucacccgguuucagacacugcuggcccugcacagaagcuaccugacaccuggcgauagcagcagcggauggacagcuggugccgccgcuuacuaugugggcuaccugcagccuagaaccuuccugcugaaguacaacgagaacggcaccaucaccgacgccguggauugugcucuggauccucugagcgagacaaagugcacccugaaguccuucaccguggaaaagggcaucuaccagaccagcaacuuccgggugcagcccaccgaauccaucgugcgguuccccaauaucaccaaucugugccccuucggcgagguguucaaugccaccagauucgccucuguguacgccuggaaccggaagcggaucagcaauugcguggccgacuacuccgugcuguacaacuccgccagcuucagcaccuucaagugcuacggcguguccccuaccaagcugaacgaccugugcuucacaaacguguacgccgacagcuucgugauccggggagaugaagugcggcagauugccccuggacagacaggcaagaucgccgacuacaacuacaagcugcccgacgacuucaccggcugugugauugccuggaacagcaacaaccuggacuccaaagucggcggcaacuacaauuaccuguaccggcuguuccggaaguccaaucugaagcccuucgagcgggacaucagcaccgaaaucuaucaggccggcagcaccccuugcaacggcguggaaggcuucaacugcuacuucccacugcaguccuacggcuuucagcccacaaauggcgugggcuaucagcccuacagagugguggugcugagcuucgaacugcugcaugcuccugccacagugugcggcccuaagaaaagcaccaaucucgugaagaacaaaugcgugaacuucaacuucaacggccugaccggcaccggcgugcugacagagagcaacaagaaguuccugccauuccagcaguuuggccgggauaucgccgauaccacagacgccguuagagauccccagacacuggaaauccuggacaucaccccaugcagcuucggcggagugucugugaucaccccuggcaccaacaccagcaaucagguggcagugcuguaccaggacgugaacuguaccgaagugcccguggccauucacgccgaucagcugacaccuacauggcggguguacuccaccggcagcaauguguuucagaccagagccggcugucugaucggagccgagcacgugaacaauagcuacgagugcgacauccccaucggcgcuggcaucugugccagcuaccagacacagacaaacagccccagacgggcuagaagcguggccagccagagcaucauugccuacacaaugucucugggcgccgagaacagcguggccuacuccaacaacucuaucgcuauccccaccaacuucaccaucagcgugaccaccgagauccugccuguguccaugaccaagaccagcguggacugcaccauguacaucugcggcgauuccaccgagugcuccaaccugcugcugcaguacggcagcuucugcacccagcugaauagagcccugacagggaucgccguggaacaggacaagaacacccaagagguguucgcccaagugaagcaaaucuacaagaccccuccuaucaaggacuucggcggcuucaauuucagccagauucugcccgauccuagcaagcccagcaagcggagcuucaucgaggaccugcuguucaacaaagugacacuggccgacgccggcuucaucaagcaguauggcgauugucugggcgacauugccgccagggaucugauuugcgcccagaaguuuaacggacugacagugcugccuccucugcugaccgaugagaugaucgcccaguacacaucugcccugcuggccggcacaaucacaagcggcuggacauuuggagcuggcgccgcucugcagauccccuuugcuaugcagauggccuaccgguucaacggcaucggagugacccagaaugugcuguacgagaaccagaagcugaucgccaaccaguucaacagcgccaucggcaagauccaggacagccugagcagcacagcaagcgcccugggaaagcugcaggacguggucaaccagaaugcccaggcacugaacacccuggucaagcagcuguccuccaacuucggcgccaucagcucugugcugaacgauauccugagcagacuggacaaggucgaggccgaggugcagaucgacagacugaucacaggcagacugcagagccuccagacauacgugacccagcagcugaucagagccgccgagauuagagccucugccaaucuggccgccaccaagaugucugagugugugcugggccagagcaagagaguggacuuuugcggcaagggcuaccaccugaugagcuucccucagucugccccucacggcgugguguuucugcacgugacauaugugcccgcucaagagaagaauuucaccaccgcuccagccaucugccacgacggcaaagcccacuuuccuagagaaggcguguucguguccaacggcacccauugguucgugacacagcggaacuucuacgagccccagaucaucaccaccgacaacaccuucgugucuggcaacugcgacguugugaucggcauugugaacaauaccguguacgacccucugcagcccgagcuggacagcuucaaagaggaacuggacaaguacuuuaagaaccacacaagccccgacguggaccugggcgauaucagcggaaucaaugccagcgucgugaacauccagaaagagaucgaccggcugaacgagguggccaagaaucugaacgagagccugaucgaccugcaagaacuggggaaguacgagcaguacaucaaguggcccugguacaucuggcugggcuuuaucgccggacugauugccaucgugauggucacaaucaugcuguguugcaugaccagcugcuguagcugccugaagggcuguuguagcuguggcagcugcugcaaguucgacgaggacgauucugagcccgugcugaagggcgugaaacugcacuacaccugaggacuaguguccaccugucccuccugggcugcuggauugucucguuuuccugccaaauaaacaggaucagcgcuuuacagaucuaaaaaaaaaaaaaaaaaaaaaaaaaaaaaaaaaaaaaaaaaaaaaaaaaaaaaaaaaaaaaaaaaaaaaaaaaaaaaaaaaaaaaaaaaaaaaaaaaaaa

SEQ ID NO: 25242 - RNA, 4105 nt, Artificial Sequence
  SARS-CoV-2/Wuhan/WIV05/2019__EPI_ISL_402128 spike protein mRNA gc mod (1-1273)(D614G)
aggagacccgugacccggaaguuguacggcuacgcgacuuucccucccacaaacccucgcgcccuuccuuuccuacuugggcccggcagaaagcuuaccauguucguguuucuggugcugcugccccugguguccagccagugugugaaccugaccaccagaacacagcugccuccagccuacaccaacagcuucaccagaggcguguacuaccccgacaagguguucagauccagcgugcugcacucuacccaggaccuguuccugccuuucuucagcaacgugaccugguuccacgccauccacguguccggcaccaauggcaccaagagauucgacaaccccgugcugcccuucaacgacgggguguacuuugccagcaccgagaaguccaacaucaucagaggcuggaucuucggcaccacacuggacagcaagacccagagccugcugaucgugaacaacgccaccaacguggucaucaaagugugcgaguuccaguucugcaacgaccccuuccugggcgucuacuaccacaagaacaacaagagcuggauggaaagcgaguuccggguguacagcagcgccaacaacugcaccuucgaguacgugucccagccuuuccugauggaccuggaaggcaagcagggcaacuucaagaaccugcgcgaguucguguucaagaacaucgacggcuacuucaaaaucuacagcaagcacaccccuaucaaccucgugcgggaucugccucagggcuucucugcucuggaaccccugguggaucugcccaucggcaucaacaucacccgguuucagacacugcuggcccugcacagaagcuaccugacaccuggcgauagcagcagcggauggacagcuggugccgccgcuuacuaugugggcuaccugcagccuagaaccuuccugcugaaguacaacgagaacggcaccaucaccgacgccguggauugugcucuggauccucugagcgagacaaagugcacccugaaguccuucaccguggaaaagggcaucuaccagaccagcaacuuccgggugcagcccaccgaauccaucgugcgguuccccaauaucaccaaucugugccccuucggcgagguguucaaugccaccagauucgccucuguguacgccuggaaccggaagcggaucagcaauugcguggccgacuacuccgugcuguacaacuccgccagcuucagcaccuucaagugcuacggcguguccccuaccaagcugaacgaccugugcuucacaaacguguacgccgacagcuucgugauccggggagaugaagugcggcagauugccccuggacagacaggcaagaucgccgacuacaacuacaagcugcccgacgacuucaccggcugugugauugccuggaacagcaacaaccuggacuccaaagucggcggcaacuacaauuaccuguaccggcuguuccggaaguccaaucugaagcccuucgagcgggacaucagcaccgaaaucuaucaggccggcagcaccccuugcaacggcguggaaggcuucaacugcuacuucccacugcaguccuacggcuuucagcccacaaauggcgugggcuaucagcccuacagagugguggugcugagcuucgaacugcugcaugcuccugccacagugugcggcccuaagaaaagcaccaaucucgugaagaacaaaugcgugaacuucaacuucaacggccugaccggcaccggcgugcugacagagagcaacaagaaguuccugccauuccagcaguuuggccgggauaucgccgauaccacagacgccguuagagauccccagacacuggaaauccuggacaucaccccaugcagcuucggcggagugucugugaucaccccuggcaccaacaccagcaaucagguggcagugcuguaccagggcgugaacuguaccgaagugcccguggccauucacgccgaucagcugacaccuacauggcggguguacuccaccggcagcaauguguuucagaccagagccggcugucugaucggagccgagcacgugaacaauagcuacgagugcgacauccccaucggcgcuggcaucugugccagcuaccagacacagacaaacagccccagacgggcuagaagcguggccagccagagcaucauugccuacacaaugucucugggcgccgagaacagcguggccuacuccaacaacucuaucgcuauccccaccaacuucaccaucagcgugaccaccgagauccugccuguguccaugaccaagaccagcguggacugcaccauguacaucugcggcgauuccaccgagugcuccaaccugcugcugcaguacggcagcuucugcacccagcugaauagagcccugacagggaucgccguggaacaggacaagaacacccaagagguguucgcccaagugaagcaaaucuacaagaccccuccuaucaaggacuucggcggcuucaauuucagccagauucugcccgauccuagcaagcccagcaagcggagcuucaucgaggaccugcuguucaacaaagugacacuggccgacgccggcuucaucaagcaguauggcgauugucugggcgacauugccgccagggaucugauuugcgcccagaaguuuaacggacugacagugcugccuccucugcugaccgaugagaugaucgcccaguacacaucugcccugcuggccggcacaaucacaagcggcuggacauuuggagcuggcgccgcucugcagauccccuuugcuaugcagauggccuaccgguucaacggcaucggagugacccagaaugugcuguacgagaaccagaagcugaucgccaaccaguucaacagcgccaucggcaagauccaggacagccugagcagcacagcaagcgcccugggaaagcugcaggacguggucaaccagaaugcccaggcacugaacacccuggucaagcagcuguccuccaacuucggcgccaucagcucugugcugaacgauauccugagcagacuggacaaggucgaggccgaggugcagaucgacagacugaucacaggcagacugcagagccuccagacauacgugacccagcagcugaucagagccgccgagauuagagccucugccaaucuggccgccaccaagaugucugagugugugcugggccagagcaagagaguggacuuuugcggcaagggcuaccaccugaugagcuucccucagucugccccucacggcgugguguuucugcacgugacauaugugcccgcucaagagaagaauuucaccaccgcuccagccaucugccacgacggcaaagcccacuuuccuagagaaggcguguucguguccaacggcacccauugguucgugacacagcggaacuucuacgagccccagaucaucaccaccgacaacaccuucgugucuggcaacugcgacguugugaucggcauugugaacaauaccguguacgacccucugcagcccgagcuggacagcuucaaagaggaacuggacaaguacuuuaagaaccacacaagccccgacguggaccugggcgauaucagcggaaucaaugccagcgucgugaacauccagaaagagaucgaccggcugaacgagguggccaagaaucugaacgagagccugaucgaccugcaagaacuggggaaguacgagcaguacaucaaguggcccugguacaucuggcugggcuuuaucgccggacugauugccaucgugauggucacaaucaugcuguguugcaugaccagcugcuguagcugccugaagggcuguuguagcuguggcagcugcugcaaguucgacgaggacgauucugagcccgugcugaagggcgugaaacugcacuacaccugaggacuaguguccaccugucccuccugggcugcuggauugucucguuuuccugccaaauaaacaggaucagcgcuuuacagaucuaaaaaaaaaaaaaaaaaaaaaaaaaaaaaaaaaaaaaaaaaaaaaaaaaaaaaaaaaaaaaaaaaaaaaaaaaaaaaaaaaaaaaaaaaaaaaaaaaaaa

SEQ ID NO: 25243 - RNA, 4105 nt, Artificial Sequence
  SARS-CoV-2/Wuhan/WIV05/2019__EPI_ISL_402128 spike protein mRNA gc mod (1-1273)(A222V_D614G)
aggagacccgugacccggaaguuguacggcuacgcgacuuucccucccacaaacccucgcgcccuuccuuuccuacuugggcccggcagaaagcuuaccauguucguguuucuggugcugcugccccugguguccagccagugugugaaccugaccaccagaacacagcugccuccagccuacaccaacagcuucaccagaggcguguacuaccccgacaagguguucagauccagcgugcugcacucuacccaggaccuguuccugccuuucuucagcaacgugaccugguuccacgccauccacguguccggcaccaauggcaccaagagauucgacaaccccgugcugcccuucaacgacgggguguacuuugccagcaccgagaaguccaacaucaucagaggcuggaucuucggcaccacacuggacagcaagacccagagccugcugaucgugaacaacgccaccaacguggucaucaaagugugcgaguuccaguucugcaacgaccccuuccugggcgucuacuaccacaagaacaacaagagcuggauggaaagcgaguuccggguguacagcagcgccaacaacugcaccuucgaguacgugucccagccuuuccugauggaccuggaaggcaagcagggcaacuucaagaaccugcgcgaguucguguucaagaacaucgacggcuacuucaaaaucuacagcaagcacaccccuaucaaccucgugcgggaucugccucagggcuucucugugcuggaaccccugguggaucugcccaucggcaucaacaucacccgguuucagacacugcuggcccugcacagaagcuaccugacaccuggcgauagcagcagcggauggacagcuggugccgccgcuuacuaugugggcuaccugcagccuagaaccuuccugcugaaguacaacgagaacggcaccaucaccgacgccguggauugugcucuggauccucugagcgagacaaagugcacccugaaguccuucaccguggaaaagggcaucuaccagaccagcaacuuccgggugcagcccaccgaauccaucgugcgguuccccaauaucaccaaucugugccccuucggcgagguguucaaugccaccagauucgccucuguguacgccuggaaccggaagcggaucagcaauugcguggccgacuacuccgugcuguacaacuccgccagcuucagcaccuucaagugcuacggcguguccccuaccaagcugaacgaccugugcuucacaaacguguacgccgacagcuucgugauccggggagaugaagugcggcagauugccccuggacagacaggcaagaucgccgacuacaacuacaagcugcccgacgacuucaccggcugugugauugccuggaacagcaacaaccuggacuccaaagucggcggcaacuacaauuaccuguaccggcuguuccggaaguccaaucugaagcccuucgagcgggacaucagcaccgaaaucuaucaggccggcagcaccccuugcaacggcguggaaggcuucaacugcuacuucccacugcaguccuacggcuuucagcccacaaauggcgugggcuaucagcccuacagagugguggugcugagcuucgaacugcugcaugcuccugccacagugugcggcccuaagaaaagcaccaaucucgugaagaacaaaugcgugaacuucaacuucaacggccugaccggcaccggcgugcugacagagagcaacaagaaguuccugccauuccagcaguuuggccgggauaucgccgauaccacagacgccguuagagauccccagacacuggaaauccuggacaucaccccaugcagcuucggcggagugucugugaucaccccuggcaccaacaccagcaaucagguggcagugcuguaccagggcgugaacuguaccgaagugcccguggccauucacgccgaucagcugacaccuacauggcggguguacuccaccggcagcaauguguuucagaccagagccggcugucugaucggagccgagcacgugaacaauagcuacgagugcgacauccccaucggcgcuggcaucugugccagcuaccagacacagacaaacagccccagacgggcuagaagcguggccagccagagcaucauugccuacacaaugucucugggcgccgagaacagcguggccuacuccaacaacucuaucgcuauccccaccaacuucaccaucagcgugaccaccgagauccugccuguguccaugaccaagaccagcguggacugcaccauguacaucugcggcgauuccaccgagugcuccaaccugcugcugcaguacggcagcuucugcacccagcugaauagagcccugacagggaucgccguggaacaggacaagaacacccaagagguguucgcccaagugaagcaaaucuacaagaccccuccuaucaaggacuucggcggcuucaauuucagccagauucugcccgauccuagcaagcccagcaagcggagcuucaucgaggaccugcuguucaacaaagugacacuggccgacgccggcuucaucaagcaguauggcgauugucugggcgacauugccgccagggaucugauuugcgcccagaaguuuaacggacugacagugcugccuccucugcugaccgaugagaugaucgcccaguacacaucugcccugcuggccggcacaaucacaagcggcuggacauuuggagcuggcgccgcucugcagauccccuuugcuaugcagauggccuaccgguucaacggcaucggagugacccagaaugugcuguacgagaaccagaagcugaucgccaaccaguucaacagcgccaucggcaagauccaggacagccugagcagcacagcaagcgcccugggaaagcugcaggacguggucaaccagaaugcccaggcacugaacacccuggucaagcagcuguccuccaacuucggcgccaucagcucugugcugaacgauauccugagcagacuggacaaggucgaggccgaggugcagaucgacagacugaucacaggcagacugcagagccuccagacauacgugacccagcagcugaucagagccgccgagauuagagccucugccaaucuggccgccaccaagaugucugagugugugcugggccagagcaagagaguggacuuuugcggcaagggcuaccaccugaugagcuucccucagucugccccucacggcgugguguuucugcacgugacauaugugcccgcucaagagaagaauuucaccaccgcuccagccaucugccacgacggcaaagcccacuuuccuagagaaggcguguucguguccaacggcacccauugguucgugacacagcggaacuucuacgagccccagaucaucaccaccgacaacaccuucgugucuggcaacugcgacguugugaucggcauugugaacaauaccguguacgacccucugcagcccgagcuggacagcuucaaagaggaacuggacaaguacuuuaagaaccacacaagccccgacguggaccugggcgauaucagcggaaucaaugccagcgucgugaacauccagaaagagaucgaccggcugaacgagguggccaagaaucugaacgagagccugaucgaccugcaagaacuggggaaguacgagcaguacaucaaguggcccugguacaucuggcugggcuuuaucgccggacugauugccaucgugauggucacaaucaugcuguguugcaugaccagcugcuguagcugccugaagggcuguuguagcuguggcagcugcugcaaguucgacgaggacgauucugagcccgugcugaagggcgugaaacugcacuacaccugaggacuaguguccaccugucccuccugggcugcuggauugucucguuuuccugccaaauaaacaggaucagcgcuuuacagaucuaaaaaaaaaaaaaaaaaaaaaaaaaaaaaaaaaaaaaaaaaaaaaaaaaaaaaaaaaaaaaaaaaaaaaaaaaaaaaaaaaaaaaaaaaaaaaaaaaaaa

SEQ ID NO: 25244 - RNA, 4105 nt, Artificial Sequence
  SARS-CoV-2/Wuhan/WIV05/2019__EPI_ISL_402128 spike protein mRNA gc mod (1-1273)(N439K_D614G)
aggagacccgugacccggaaguuguacggcuacgcgacuuucccucccacaaacccucgcgcccuuccuuuccuacuugggcccggcagaaagcuuaccauguucguguuucuggugcugcugccccugguguccagccagugugugaaccugaccaccagaacacagcugccuccagccuacaccaacagcuucaccagaggcguguacuaccccgacaagguguucagauccagcgugcugcacucuacccaggaccuguuccugccuuucuucagcaacgugaccugguuccacgccauccacguguccggcaccaauggcaccaagagauucgacaaccccgugcugcccuucaacgacgggguguacuuugccagcaccgagaaguccaacaucaucagaggcuggaucuucggcaccacacuggacagcaagacccagagccugcugaucgugaacaacgccaccaacguggucaucaaagugugcgaguuccaguucugcaacgaccccuuccugggcgucuacuaccacaagaacaacaagagcuggauggaaagcgaguuccggguguacagcagcgccaacaacugcaccuucgaguacgugucccagccuuuccugauggaccuggaaggcaagcagggcaacuucaagaaccugcgcgaguucguguucaagaacaucgacggcuacuucaaaaucuacagcaagcacaccccuaucaaccucgugcgggaucugccucagggcuucucugcucuggaaccccugguggaucugcccaucggcaucaacaucacccgguuucagacacugcuggcccugcacagaagcuaccugacaccuggcgauagcagcagcggauggacagcuggugccgccgcuuacuaugugggcuaccugcagccuagaaccuuccugcugaaguacaacgagaacggcaccaucaccgacgccguggauugugcucuggauccucugagcgagacaaagugcacccugaaguccuucaccguggaaaagggcaucuaccagaccagcaacuuccgggugcagcccaccgaauccaucgugcgguuccccaauaucaccaaucugugccccuucggcgagguguucaaugccaccagauucgccucuguguacgccuggaaccggaagcggaucagcaauugcguggccgacuacuccgugcuguacaacuccgccagcuucagcaccuucaagugcuacggcguguccccuaccaagcugaacgaccugugcuucacaaacguguacgccgacagcuucgugauccggggagaugaagugcggcagauugccccuggacagacaggcaagaucgccgacuacaacuacaagcugcccgacgacuucaccggcugugugauugccuggaacagcaagaaccuggacuccaaagucggcggcaacuacaauuaccuguaccggcuguuccggaaguccaaucugaagcccuucgagcgggacaucagcaccgaaaucuaucaggccggcagcaccccuugcaacggcguggaaggcuucaacugcuacuucccacugcaguccuacggcuuucagcccacaaauggcgugggcuaucagcccuacagagugguggugcugagcuucgaacugcugcaugcuccugccacagugugcggcccuaagaaaagcaccaaucucgugaagaacaaaugcgugaacuucaacuucaacggccugaccggcaccggcgugcugacagagagcaacaagaaguuccugccauuccagcaguuuggccgggauaucgccgauaccacagacgccguuagagauccccagacacuggaaauccuggacaucaccccaugcagcuucggcggagugucugugaucaccccuggcaccaacaccagcaaucagguggcagugcuguaccagggcgugaacuguaccgaagugcccguggccauucacgccgaucagcugacaccuacauggcggguguacuccaccggcagcaauguguuucagaccagagccggcugucugaucggagccgagcacgugaacaauagcuacgagugcgacauccccaucggcgcuggcaucugugccagcuaccagacacagacaaacagccccagacgggcuagaagcguggccagccagagcaucauugccuacacaaugucucugggcgccgagaacagcguggccuacuccaacaacucuaucgcuauccccaccaacuucaccaucagcgugaccaccgagauccugccuguguccaugaccaagaccagcguggacugcaccauguacaucugcggcgauuccaccgagugcuccaaccugcugcugcaguacggcagcuucugcacccagcugaauagagcccugacagggaucgccguggaacaggacaagaacacccaagagguguucgcccaagugaagcaaaucuacaagaccccuccuaucaaggacuucggcggcuucaauuucagccagauucugcccgauccuagcaagcccagcaagcggagcuucaucgaggaccugcuguucaacaaagugacacuggccgacgccggcuucaucaagcaguauggcgauugucugggcgacauugccgccagggaucugauuugcgcccagaaguuuaacggacugacagugcugccuccucugcugaccgaugagaugaucgcccaguacacaucugcccugcuggccggcacaaucacaagcggcuggacauuuggagcuggcgccgcucugcagauccccuuugcuaugcagauggccuaccgguucaacggcaucggagugacccagaaugugcuguacgagaaccagaagcugaucgccaaccaguucaacagcgccaucggcaagauccaggacagccugagcagcacagcaagcgcccugggaaagcugcaggacguggucaaccagaaugcccaggcacugaacacccuggucaagcagcuguccuccaacuucggcgccaucagcucugugcugaacgauauccugagcagacuggacaaggucgaggccgaggugcagaucgacagacugaucacaggcagacugcagagccuccagacauacgugacccagcagcugaucagagccgccgagauuagagccucugccaaucuggccgccaccaagaugucugagugugugcugggccagagcaagagaguggacuuuugcggcaagggcuaccaccugaugagcuucccucagucugccccucacggcgugguguuucugcacgugacauaugugcccgcucaagagaagaauuucaccaccgcuccagccaucugccacgacggcaaagcccacuuuccuagagaaggcguguucguguccaacggcacccauugguucgugacacagcggaacuucuacgagccccagaucaucaccaccgacaacaccuucgugucuggcaacugcgacguugugaucggcauugugaacaauaccguguacgacccucugcagcccgagcuggacagcuucaaagaggaacuggacaaguacuuuaagaaccacacaagccccgacguggaccugggcgauaucagcggaaucaaugccagcgucgugaacauccagaaagagaucgaccggcugaacgagguggccaagaaucugaacgagagccugaucgaccugcaagaacuggggaaguacgagcaguacaucaaguggcccugguacaucuggcugggcuuuaucgccggacugauugccaucgugauggucacaaucaugcuguguugcaugaccagcugcuguagcugccugaagggcuguuguagcuguggcagcugcugcaaguucgacgaggacgauucugagcccgugcugaagggcgugaaacugcacuacaccugaggacuaguguccaccugucccuccugggcugcuggauugucucguuuuccugccaaauaaacaggaucagcgcuuuacagaucuaaaaaaaaaaaaaaaaaaaaaaaaaaaaaaaaaaaaaaaaaaaaaaaaaaaaaaaaaaaaaaaaaaaaaaaaaaaaaaaaaaaaaaaaaaaaaaaaaaaa

SEQ ID NO: 25245 - RNA, 4105 nt, Artificial Sequence
  SARS-CoV-2/Wuhan/WIV05/2019__EPI_ISL_402128 spike protein mRNA gc mod (1-1273)(S477N_D614G)
aggagacccgugacccggaaguuguacggcuacgcgacuuucccucccacaaacccucgcgcccuuccuuuccuacuugggcccggcagaaagcuuaccauguucguguuucuggugcugcugccccugguguccagccagugugugaaccugaccaccagaacacagcugccuccagccuacaccaacagcuucaccagaggcguguacuaccccgacaagguguucagauccagcgugcugcacucuacccaggaccuguuccugccuuucuucagcaacgugaccugguuccacgccauccacguguccggcaccaauggcaccaagagauucgacaaccccgugcugcccuucaacgacgggguguacuuugccagcaccgagaaguccaacaucaucagaggcuggaucuucggcaccacacuggacagcaagacccagagccugcugaucgugaacaacgccaccaacguggucaucaaagugugcgaguuccaguucugcaacgaccccuuccugggcgucuacuaccacaagaacaacaagagcuggauggaaagcgaguuccggguguacagcagcgccaacaacugcaccuucgaguacgugucccagccuuuccugauggaccuggaaggcaagcagggcaacuucaagaaccugcgcgaguucguguucaagaacaucgacggcuacuucaaaaucuacagcaagcacaccccuaucaaccucgugcgggaucugccucagggcuucucugcucuggaaccccugguggaucugcccaucggcaucaacaucacccgguuucagacacugcuggcccugcacagaagcuaccugacaccuggcgauagcagcagcggauggacagcuggugccgccgcuuacuaugugggcuaccugcagccuagaaccuuccugcugaaguacaacgagaacggcaccaucaccgacgccguggauugugcucuggauccucugagcgagacaaagugcacccugaaguccuucaccguggaaaagggcaucuaccagaccagcaacuuccgggugcagcccaccgaauccaucgugcgguuccccaauaucaccaaucugugccccuucggcgagguguucaaugccaccagauucgccucuguguacgccuggaaccggaagcggaucagcaauugcguggccgacuacuccgugcuguacaacuccgccagcuucagcaccuucaagugcuacggcguguccccuaccaagcugaacgaccugugcuucacaaacguguacgccgacagcuucgugauccggggagaugaagugcggcagauugccccuggacagacaggcaagaucgccgacuacaacuacaagcugcccgacgacuucaccggcugugugauugccuggaacagcaacaaccuggacuccaaagucggcggcaacuacaauuaccuguaccggcuguuccggaaguccaaucugaagcccuucgagcgggacaucagcaccgaaaucuaucaggccggcaacaccccuugcaacggcguggaaggcuucaacugcuacuucccacugcaguccuacggcuuucagcccacaaauggcgugggcuaucagcccuacagagugguggugcugagcuucgaacugcugcaugcuccugccacagugugcggcccuaagaaaagcaccaaucucgugaagaacaaaugcgugaacuucaacuucaacggccugaccggcaccggcgugcugacagagagcaacaagaaguuccugccauuccagcaguuuggccgggauaucgccgauaccacagacgccguuagagauccccagacacuggaaauccuggacaucaccccaugcagcuucggcggagugucugugaucaccccuggcaccaacaccagcaaucagguggcagugcuguaccagggcgugaacuguaccgaagugcccguggccauucacgccgaucagcugacaccuacauggcggguguacuccaccggcagcaauguguuucagaccagagccggcugucugaucggagccgagcacgugaacaauagcuacgagugcgacauccccaucggcgcuggcaucugugccagcuaccagacacagacaaacagccccagacgggcuagaagcguggccagccagagcaucauugccuacacaaugucucugggcgccgagaacagcguggccuacuccaacaacucuaucgcuauccccaccaacuucaccaucagcgugaccaccgagauccugccuguguccaugaccaagaccagcguggacugcaccauguacaucugcggcgauuccaccgagugcuccaaccugcugcugcaguacggcagcuucugcacccagcugaauagagcccugacagggaucgccguggaacaggacaagaacacccaagagguguucgcccaagugaagcaaaucuacaagaccccuccuaucaaggacuucggcggcuucaauuucagccagauucugcccgauccuagcaagcccagcaagcggagcuucaucgaggaccugcuguucaacaaagugacacuggccgacgccggcuucaucaagcaguauggcgauugucugggcgacauugccgccagggaucugauuugcgcccagaaguuuaacggacugacagugcugccuccucugcugaccgaugagaugaucgcccaguacacaucugcccugcuggccggcacaaucacaagcggcuggacauuuggagcuggcgccgcucugcagauccccuuugcuaugcagauggccuaccgguucaacggcaucggagugacccagaaugugcuguacgagaaccagaagcugaucgccaaccaguucaacagcgccaucggcaagauccaggacagccugagcagcacagcaagcgcccugggaaagcugcaggacguggucaaccagaaugcccaggcacugaacacccuggucaagcagcuguccuccaacuucggcgccaucagcucugugcugaacgauauccugagcagacuggacaaggucgaggccgaggugcagaucgacagacugaucacaggcagacugcagagccuccagacauacgugacccagcagcugaucagagccgccgagauuagagccucugccaaucuggccgccaccaagaugucugagugugugcugggccagagcaagagaguggacuuuugcggcaagggcuaccaccugaugagcuucccucagucugccccucacggcgugguguuucugcacgugacauaugugcccgcucaagagaagaauuucaccaccgcuccagccaucugccacgacggcaaagcccacuuuccuagagaaggcguguucguguccaacggcacccauugguucgugacacagcggaacuucuacgagccccagaucaucaccaccgacaacaccuucgugucuggcaacugcgacguugugaucggcauugugaacaauaccguguacgacccucugcagcccgagcuggacagcuucaaagaggaacuggacaaguacuuuaagaaccacacaagccccgacguggaccugggcgauaucagcggaaucaaugccagcgucgugaacauccagaaagagaucgaccggcugaacgagguggccaagaaucugaacgagagccugaucgaccugcaagaacuggggaaguacgagcaguacaucaaguggcccugguacaucuggcugggcuuuaucgccggacugauugccaucgugauggucacaaucaugcuguguugcaugaccagcugcuguagcugccugaagggcuguuguagcuguggcagcugcugcaaguucgacgaggacgauucugagcccgugcugaagggcgugaaacugcacuacaccugaggacuaguguccaccugucccuccugggcugcuggauugucucguuuuccugccaaauaaacaggaucagcgcuuuacagaucuaaaaaaaaaaaaaaaaaaaaaaaaaaaaaaaaaaaaaaaaaaaaaaaaaaaaaaaaaaaaaaaaaaaaaaaaaaaaaaaaaaaaaaaaaaaaaaaaaaaa

SEQ ID NO: 25246 - RNA, 4105 nt, Artificial Sequence
  SARS-CoV-2/Wuhan/WIV05/2019__EPI_ISL_402128 spike protein mRNA gc mod (1-1273)(N501Y_D614G)
aggagacccgugacccggaaguuguacggcuacgcgacuuucccucccacaaacccucgcgcccuuccuuuccuacuugggcccggcagaaagcuuaccauguucguguuucuggugcugcugccccugguguccagccagugugugaaccugaccaccagaacacagcugccuccagccuacaccaacagcuucaccagaggcguguacuaccccgacaagguguucagauccagcgugcugcacucuacccaggaccuguuccugccuuucuucagcaacgugaccugguuccacgccauccacguguccggcaccaauggcaccaagagauucgacaaccccgugcugcccuucaacgacgggguguacuuugccagcaccgagaaguccaacaucaucagaggcuggaucuucggcaccacacuggacagcaagacccagagccugcugaucgugaacaacgccaccaacguggucaucaaagugugcgaguuccaguucugcaacgaccccuuccugggcgucuacuaccacaagaacaacaagagcuggauggaaagcgaguuccggguguacagcagcgccaacaacugcaccuucgaguacgugucccagccuuuccugauggaccuggaaggcaagcagggcaacuucaagaaccugcgcgaguucguguucaagaacaucgacggcuacuucaaaaucuacagcaagcacaccccuaucaaccucgugcgggaucugccucagggcuucucugcucuggaaccccugguggaucugcccaucggcaucaacaucacccgguuucagacacugcuggcccugcacagaagcuaccugacaccuggcgauagcagcagcggauggacagcuggugccgccgcuuacuaugugggcuaccugcagccuagaaccuuccugcugaaguacaacgagaacggcaccaucaccgacgccguggauugugcucuggauccucugagcgagacaaagugcacccugaaguccuucaccguggaaaagggcaucuaccagaccagcaacuuccgggugcagcccaccgaauccaucgugcgguuccccaauaucaccaaucugugccccuucggcgagguguucaaugccaccagauucgccucuguguacgccuggaaccggaagcggaucagcaauugcguggccgacuacuccgugcuguacaacuccgccagcuucagcaccuucaagugcuacggcguguccccuaccaagcugaacgaccugugcuucacaaacguguacgccgacagcuucgugauccggggagaugaagugcggcagauugccccuggacagacaggcaagaucgccgacuacaacuacaagcugcccgacgacuucaccggcugugugauugccuggaacagcaacaaccuggacuccaaagucggcggcaacuacaauuaccuguaccggcuguuccggaaguccaaucugaagcccuucgagcgggacaucagcaccgaaaucuaucaggccggcagcaccccuugcaacggcguggaaggcuucaacugcuacuucccacugcaguccuacggcuuucagcccacauacggcgugggcuaucagcccuacagagugguggugcugagcuucgaacugcugcaugcuccugccacagugugcggcccuaagaaaagcaccaaucucgugaagaacaaaugcgugaacuucaacuucaacggccugaccggcaccggcgugcugacagagagcaacaagaaguuccugccauuccagcaguuuggccgggauaucgccgauaccacagacgccguuagagauccccagacacuggaaauccuggacaucaccccaugcagcuucggcggagugucugugaucaccccuggcaccaacaccagcaaucagguggcagugcuguaccagggcgugaacuguaccgaagugcccguggccauucacgccgaucagcugacaccuacauggcggguguacuccaccggcagcaauguguuucagaccagagccggcugucugaucggagccgagcacgugaacaauagcuacgagugcgacauccccaucggcgcuggcaucugugccagcuaccagacacagacaaacagccccagacgggcuagaagcguggccagccagagcaucauugccuacacaaugucucugggcgccgagaacagcguggccuacuccaacaacucuaucgcuauccccaccaacuucaccaucagcgugaccaccgagauccugccuguguccaugaccaagaccagcguggacugcaccauguacaucugcggcgauuccaccgagugcuccaaccugcugcugcaguacggcagcuucugcacccagcugaauagagcccugacagggaucgccguggaacaggacaagaacacccaagagguguucgcccaagugaagcaaaucuacaagaccccuccuaucaaggacuucggcggcuucaauuucagccagauucugcccgauccuagcaagcccagcaagcggagcuucaucgaggaccugcuguucaacaaagugacacuggccgacgccggcuucaucaagcaguauggcgauugucugggcgacauugccgccagggaucugauuugcgcccagaaguuuaacggacugacagugcugccuccucugcugaccgaugagaugaucgcccaguacacaucugcccugcuggccggcacaaucacaagcggcuggacauuuggagcuggcgccgcucugcagauccccuuugcuaugcagauggccuaccgguucaacggcaucggagugacccagaaugugcuguacgagaaccagaagcugaucgccaaccaguucaacagcgccaucggcaagauccaggacagccugagcagcacagcaagcgcccugggaaagcugcaggacguggucaaccagaaugcccaggcacugaacacccuggucaagcagcuguccuccaacuucggcgccaucagcucugugcugaacgauauccugagcagacuggacaaggucgaggccgaggugcagaucgacagacugaucacaggcagacugcagagccuccagacauacgugacccagcagcugaucagagccgccgagauuagagccucugccaaucuggccgccaccaagaugucugagugugugcugggccagagcaagagaguggacuuuugcggcaagggcuaccaccugaugagcuucccucagucugccccucacggcgugguguuucugcacgugacauaugugcccgcucaagagaagaauuucaccaccgcuccagccaucugccacgacggcaaagcccacuuuccuagagaaggcguguucguguccaacggcacccauugguucgugacacagcggaacuucuacgagccccagaucaucaccaccgacaacaccuucgugucuggcaacugcgacguugugaucggcauugugaacaauaccguguacgacccucugcagcccgagcuggacagcuucaaagaggaacuggacaaguacuuuaagaaccacacaagccccgacguggaccugggcgauaucagcggaaucaaugccagcgucgugaacauccagaaagagaucgaccggcugaacgagguggccaagaaucugaacgagagccugaucgaccugcaagaacuggggaaguacgagcaguacaucaaguggcccugguacaucuggcugggcuuuaucgccggacugauugccaucgugauggucacaaucaugcuguguugcaugaccagcugcuguagcugccugaagggcuguuguagcuguggcagcugcugcaaguucgacgaggacgauucugagcccgugcugaagggcgugaaacugcacuacaccugaggacuaguguccaccugucccuccugggcugcuggauugucucguuuuccugccaaauaaacaggaucagcgcuuuacagaucuaaaaaaaaaaaaaaaaaaaaaaaaaaaaaaaaaaaaaaaaaaaaaaaaaaaaaaaaaaaaaaaaaaaaaaaaaaaaaaaaaaaaaaaaaaaaaaaaaaaa

SEQ ID NO: 25247 - RNA, 4099 nt, Artificial Sequence
  SARS-CoV-2/Wuhan/WIV05/2019__EPI_ISL_402128 spike protein mRNA gc mod (1-1273)(H69del_V70del_D614G)
aggagacccgugacccggaaguuguacggcuacgcgacuuucccucccacaaacccucgcgcccuuccuuuccuacuugggcccggcagaaagcuuaccauguucguguuucuggugcugcugccccugguguccagccagugugugaaccugaccaccagaacacagcugccuccagccuacaccaacagcuucaccagaggcguguacuaccccgacaagguguucagauccagcgugcugcacucuacccaggaccuguuccugccuuucuucagcaacgugaccugguuccacgccaucuccggcaccaauggcaccaagagauucgacaaccccgugcugcccuucaacgacgggguguacuuugccagcaccgagaaguccaacaucaucagaggcuggaucuucggcaccacacuggacagcaagacccagagccugcugaucgugaacaacgccaccaacguggucaucaaagugugcgaguuccaguucugcaacgaccccuuccugggcgucuacuaccacaagaacaacaagagcuggauggaaagcgaguuccggguguacagcagcgccaacaacugcaccuucgaguacgugucccagccuuuccugauggaccuggaaggcaagcagggcaacuucaagaaccugcgcgaguucguguucaagaacaucgacggcuacuucaaaaucuacagcaagcacaccccuaucaaccucgugcgggaucugccucagggcuucucugcucuggaaccccugguggaucugcccaucggcaucaacaucacccgguuucagacacugcuggcccugcacagaagcuaccugacaccuggcgauagcagcagcggauggacagcuggugccgccgcuuacuaugugggcuaccugcagccuagaaccuuccugcugaaguacaacgagaacggcaccaucaccgacgccguggauugugcucuggauccucugagcgagacaaagugcacccugaaguccuucaccguggaaaagggcaucuaccagaccagcaacuuccgggugcagcccaccgaauccaucgugcgguuccccaauaucaccaaucugugccccuucggcgagguguucaaugccaccagauucgccucuguguacgccuggaaccggaagcggaucagcaauugcguggccgacuacuccgugcuguacaacuccgccagcuucagcaccuucaagugcuacggcguguccccuaccaagcugaacgaccugugcuucacaaacguguacgccgacagcuucgugauccggggagaugaagugcggcagauugccccuggacagacaggcaagaucgccgacuacaacuacaagcugcccgacgacuucaccggcugugugauugccuggaacagcaacaaccuggacuccaaagucggcggcaacuacaauuaccuguaccggcuguuccggaaguccaaucugaagcccuucgagcgggacaucagcaccgaaaucuaucaggccggcagcaccccuugcaacggcguggaaggcuucaacugcuacuucccacugcaguccuacggcuuucagcccacaaauggcgugggcuaucagcccuacagagugguggugcugagcuucgaacugcugcaugcuccugccacagugugcggcccuaagaaaagcaccaaucucgugaagaacaaaugcgugaacuucaacuucaacggccugaccggcaccggcgugcugacagagagcaacaagaaguuccugccauuccagcaguuuggccgggauaucgccgauaccacagacgccguuagagauccccagacacuggaaauccuggacaucaccccaugcagcuucggcggagugucugugaucaccccuggcaccaacaccagcaaucagguggcagugcuguaccagggcgugaacuguaccgaagugcccguggccauucacgccgaucagcugacaccuacauggcggguguacuccaccggcagcaauguguuucagaccagagccggcugucugaucggagccgagcacgugaacaauagcuacgagugcgacauccccaucggcgcuggcaucugugccagcuaccagacacagacaaacagccccagacgggcuagaagcguggccagccagagcaucauugccuacacaaugucucugggcgccgagaacagcguggccuacuccaacaacucuaucgcuauccccaccaacuucaccaucagcgugaccaccgagauccugccuguguccaugaccaagaccagcguggacugcaccauguacaucugcggcgauuccaccgagugcuccaaccugcugcugcaguacggcagcuucugcacccagcugaauagagcccugacagggaucgccguggaacaggacaagaacacccaagagguguucgcccaagugaagcaaaucuacaagaccccuccuaucaaggacuucggcggcuucaauuucagccagauucugcccgauccuagcaagcccagcaagcggagcuucaucgaggaccugcuguucaacaaagugacacuggccgacgccggcuucaucaagcaguauggcgauugucugggcgacauugccgccagggaucugauuugcgcccagaaguuuaacggacugacagugcugccuccucugcugaccgaugagaugaucgcccaguacacaucugcccugcuggccggcacaaucacaagcggcuggacauuuggagcuggcgccgcucugcagauccccuuugcuaugcagauggccuaccgguucaacggcaucggagugacccagaaugugcuguacgagaaccagaagcugaucgccaaccaguucaacagcgccaucggcaagauccaggacagccugagcagcacagcaagcgcccugggaaagcugcaggacguggucaaccagaaugcccaggcacugaacacccuggucaagcagcuguccuccaacuucggcgccaucagcucugugcugaacgauauccugagcagacuggacaaggucgaggccgaggugcagaucgacagacugaucacaggcagacugcagagccuccagacauacgugacccagcagcugaucagagccgccgagauuagagccucugccaaucuggccgccaccaagaugucugagugugugcugggccagagcaagagaguggacuuuugcggcaagggcuaccaccugaugagcuucccucagucugccccucacggcgugguguuucugcacgugacauaugugcccgcucaagagaagaauuucaccaccgcuccagccaucugccacgacggcaaagcccacuuuccuagagaaggcguguucguguccaacggcacccauugguucgugacacagcggaacuucuacgagccccagaucaucaccaccgacaacaccuucgugucuggcaacugcgacguugugaucggcauugugaacaauaccguguacgacccucugcagcccgagcuggacagcuucaaagaggaacuggacaaguacuuuaagaaccacacaagccccgacguggaccugggcgauaucagcggaaucaaugccagcgucgugaacauccagaaagagaucgaccggcugaacgagguggccaagaaucugaacgagagccugaucgaccugcaagaacuggggaaguacgagcaguacaucaaguggcccugguacaucuggcugggcuuuaucgccggacugauugccaucgugauggucacaaucaugcuguguugcaugaccagcugcuguagcugccugaagggcuguuguagcuguggcagcugcugcaaguucgacgaggacgauucugagcccgugcugaagggcgugaaacugcacuacaccugaggacuaguguccaccugucccuccugggcugcuggauugucucguuuuccugccaaauaaacaggaucagcgcuuuacagaucuaaaaaaaaaaaaaaaaaaaaaaaaaaaaaaaaaaaaaaaaaaaaaaaaaaaaaaaaaaaaaaaaaaaaaaaaaaaaaaaaaaaaaaaaaaaaaaaaaaaa

SEQ ID NO: 25248 - RNA, 4105 nt, Artificial Sequence
  SARS-CoV-2/Wuhan/WIV05/2019__EPI_ISL_402128 spike protein mRNA gc mod (1-1273)(Y453F_D614G)
aggagacccgugacccggaaguuguacggcuacgcgacuuucccucccacaaacccucgcgcccuuccuuuccuacuugggcccggcagaaagcuuaccauguucguguuucuggugcugcugccccugguguccagccagugugugaaccugaccaccagaacacagcugccuccagccuacaccaacagcuucaccagaggcguguacuaccccgacaagguguucagauccagcgugcugcacucuacccaggaccuguuccugccuuucuucagcaacgugaccugguuccacgccauccacguguccggcaccaauggcaccaagagauucgacaaccccgugcugcccuucaacgacgggguguacuuugccagcaccgagaaguccaacaucaucagaggcuggaucuucggcaccacacuggacagcaagacccagagccugcugaucgugaacaacgccaccaacguggucaucaaagugugcgaguuccaguucugcaacgaccccuuccugggcgucuacuaccacaagaacaacaagagcuggauggaaagcgaguuccggguguacagcagcgccaacaacugcaccuucgaguacgugucccagccuuuccugauggaccuggaaggcaagcagggcaacuucaagaaccugcgcgaguucguguucaagaacaucgacggcuacuucaaaaucuacagcaagcacaccccuaucaaccucgugcgggaucugccucagggcuucucugcucuggaaccccugguggaucugcccaucggcaucaacaucacccgguuucagacacugcuggcccugcacagaagcuaccugacaccuggcgauagcagcagcggauggacagcuggugccgccgcuuacuaugugggcuaccugcagccuagaaccuuccugcugaaguacaacgagaacggcaccaucaccgacgccguggauugugcucuggauccucugagcgagacaaagugcacccugaaguccuucaccguggaaaagggcaucuaccagaccagcaacuuccgggugcagcccaccgaauccaucgugcgguuccccaauaucaccaaucugugccccuucggcgagguguucaaugccaccagauucgccucuguguacgccuggaaccggaagcggaucagcaauugcguggccgacuacuccgugcuguacaacuccgccagcuucagcaccuucaagugcuacggcguguccccuaccaagcugaacgaccugugcuucacaaacguguacgccgacagcuucgugauccggggagaugaagugcggcagauugccccuggacagacaggcaagaucgccgacuacaacuacaagcugcccgacgacuucaccggcugugugauugccuggaacagcaacaaccuggacuccaaagucggcggcaacuacaauuaccuguuccggcuguuccggaaguccaaucugaagcccuucgagcgggacaucagcaccgaaaucuaucaggccggcagcaccccuugcaacggcguggaaggcuucaacugcuacuucccacugcaguccuacggcuuucagcccacaaauggcgugggcuaucagcccuacagagugguggugcugagcuucgaacugcugcaugcuccugccacagugugcggcccuaagaaaagcaccaaucucgugaagaacaaaugcgugaacuucaacuucaacggccugaccggcaccggcgugcugacagagagcaacaagaaguuccugccauuccagcaguuuggccgggauaucgccgauaccacagacgccguuagagauccccagacacuggaaauccuggacaucaccccaugcagcuucggcggagugucugugaucaccccuggcaccaacaccagcaaucagguggcagugcuguaccagggcgugaacuguaccgaagugcccguggccauucacgccgaucagcugacaccuacauggcggguguacuccaccggcagcaauguguuucagaccagagccggcugucugaucggagccgagcacgugaacaauagcuacgagugcgacauccccaucggcgcuggcaucugugccagcuaccagacacagacaaacagccccagacgggcuagaagcguggccagccagagcaucauugccuacacaaugucucugggcgccgagaacagcguggccuacuccaacaacucuaucgcuauccccaccaacuucaccaucagcgugaccaccgagauccugccuguguccaugaccaagaccagcguggacugcaccauguacaucugcggcgauuccaccgagugcuccaaccugcugcugcaguacggcagcuucugcacccagcugaauagagcccugacagggaucgccguggaacaggacaagaacacccaagagguguucgcccaagugaagcaaaucuacaagaccccuccuaucaaggacuucggcggcuucaauuucagccagauucugcccgauccuagcaagcccagcaagcggagcuucaucgaggaccugcuguucaacaaagugacacuggccgacgccggcuucaucaagcaguauggcgauugucugggcgacauugccgccagggaucugauuugcgcccagaaguuuaacggacugacagugcugccuccucugcugaccgaugagaugaucgcccaguacacaucugcccugcuggccggcacaaucacaagcggcuggacauuuggagcuggcgccgcucugcagauccccuuugcuaugcagauggccuaccgguucaacggcaucggagugacccagaaugugcuguacgagaaccagaagcugaucgccaaccaguucaacagcgccaucggcaagauccaggacagccugagcagcacagcaagcgcccugggaaagcugcaggacguggucaaccagaaugcccaggcacugaacacccuggucaagcagcuguccuccaacuucggcgccaucagcucugugcugaacgauauccugagcagacuggacaaggucgaggccgaggugcagaucgacagacugaucacaggcagacugcagagccuccagacauacgugacccagcagcugaucagagccgccgagauuagagccucugccaaucuggccgccaccaagaugucugagugugugcugggccagagcaagagaguggacuuuugcggcaagggcuaccaccugaugagcuucccucagucugccccucacggcgugguguuucugcacgugacauaugugcccgcucaagagaagaauuucaccaccgcuccagccaucugccacgacggcaaagcccacuuuccuagagaaggcguguucguguccaacggcacccauugguucgugacacagcggaacuucuacgagccccagaucaucaccaccgacaacaccuucgugucuggcaacugcgacguugugaucggcauugugaacaauaccguguacgacccucugcagcccgagcuggacagcuucaaagaggaacuggacaaguacuuuaagaaccacacaagccccgacguggaccugggcgauaucagcggaaucaaugccagcgucgugaacauccagaaagagaucgaccggcugaacgagguggccaagaaucugaacgagagccugaucgaccugcaagaacuggggaaguacgagcaguacaucaaguggcccugguacaucuggcugggcuuuaucgccggacugauugccaucgugauggucacaaucaugcuguguugcaugaccagcugcuguagcugccugaagggcuguuguagcuguggcagcugcugcaaguucgacgaggacgauucugagcccgugcugaagggcgugaaacugcacuacaccugaggacuaguguccaccugucccuccugggcugcuggauugucucguuuuccugccaaauaaacaggaucagcgcuuuacagaucuaaaaaaaaaaaaaaaaaaaaaaaaaaaaaaaaaaaaaaaaaaaaaaaaaaaaaaaaaaaaaaaaaaaaaaaaaaaaaaaaaaaaaaaaaaaaaaaaaaaa

SEQ ID NO: 25249 - RNA, 4105 nt, Artificial Sequence
  SARS-CoV-2/Wuhan/WIV05/2019__EPI_ISL_402128 spike protein mRNA gc mod (1-1273)(D614G_I692V)
aggagacccgugacccggaaguuguacggcuacgcgacuuucccucccacaaacccucgcgcccuuccuuuccuacuugggcccggcagaaagcuuaccauguucguguuucuggugcugcugccccugguguccagccagugugugaaccugaccaccagaacacagcugccuccagccuacaccaacagcuucaccagaggcguguacuaccccgacaagguguucagauccagcgugcugcacucuacccaggaccuguuccugccuuucuucagcaacgugaccugguuccacgccauccacguguccggcaccaauggcaccaagagauucgacaaccccgugcugcccuucaacgacgggguguacuuugccagcaccgagaaguccaacaucaucagaggcuggaucuucggcaccacacuggacagcaagacccagagccugcugaucgugaacaacgccaccaacguggucaucaaagugugcgaguuccaguucugcaacgaccccuuccugggcgucuacuaccacaagaacaacaagagcuggauggaaagcgaguuccggguguacagcagcgccaacaacugcaccuucgaguacgugucccagccuuuccugauggaccuggaaggcaagcagggcaacuucaagaaccugcgcgaguucguguucaagaacaucgacggcuacuucaaaaucuacagcaagcacaccccuaucaaccucgugcgggaucugccucagggcuucucugcucuggaaccccugguggaucugcccaucggcaucaacaucacccgguuucagacacugcuggcccugcacagaagcuaccugacaccuggcgauagcagcagcggauggacagcuggugccgccgcuuacuaugugggcuaccugcagccuagaaccuuccugcugaaguacaacgagaacggcaccaucaccgacgccguggauugugcucuggauccucugagcgagacaaagugcacccugaaguccuucaccguggaaaagggcaucuaccagaccagcaacuuccgggugcagcccaccgaauccaucgugcgguuccccaauaucaccaaucugugccccuucggcgagguguucaaugccaccagauucgccucuguguacgccuggaaccggaagcggaucagcaauugcguggccgacuacuccgugcuguacaacuccgccagcuucagcaccuucaagugcuacggcguguccccuaccaagcugaacgaccugugcuucacaaacguguacgccgacagcuucgugauccggggagaugaagugcggcagauugccccuggacagacaggcaagaucgccgacuacaacuacaagcugcccgacgacuucaccggcugugugauugccuggaacagcaacaaccuggacuccaaagucggcggcaacuacaauuaccuguaccggcuguuccggaaguccaaucugaagcccuucgagcgggacaucagcaccgaaaucuaucaggccggcagcaccccuugcaacggcguggaaggcuucaacugcuacuucccacugcaguccuacggcuuucagcccacaaauggcgugggcuaucagcccuacagagugguggugcugagcuucgaacugcugcaugcuccugccacagugugcggcccuaagaaaagcaccaaucucgugaagaacaaaugcgugaacuucaacuucaacggccugaccggcaccggcgugcugacagagagcaacaagaaguuccugccauuccagcaguuuggccgggauaucgccgauaccacagacgccguuagagauccccagacacuggaaauccuggacaucaccccaugcagcuucggcggagugucugugaucaccccuggcaccaacaccagcaaucagguggcagugcuguaccagggcgugaacuguaccgaagugcccguggccauucacgccgaucagcugacaccuacauggcggguguacuccaccggcagcaauguguuucagaccagagccggcugucugaucggagccgagcacgugaacaauagcuacgagugcgacauccccaucggcgcuggcaucugugccagcuaccagacacagacaaacagccccagacgggcuagaagcguggccagccagagcgugauugccuacacaaugucucugggcgccgagaacagcguggccuacuccaacaacucuaucgcuauccccaccaacuucaccaucagcgugaccaccgagauccugccuguguccaugaccaagaccagcguggacugcaccauguacaucugcggcgauuccaccgagugcuccaaccugcugcugcaguacggcagcuucugcacccagcugaauagagcccugacagggaucgccguggaacaggacaagaacacccaagagguguucgcccaagugaagcaaaucuacaagaccccuccuaucaaggacuucggcggcuucaauuucagccagauucugcccgauccuagcaagcccagcaagcggagcuucaucgaggaccugcuguucaacaaagugacacuggccgacgccggcuucaucaagcaguauggcgauugucugggcgacauugccgccagggaucugauuugcgcccagaaguuuaacggacugacagugcugccuccucugcugaccgaugagaugaucgcccaguacacaucugcccugcuggccggcacaaucacaagcggcuggacauuuggagcuggcgccgcucugcagauccccuuugcuaugcagauggccuaccgguucaacggcaucggagugacccagaaugugcuguacgagaaccagaagcugaucgccaaccaguucaacagcgccaucggcaagauccaggacagccugagcagcacagcaagcgcccugggaaagcugcaggacguggucaaccagaaugcccaggcacugaacacccuggucaagcagcuguccuccaacuucggcgccaucagcucugugcugaacgauauccugagcagacuggacaaggucgaggccgaggugcagaucgacagacugaucacaggcagacugcagagccuccagacauacgugacccagcagcugaucagagccgccgagauuagagccucugccaaucuggccgccaccaagaugucugagugugugcugggccagagcaagagaguggacuuuugcggcaagggcuaccaccugaugagcuucccucagucugccccucacggcgugguguuucugcacgugacauaugugcccgcucaagagaagaauuucaccaccgcuccagccaucugccacgacggcaaagcccacuuuccuagagaaggcguguucguguccaacggcacccauugguucgugacacagcggaacuucuacgagccccagaucaucaccaccgacaacaccuucgugucuggcaacugcgacguugugaucggcauugugaacaauaccguguacgacccucugcagcccgagcuggacagcuucaaagaggaacuggacaaguacuuuaagaaccacacaagccccgacguggaccugggcgauaucagcggaaucaaugccagcgucgugaacauccagaaagagaucgaccggcugaacgagguggccaagaaucugaacgagagccugaucgaccugcaagaacuggggaaguacgagcaguacaucaaguggcccugguacaucuggcugggcuuuaucgccggacugauugccaucgugauggucacaaucaugcuguguugcaugaccagcugcuguagcugccugaagggcuguuguagcuguggcagcugcugcaaguucgacgaggacgauucugagcccgugcugaagggcgugaaacugcacuacaccugaggacuaguguccaccugucccuccugggcugcuggauugucucguuuuccugccaaauaaacaggaucagcgcuuuacagaucuaaaaaaaaaaaaaaaaaaaaaaaaaaaaaaaaaaaaaaaaaaaaaaaaaaaaaaaaaaaaaaaaaaaaaaaaaaaaaaaaaaaaaaaaaaaaaaaaaaaa

SEQ ID NO: 25250 - RNA, 4105 nt, Artificial Sequence
  SARS-CoV-2/Wuhan/WIV05/2019__EPI_ISL_402128 spike protein mRNA gc mod (1-1273)(D614G_M1229I)
aggagacccgugacccggaaguuguacggcuacgcgacuuucccucccacaaacccucgcgcccuuccuuuccuacuugggcccggcagaaagcuuaccauguucguguuucuggugcugcugccccugguguccagccagugugugaaccugaccaccagaacacagcugccuccagccuacaccaacagcuucaccagaggcguguacuaccccgacaagguguucagauccagcgugcugcacucuacccaggaccuguuccugccuuucuucagcaacgugaccugguuccacgccauccacguguccggcaccaauggcaccaagagauucgacaaccccgugcugcccuucaacgacgggguguacuuugccagcaccgagaaguccaacaucaucagaggcuggaucuucggcaccacacuggacagcaagacccagagccugcugaucgugaacaacgccaccaacguggucaucaaagugugcgaguuccaguucugcaacgaccccuuccugggcgucuacuaccacaagaacaacaagagcuggauggaaagcgaguuccggguguacagcagcgccaacaacugcaccuucgaguacgugucccagccuuuccugauggaccuggaaggcaagcagggcaacuucaagaaccugcgcgaguucguguucaagaacaucgacggcuacuucaaaaucuacagcaagcacaccccuaucaaccucgugcgggaucugccucagggcuucucugcucuggaaccccugguggaucugcccaucggcaucaacaucacccgguuucagacacugcuggcccugcacagaagcuaccugacaccuggcgauagcagcagcggauggacagcuggugccgccgcuuacuaugugggcuaccugcagccuagaaccuuccugcugaaguacaacgagaacggcaccaucaccgacgccguggauugugcucuggauccucugagcgagacaaagugcacccugaaguccuucaccguggaaaagggcaucuaccagaccagcaacuuccgggugcagcccaccgaauccaucgugcgguuccccaauaucaccaaucugugccccuucggcgagguguucaaugccaccagauucgccucuguguacgccuggaaccggaagcggaucagcaauugcguggccgacuacuccgugcuguacaacuccgccagcuucagcaccuucaagugcuacggcguguccccuaccaagcugaacgaccugugcuucacaaacguguacgccgacagcuucgugauccggggagaugaagugcggcagauugccccuggacagacaggcaagaucgccgacuacaacuacaagcugcccgacgacuucaccggcugugugauugccuggaacagcaacaaccuggacuccaaagucggcggcaacuacaauuaccuguaccggcuguuccggaaguccaaucugaagcccuucgagcgggacaucagcaccgaaaucuaucaggccggcagcaccccuugcaacggcguggaaggcuucaacugcuacuucccacugcaguccuacggcuuucagcccacaaauggcgugggcuaucagcccuacagagugguggugcugagcuucgaacugcugcaugcuccugccacagugugcggcccuaagaaaagcaccaaucucgugaagaacaaaugcgugaacuucaacuucaacggccugaccggcaccggcgugcugacagagagcaacaagaaguuccugccauuccagcaguuuggccgggauaucgccgauaccacagacgccguuagagauccccagacacuggaaauccuggacaucaccccaugcagcuucggcggagugucugugaucaccccuggcaccaacaccagcaaucagguggcagugcuguaccagggcgugaacuguaccgaagugcccguggccauucacgccgaucagcugacaccuacauggcggguguacuccaccggcagcaauguguuucagaccagagccggcugucugaucggagccgagcacgugaacaauagcuacgagugcgacauccccaucggcgcuggcaucugugccagcuaccagacacagacaaacagccccagacgggcuagaagcguggccagccagagcaucauugccuacacaaugucucugggcgccgagaacagcguggccuacuccaacaacucuaucgcuauccccaccaacuucaccaucagcgugaccaccgagauccugccuguguccaugaccaagaccagcguggacugcaccauguacaucugcggcgauuccaccgagugcuccaaccugcugcugcaguacggcagcuucugcacccagcugaauagagcccugacagggaucgccguggaacaggacaagaacacccaagagguguucgcccaagugaagcaaaucuacaagaccccuccuaucaaggacuucggcggcuucaauuucagccagauucugcccgauccuagcaagcccagcaagcggagcuucaucgaggaccugcuguucaacaaagugacacuggccgacgccggcuucaucaagcaguauggcgauugucugggcgacauugccgccagggaucugauuugcgcccagaaguuuaacggacugacagugcugccuccucugcugaccgaugagaugaucgcccaguacacaucugcccugcuggccggcacaaucacaagcggcuggacauuuggagcuggcgccgcucugcagauccccuuugcuaugcagauggccuaccgguucaacggcaucggagugacccagaaugugcuguacgagaaccagaagcugaucgccaaccaguucaacagcgccaucggcaagauccaggacagccugagcagcacagcaagcgcccugggaaagcugcaggacguggucaaccagaaugcccaggcacugaacacccuggucaagcagcuguccuccaacuucggcgccaucagcucugugcugaacgauauccugagcagacuggacaaggucgaggccgaggugcagaucgacagacugaucacaggcagacugcagagccuccagacauacgugacccagcagcugaucagagccgccgagauuagagccucugccaaucuggccgccaccaagaugucugagugugugcugggccagagcaagagaguggacuuuugcggcaagggcuaccaccugaugagcuucccucagucugccccucacggcgugguguuucugcacgugacauaugugcccgcucaagagaagaauuucaccaccgcuccagccaucugccacgacggcaaagcccacuuuccuagagaaggcguguucguguccaacggcacccauugguucgugacacagcggaacuucuacgagccccagaucaucaccaccgacaacaccuucgugucuggcaacugcgacguugugaucggcauugugaacaauaccguguacgacccucugcagcccgagcuggacagcuucaaagaggaacuggacaaguacuuuaagaaccacacaagccccgacguggaccugggcgauaucagcggaaucaaugccagcgucgugaacauccagaaagagaucgaccggcugaacgagguggccaagaaucugaacgagagccugaucgaccugcaagaacuggggaaguacgagcaguacaucaaguggcccugguacaucuggcugggcuuuaucgccggacugauugccaucgugaucgucacaaucaugcuguguugcaugaccagcugcuguagcugccugaagggcuguuguagcuguggcagcugcugcaaguucgacgaggacgauucugagcccgugcugaagggcgugaaacugcacuacaccugaggacuaguguccaccugucccuccugggcugcuggauugucucguuuuccugccaaauaaacaggaucagcgcuuuacagaucuaaaaaaaaaaaaaaaaaaaaaaaaaaaaaaaaaaaaaaaaaaaaaaaaaaaaaaaaaaaaaaaaaaaaaaaaaaaaaaaaaaaaaaaaaaaaaaaaaaaa

SEQ ID NO: 25251 - RNA, 4099 nt, Artificial Sequence
  SARS-CoV-2/Wuhan/WIV05/2019__EPI_ISL_402128 spike protein mRNA gc mod (1-1273)(H69del_V70del_A222V_Y453F_S477N_D614G_I692V)
aggagacccgugacccggaaguuguacggcuacgcgacuuucccucccacaaacccucgcgcccuuccuuuccuacuugggcccggcagaaagcuuaccauguucguguuucuggugcugcugccccugguguccagccagugugugaaccugaccaccagaacacagcugccuccagccuacaccaacagcuucaccagaggcguguacuaccccgacaagguguucagauccagcgugcugcacucuacccaggaccuguuccugccuuucuucagcaacgugaccugguuccacgccaucuccggcaccaauggcaccaagagauucgacaaccccgugcugcccuucaacgacgggguguacuuugccagcaccgagaaguccaacaucaucagaggcuggaucuucggcaccacacuggacagcaagacccagagccugcugaucgugaacaacgccaccaacguggucaucaaagugugcgaguuccaguucugcaacgaccccuuccugggcgucuacuaccacaagaacaacaagagcuggauggaaagcgaguuccggguguacagcagcgccaacaacugcaccuucgaguacgugucccagccuuuccugauggaccuggaaggcaagcagggcaacuucaagaaccugcgcgaguucguguucaagaacaucgacggcuacuucaaaaucuacagcaagcacaccccuaucaaccucgugcgggaucugccucagggcuucucugugcuggaaccccugguggaucugcccaucggcaucaacaucacccgguuucagacacugcuggcccugcacagaagcuaccugacaccuggcgauagcagcagcggauggacagcuggugccgccgcuuacuaugugggcuaccugcagccuagaaccuuccugcugaaguacaacgagaacggcaccaucaccgacgccguggauugugcucuggauccucugagcgagacaaagugcacccugaaguccuucaccguggaaaagggcaucuaccagaccagcaacuuccgggugcagcccaccgaauccaucgugcgguuccccaauaucaccaaucugugccccuucggcgagguguucaaugccaccagauucgccucuguguacgccuggaaccggaagcggaucagcaauugcguggccgacuacuccgugcuguacaacuccgccagcuucagcaccuucaagugcuacggcguguccccuaccaagcugaacgaccugugcuucacaaacguguacgccgacagcuucgugauccggggagaugaagugcggcagauugccccuggacagacaggcaagaucgccgacuacaacuacaagcugcccgacgacuucaccggcugugugauugccuggaacagcaacaaccuggacuccaaagucggcggcaacuacaauuaccuguuccggcuguuccggaaguccaaucugaagcccuucgagcgggacaucagcaccgaaaucuaucaggccggcaacaccccuugcaacggcguggaaggcuucaacugcuacuucccacugcaguccuacggcuuucagcccacaaauggcgugggcuaucagcccuacagagugguggugcugagcuucgaacugcugcaugcuccugccacagugugcggcccuaagaaaagcaccaaucucgugaagaacaaaugcgugaacuucaacuucaacggccugaccggcaccggcgugcugacagagagcaacaagaaguuccugccauuccagcaguuuggccgggauaucgccgauaccacagacgccguuagagauccccagacacuggaaauccuggacaucaccccaugcagcuucggcggagugucugugaucaccccuggcaccaacaccagcaaucagguggcagugcuguaccagggcgugaacuguaccgaagugcccguggccauucacgccgaucagcugacaccuacauggcggguguacuccaccggcagcaauguguuucagaccagagccggcugucugaucggagccgagcacgugaacaauagcuacgagugcgacauccccaucggcgcuggcaucugugccagcuaccagacacagacaaacagccccagacgggcuagaagcguggccagccagagcgugauugccuacacaaugucucugggcgccgagaacagcguggccuacuccaacaacucuaucgcuauccccaccaacuucaccaucagcgugaccaccgagauccugccuguguccaugaccaagaccagcguggacugcaccauguacaucugcggcgauuccaccgagugcuccaaccugcugcugcaguacggcagcuucugcacccagcugaauagagcccugacagggaucgccguggaacaggacaagaacacccaagagguguucgcccaagugaagcaaaucuacaagaccccuccuaucaaggacuucggcggcuucaauuucagccagauucugcccgauccuagcaagcccagcaagcggagcuucaucgaggaccugcuguucaacaaagugacacuggccgacgccggcuucaucaagcaguauggcgauugucugggcgacauugccgccagggaucugauuugcgcccagaaguuuaacggacugacagugcugccuccucugcugaccgaugagaugaucgcccaguacacaucugcccugcuggccggcacaaucacaagcggcuggacauuuggagcuggcgccgcucugcagauccccuuugcuaugcagauggccuaccgguucaacggcaucggagugacccagaaugugcuguacgagaaccagaagcugaucgccaaccaguucaacagcgccaucggcaagauccaggacagccugagcagcacagcaagcgcccugggaaagcugcaggacguggucaaccagaaugcccaggcacugaacacccuggucaagcagcuguccuccaacuucggcgccaucagcucugugcugaacgauauccugagcagacuggacaaggucgaggccgaggugcagaucgacagacugaucacaggcagacugcagagccuccagacauacgugacccagcagcugaucagagccgccgagauuagagccucugccaaucuggccgccaccaagaugucugagugugugcugggccagagcaagagaguggacuuuugcggcaagggcuaccaccugaugagcuucccucagucugccccucacggcgugguguuucugcacgugacauaugugcccgcucaagagaagaauuucaccaccgcuccagccaucugccacgacggcaaagcccacuuuccuagagaaggcguguucguguccaacggcacccauugguucgugacacagcggaacuucuacgagccccagaucaucaccaccgacaacaccuucgugucuggcaacugcgacguugugaucggcauugugaacaauaccguguacgacccucugcagcccgagcuggacagcuucaaagaggaacuggacaaguacuuuaagaaccacacaagccccgacguggaccugggcgauaucagcggaaucaaugccagcgucgugaacauccagaaagagaucgaccggcugaacgagguggccaagaaucugaacgagagccugaucgaccugcaagaacuggggaaguacgagcaguacaucaaguggcccugguacaucuggcugggcuuuaucgccggacugauugccaucgugauggucacaaucaugcuguguugcaugaccagcugcuguagcugccugaagggcuguuguagcuguggcagcugcugcaaguucgacgaggacgauucugagcccgugcugaagggcgugaaacugcacuacaccugaggacuaguguccaccugucccuccugggcugcuggauugucucguuuuccugccaaauaaacaggaucagcgcuuuacagaucuaaaaaaaaaaaaaaaaaaaaaaaaaaaaaaaaaaaaaaaaaaaaaaaaaaaaaaaaaaaaaaaaaaaaaaaaaaaaaaaaaaaaaaaaaaaaaaaaaaaa

SEQ ID NO: 25252 - RNA, 4099 nt, Artificial Sequence
  SARS-CoV-2/Wuhan/WIV05/2019__EPI_ISL_402128 spike protein mRNA gc mod (1-1273)(H69del_V70del_Y453F_D614G_I692V_M1229I)
aggagacccgugacccggaaguuguacggcuacgcgacuuucccucccacaaacccucgcgcccuuccuuuccuacuugggcccggcagaaagcuuaccauguucguguuucuggugcugcugccccugguguccagccagugugugaaccugaccaccagaacacagcugccuccagccuacaccaacagcuucaccagaggcguguacuaccccgacaagguguucagauccagcgugcugcacucuacccaggaccuguuccugccuuucuucagcaacgugaccugguuccacgccaucuccggcaccaauggcaccaagagauucgacaaccccgugcugcccuucaacgacgggguguacuuugccagcaccgagaaguccaacaucaucagaggcuggaucuucggcaccacacuggacagcaagacccagagccugcugaucgugaacaacgccaccaacguggucaucaaagugugcgaguuccaguucugcaacgaccccuuccugggcgucuacuaccacaagaacaacaagagcuggauggaaagcgaguuccggguguacagcagcgccaacaacugcaccuucgaguacgugucccagccuuuccugauggaccuggaaggcaagcagggcaacuucaagaaccugcgcgaguucguguucaagaacaucgacggcuacuucaaaaucuacagcaagcacaccccuaucaaccucgugcgggaucugccucagggcuucucugcucuggaaccccugguggaucugcccaucggcaucaacaucacccgguuucagacacugcuggcccugcacagaagcuaccugacaccuggcgauagcagcagcggauggacagcuggugccgccgcuuacuaugugggcuaccugcagccuagaaccuuccugcugaaguacaacgagaacggcaccaucaccgacgccguggauugugcucuggauccucugagcgagacaaagugcacccugaaguccuucaccguggaaaagggcaucuaccagaccagcaacuuccgggugcagcccaccgaauccaucgugcgguuccccaauaucaccaaucugugccccuucggcgagguguucaaugccaccagauucgccucuguguacgccuggaaccggaagcggaucagcaauugcguggccgacuacuccgugcuguacaacuccgccagcuucagcaccuucaagugcuacggcguguccccuaccaagcugaacgaccugugcuucacaaacguguacgccgacagcuucgugauccggggagaugaagugcggcagauugccccuggacagacaggcaagaucgccgacuacaacuacaagcugcccgacgacuucaccggcugugugauugccuggaacagcaacaaccuggacuccaaagucggcggcaacuacaauuaccuguuccggcuguuccggaaguccaaucugaagcccuucgagcgggacaucagcaccgaaaucuaucaggccggcagcaccccuugcaacggcguggaaggcuucaacugcuacuucccacugcaguccuacggcuuucagcccacaaauggcgugggcuaucagcccuacagagugguggugcugagcuucgaacugcugcaugcuccugccacagugugcggcccuaagaaaagcaccaaucucgugaagaacaaaugcgugaacuucaacuucaacggccugaccggcaccggcgugcugacagagagcaacaagaaguuccugccauuccagcaguuuggccgggauaucgccgauaccacagacgccguuagagauccccagacacuggaaauccuggacaucaccccaugcagcuucggcggagugucugugaucaccccuggcaccaacaccagcaaucagguggcagugcuguaccagggcgugaacuguaccgaagugcccguggccauucacgccgaucagcugacaccuacauggcggguguacuccaccggcagcaauguguuucagaccagagccggcugucugaucggagccgagcacgugaacaauagcuacgagugcgacauccccaucggcgcuggcaucugugccagcuaccagacacagacaaacagccccagacgggcuagaagcguggccagccagagcgugauugccuacacaaugucucugggcgccgagaacagcguggccuacuccaacaacucuaucgcuauccccaccaacuucaccaucagcgugaccaccgagauccugccuguguccaugaccaagaccagcguggacugcaccauguacaucugcggcgauuccaccgagugcuccaaccugcugcugcaguacggcagcuucugcacccagcugaauagagcccugacagggaucgccguggaacaggacaagaacacccaagagguguucgcccaagugaagcaaaucuacaagaccccuccuaucaaggacuucggcggcuucaauuucagccagauucugcccgauccuagcaagcccagcaagcggagcuucaucgaggaccugcuguucaacaaagugacacuggccgacgccggcuucaucaagcaguauggcgauugucugggcgacauugccgccagggaucugauuugcgcccagaaguuuaacggacugacagugcugccuccucugcugaccgaugagaugaucgcccaguacacaucugcccugcuggccggcacaaucacaagcggcuggacauuuggagcuggcgccgcucugcagauccccuuugcuaugcagauggccuaccgguucaacggcaucggagugacccagaaugugcuguacgagaaccagaagcugaucgccaaccaguucaacagcgccaucggcaagauccaggacagccugagcagcacagcaagcgcccugggaaagcugcaggacguggucaaccagaaugcccaggcacugaacacccuggucaagcagcuguccuccaacuucggcgccaucagcucugugcugaacgauauccugagcagacuggacaaggucgaggccgaggugcagaucgacagacugaucacaggcagacugcagagccuccagacauacgugacccagcagcugaucagagccgccgagauuagagccucugccaaucuggccgccaccaagaugucugagugugugcugggccagagcaagagaguggacuuuugcggcaagggcuaccaccugaugagcuucccucagucugccccucacggcgugguguuucugcacgugacauaugugcccgcucaagagaagaauuucaccaccgcuccagccaucugccacgacggcaaagcccacuuuccuagagaaggcguguucguguccaacggcacccauugguucgugacacagcggaacuucuacgagccccagaucaucaccaccgacaacaccuucgugucuggcaacugcgacguugugaucggcauugugaacaauaccguguacgacccucugcagcccgagcuggacagcuucaaagaggaacuggacaaguacuuuaagaaccacacaagccccgacguggaccugggcgauaucagcggaaucaaugccagcgucgugaacauccagaaagagaucgaccggcugaacgagguggccaagaaucugaacgagagccugaucgaccugcaagaacuggggaaguacgagcaguacaucaaguggcccugguacaucuggcugggcuuuaucgccggacugauugccaucgugaucgucacaaucaugcuguguugcaugaccagcugcuguagcugccugaagggcuguuguagcuguggcagcugcugcaaguucgacgaggacgauucugagcccgugcugaagggcgugaaacugcacuacaccugaggacuaguguccaccugucccuccugggcugcuggauugucucguuuuccugccaaauaaacaggaucagcgcuuuacagaucuaaaaaaaaaaaaaaaaaaaaaaaaaaaaaaaaaaaaaaaaaaaaaaaaaaaaaaaaaaaaaaaaaaaaaaaaaaaaaaaaaaaaaaaaaaaaaaaaaaaa

SEQ ID NO: 25253 - RNA, 4096 nt, Artificial Sequence
  SARS-CoV-2/Wuhan/WIV05/2019__EPI_ISL_402128 spike protein mRNA gc mod (1-1273)(H69del_V70del_Y144del_N501Y_A570D_D614G_P681H_T716I_S982 A_D1118H)
aggagacccgugacccggaaguuguacggcuacgcgacuuucccucccacaaacccucgcgcccuuccuuuccuacuugggcccggcagaaagcuuaccauguucguguuucuggugcugcugccccugguguccagccagugugugaaccugaccaccagaacacagcugccuccagccuacaccaacagcuucaccagaggcguguacuaccccgacaagguguucagauccagcgugcugcacucuacccaggaccuguuccugccuuucuucagcaacgugaccugguuccacgccaucuccggcaccaauggcaccaagagauucgacaaccccgugcugcccuucaacgacgggguguacuuugccagcaccgagaaguccaacaucaucagaggcuggaucuucggcaccacacuggacagcaagacccagagccugcugaucgugaacaacgccaccaacguggucaucaaagugugcgaguuccaguucugcaacgaccccuuccugggcgucuaccacaagaacaacaagagcuggauggaaagcgaguuccggguguacagcagcgccaacaacugcaccuucgaguacgugucccagccuuuccugauggaccuggaaggcaagcagggcaacuucaagaaccugcgcgaguucguguucaagaacaucgacggcuacuucaaaaucuacagcaagcacaccccuaucaaccucgugcgggaucugccucagggcuucucugcucuggaaccccugguggaucugcccaucggcaucaacaucacccgguuucagacacugcuggcccugcacagaagcuaccugacaccuggcgauagcagcagcggauggacagcuggugccgccgcuuacuaugugggcuaccugcagccuagaaccuuccugcugaaguacaacgagaacggcaccaucaccgacgccguggauugugcucuggauccucugagcgagacaaagugcacccugaaguccuucaccguggaaaagggcaucuaccagaccagcaacuuccgggugcagcccaccgaauccaucgugcgguuccccaauaucaccaaucugugccccuucggcgagguguucaaugccaccagauucgccucuguguacgccuggaaccggaagcggaucagcaauugcguggccgacuacuccgugcuguacaacuccgccagcuucagcaccuucaagugcuacggcguguccccuaccaagcugaacgaccugugcuucacaaacguguacgccgacagcuucgugauccggggagaugaagugcggcagauugccccuggacagacaggcaagaucgccgacuacaacuacaagcugcccgacgacuucaccggcugugugauugccuggaacagcaacaaccuggacuccaaagucggcggcaacuacaauuaccuguaccggcuguuccggaaguccaaucugaagcccuucgagcgggacaucagcaccgaaaucuaucaggccggcagcaccccuugcaacggcguggaaggcuucaacugcuacuucccacugcaguccuacggcuuucagcccacauacggcgugggcuaucagcccuacagagugguggugcugagcuucgaacugcugcaugcuccugccacagugugcggcccuaagaaaagcaccaaucucgugaagaacaaaugcgugaacuucaacuucaacggccugaccggcaccggcgugcugacagagagcaacaagaaguuccugccauuccagcaguuuggccgggauaucgacgauaccacagacgccguuagagauccccagacacuggaaauccuggacaucaccccaugcagcuucggcggagugucugugaucaccccuggcaccaacaccagcaaucagguggcagugcuguaccagggcgugaacuguaccgaagugcccguggccauucacgccgaucagcugacaccuacauggcggguguacuccaccggcagcaauguguuucagaccagagccggcugucugaucggagccgagcacgugaacaauagcuacgagugcgacauccccaucggcgcuggcaucugugccagcuaccagacacagacaaacagccacagacgggcuagaagcguggccagccagagcaucauugccuacacaaugucucugggcgccgagaacagcguggccuacuccaacaacucuaucgcuauccccaucaacuucaccaucagcgugaccaccgagauccugccuguguccaugaccaagaccagcguggacugcaccauguacaucugcggcgauuccaccgagugcuccaaccugcugcugcaguacggcagcuucugcacccagcugaauagagcccugacagggaucgccguggaacaggacaagaacacccaagagguguucgcccaagugaagcaaaucuacaagaccccuccuaucaaggacuucggcggcuucaauuucagccagauucugcccgauccuagcaagcccagcaagcggagcuucaucgaggaccugcuguucaacaaagugacacuggccgacgccggcuucaucaagcaguauggcgauugucugggcgacauugccgccagggaucugauuugcgcccagaaguuuaacggacugacagugcugccuccucugcugaccgaugagaugaucgcccaguacacaucugcccugcuggccggcacaaucacaagcggcuggacauuuggagcuggcgccgcucugcagauccccuuugcuaugcagauggccuaccgguucaacggcaucggagugacccagaaugugcuguacgagaaccagaagcugaucgccaaccaguucaacagcgccaucggcaagauccaggacagccugagcagcacagcaagcgcccugggaaagcugcaggacguggucaaccagaaugcccaggcacugaacacccuggucaagcagcuguccuccaacuucggcgccaucagcucugugcugaacgauauccuggccagacuggacaaggucgaggccgaggugcagaucgacagacugaucacaggcagacugcagagccuccagacauacgugacccagcagcugaucagagccgccgagauuagagccucugccaaucuggccgccaccaagaugucugagugugugcugggccagagcaagagaguggacuuuugcggcaagggcuaccaccugaugagcuucccucagucugccccucacggcgugguguuucugcacgugacauaugugcccgcucaagagaagaauuucaccaccgcuccagccaucugccacgacggcaaagcccacuuuccuagagaaggcguguucguguccaacggcacccauugguucgugacacagcggaacuucuacgagccccagaucaucaccacccacaacaccuucgugucuggcaacugcgacguugugaucggcauugugaacaauaccguguacgacccucugcagcccgagcuggacagcuucaaagaggaacuggacaaguacuuuaagaaccacacaagccccgacguggaccugggcgauaucagcggaaucaaugccagcgucgugaacauccagaaagagaucgaccggcugaacgagguggccaagaaucugaacgagagccugaucgaccugcaagaacuggggaaguacgagcaguacaucaaguggcccugguacaucuggcugggcuuuaucgccggacugauugccaucgugauggucacaaucaugcuguguugcaugaccagcugcuguagcugccugaagggcuguuguagcuguggcagcugcugcaaguucgacgaggacgauucugagcccgugcugaagggcgugaaacugcacuacaccugaggacuaguguccaccugucccuccugggcugcuggauugucucguuuuccugccaaauaaacaggaucagcgcuuuacagaucuaaaaaaaaaaaaaaaaaaaaaaaaaaaaaaaaaaaaaaaaaaaaaaaaaaaaaaaaaaaaaaaaaaaaaaaaaaaaaaaaaaaaaaaaaaaaaaaaaaaa

SEQ ID NO: 25254 - RNA, 4105 nt, Artificial Sequence
  SARS-CoV-2/Wuhan/WIV05/2019__EPI_ISL_402128 spike protein mRNA gc mod (1-1273)(K417N_E484K_N501Y_D614G)
aggagacccgugacccggaaguuguacggcuacgcgacuuucccucccacaaacccucgcgcccuuccuuuccuacuugggcccggcagaaagcuuaccauguucguguuucuggugcugcugccccugguguccagccagugugugaaccugaccaccagaacacagcugccuccagccuacaccaacagcuucaccagaggcguguacuaccccgacaagguguucagauccagcgugcugcacucuacccaggaccuguuccugccuuucuucagcaacgugaccugguuccacgccauccacguguccggcaccaauggcaccaagagauucgacaaccccgugcugcccuucaacgacgggguguacuuugccagcaccgagaaguccaacaucaucagaggcuggaucuucggcaccacacuggacagcaagacccagagccugcugaucgugaacaacgccaccaacguggucaucaaagugugcgaguuccaguucugcaacgaccccuuccugggcgucuacuaccacaagaacaacaagagcuggauggaaagcgaguuccggguguacagcagcgccaacaacugcaccuucgaguacgugucccagccuuuccugauggaccuggaaggcaagcagggcaacuucaagaaccugcgcgaguucguguucaagaacaucgacggcuacuucaaaaucuacagcaagcacaccccuaucaaccucgugcgggaucugccucagggcuucucugcucuggaaccccugguggaucugcccaucggcaucaacaucacccgguuucagacacugcuggcccugcacagaagcuaccugacaccuggcgauagcagcagcggauggacagcuggugccgccgcuuacuaugugggcuaccugcagccuagaaccuuccugcugaaguacaacgagaacggcaccaucaccgacgccguggauugugcucuggauccucugagcgagacaaagugcacccugaaguccuucaccguggaaaagggcaucuaccagaccagcaacuuccgggugcagcccaccgaauccaucgugcgguuccccaauaucaccaaucugugccccuucggcgagguguucaaugccaccagauucgccucuguguacgccuggaaccggaagcggaucagcaauugcguggccgacuacuccgugcuguacaacuccgccagcuucagcaccuucaagugcuacggcguguccccuaccaagcugaacgaccugugcuucacaaacguguacgccgacagcuucgugauccggggagaugaagugcggcagauugccccuggacagacaggcaacaucgccgacuacaacuacaagcugcccgacgacuucaccggcugugugauugccuggaacagcaacaaccuggacuccaaagucggcggcaacuacaauuaccuguaccggcuguuccggaaguccaaucugaagcccuucgagcgggacaucagcaccgaaaucuaucaggccggcagcaccccuugcaacggcgugaagggcuucaacugcuacuucccacugcaguccuacggcuuucagcccacauacggcgugggcuaucagcccuacagagugguggugcugagcuucgaacugcugcaugcuccugccacagugugcggcccuaagaaaagcaccaaucucgugaagaacaaaugcgugaacuucaacuucaacggccugaccggcaccggcgugcugacagagagcaacaagaaguuccugccauuccagcaguuuggccgggauaucgccgauaccacagacgccguuagagauccccagacacuggaaauccuggacaucaccccaugcagcuucggcggagugucugugaucaccccuggcaccaacaccagcaaucagguggcagugcuguaccagggcgugaacuguaccgaagugcccguggccauucacgccgaucagcugacaccuacauggcggguguacuccaccggcagcaauguguuucagaccagagccggcugucugaucggagccgagcacgugaacaauagcuacgagugcgacauccccaucggcgcuggcaucugugccagcuaccagacacagacaaacagccccagacgggcuagaagcguggccagccagagcaucauugccuacacaaugucucugggcgccgagaacagcguggccuacuccaacaacucuaucgcuauccccaccaacuucaccaucagcgugaccaccgagauccugccuguguccaugaccaagaccagcguggacugcaccauguacaucugcggcgauuccaccgagugcuccaaccugcugcugcaguacggcagcuucugcacccagcugaauagagcccugacagggaucgccguggaacaggacaagaacacccaagagguguucgcccaagugaagcaaaucuacaagaccccuccuaucaaggacuucggcggcuucaauuucagccagauucugcccgauccuagcaagcccagcaagcggagcuucaucgaggaccugcuguucaacaaagugacacuggccgacgccggcuucaucaagcaguauggcgauugucugggcgacauugccgccagggaucugauuugcgcccagaaguuuaacggacugacagugcugccuccucugcugaccgaugagaugaucgcccaguacacaucugcccugcuggccggcacaaucacaagcggcuggacauuuggagcuggcgccgcucugcagauccccuuugcuaugcagauggccuaccgguucaacggcaucggagugacccagaaugugcuguacgagaaccagaagcugaucgccaaccaguucaacagcgccaucggcaagauccaggacagccugagcagcacagcaagcgcccugggaaagcugcaggacguggucaaccagaaugcccaggcacugaacacccuggucaagcagcuguccuccaacuucggcgccaucagcucugugcugaacgauauccugagcagacuggacaaggucgaggccgaggugcagaucgacagacugaucacaggcagacugcagagccuccagacauacgugacccagcagcugaucagagccgccgagauuagagccucugccaaucuggccgccaccaagaugucugagugugugcugggccagagcaagagaguggacuuuugcggcaagggcuaccaccugaugagcuucccucagucugccccucacggcgugguguuucugcacgugacauaugugcccgcucaagagaagaauuucaccaccgcuccagccaucugccacgacggcaaagcccacuuuccuagagaaggcguguucguguccaacggcacccauugguucgugacacagcggaacuucuacgagccccagaucaucaccaccgacaacaccuucgugucuggcaacugcgacguugugaucggcauugugaacaauaccguguacgacccucugcagcccgagcuggacagcuucaaagaggaacuggacaaguacuuuaagaaccacacaagccccgacguggaccugggcgauaucagcggaaucaaugccagcgucgugaacauccagaaagagaucgaccggcugaacgagguggccaagaaucugaacgagagccugaucgaccugcaagaacuggggaaguacgagcaguacaucaaguggcccugguacaucuggcugggcuuuaucgccggacugauugccaucgugauggucacaaucaugcuguguugcaugaccagcugcuguagcugccugaagggcuguuguagcuguggcagcugcugcaaguucgacgaggacgauucugagcccgugcugaagggcgugaaacugcacuacaccugaggacuaguguccaccugucccuccugggcugcuggauugucucguuuuccugccaaauaaacaggaucagcgcuuuacagaucuaaaaaaaaaaaaaaaaaaaaaaaaaaaaaaaaaaaaaaaaaaaaaaaaaaaaaaaaaaaaaaaaaaaaaaaaaaaaaaaaaaaaaaaaaaaaaaaaaaaa

SEQ ID NO: 25255 - RNA, 4096 nt, Artificial Sequence
  SARS-CoV-2/Wuhan/WIV05/2019__EPI_ISL_402128 spike protein mRNA gc mod (1-1273)(L18F_D80A_D215G_L242del_A243del_L244del_R246I_K417N_E484 K_N501Y_D614G_A701V)
aggagacccgugacccggaaguuguacggcuacgcgacuuucccucccacaaacccucgcgcccuuccuuuccuacuugggcccggcagaaagcuuaccauguucguguuucuggugcugcugccccugguguccagccagugugugaacuucaccaccagaacacagcugccuccagccuacaccaacagcuucaccagaggcguguacuaccccgacaagguguucagauccagcgugcugcacucuacccaggaccuguuccugccuuucuucagcaacgugaccugguuccacgccauccacguguccggcaccaauggcaccaagagauucgccaaccccgugcugcccuucaacgacgggguguacuuugccagcaccgagaaguccaacaucaucagaggcuggaucuucggcaccacacuggacagcaagacccagagccugcugaucgugaacaacgccaccaacguggucaucaaagugugcgaguuccaguucugcaacgaccccuuccugggcgucuacuaccacaagaacaacaagagcuggauggaaagcgaguuccggguguacagcagcgccaacaacugcaccuucgaguacgugucccagccuuuccugauggaccuggaaggcaagcagggcaacuucaagaaccugcgcgaguucguguucaagaacaucgacggcuacuucaaaaucuacagcaagcacaccccuaucaaccucgugcggggccugccucagggcuucucugcucuggaaccccugguggaucugcccaucggcaucaacaucacccgguuucagacacugcacaucagcuaccugacaccuggcgauagcagcagcggauggacagcuggugccgccgcuuacuaugugggcuaccugcagccuagaaccuuccugcugaaguacaacgagaacggcaccaucaccgacgccguggauugugcucuggauccucugagcgagacaaagugcacccugaaguccuucaccguggaaaagggcaucuaccagaccagcaacuuccgggugcagcccaccgaauccaucgugcgguuccccaauaucaccaaucugugccccuucggcgagguguucaaugccaccagauucgccucuguguacgccuggaaccggaagcggaucagcaauugcguggccgacuacuccgugcuguacaacuccgccagcuucagcaccuucaagugcuacggcguguccccuaccaagcugaacgaccugugcuucacaaacguguacgccgacagcuucgugauccggggagaugaagugcggcagauugccccuggacagacaggcaacaucgccgacuacaacuacaagcugcccgacgacuucaccggcugugugauugccuggaacagcaacaaccuggacuccaaagucggcggcaacuacaauuaccuguaccggcuguuccggaaguccaaucugaagcccuucgagcgggacaucagcaccgaaaucuaucaggccggcagcaccccuugcaacggcgugaagggcuucaacugcuacuucccacugcaguccuacggcuuucagcccacauacggcgugggcuaucagcccuacagagugguggugcugagcuucgaacugcugcaugcuccugccacagugugcggcccuaagaaaagcaccaaucucgugaagaacaaaugcgugaacuucaacuucaacggccugaccggcaccggcgugcugacagagagcaacaagaaguuccugccauuccagcaguuuggccgggauaucgccgauaccacagacgccguuagagauccccagacacuggaaauccuggacaucaccccaugcagcuucggcggagugucugugaucaccccuggcaccaacaccagcaaucagguggcagugcuguaccagggcgugaacuguaccgaagugcccguggccauucacgccgaucagcugacaccuacauggcggguguacuccaccggcagcaauguguuucagaccagagccggcugucugaucggagccgagcacgugaacaauagcuacgagugcgacauccccaucggcgcuggcaucugugccagcuaccagacacagacaaacagccccagacgggcuagaagcguggccagccagagcaucauugccuacacaaugucucugggcguggagaacagcguggccuacuccaacaacucuaucgcuauccccaccaacuucaccaucagcgugaccaccgagauccugccuguguccaugaccaagaccagcguggacugcaccauguacaucugcggcgauuccaccgagugcuccaaccugcugcugcaguacggcagcuucugcacccagcugaauagagcccugacagggaucgccguggaacaggacaagaacacccaagagguguucgcccaagugaagcaaaucuacaagaccccuccuaucaaggacuucggcggcuucaauuucagccagauucugcccgauccuagcaagcccagcaagcggagcuucaucgaggaccugcuguucaacaaagugacacuggccgacgccggcuucaucaagcaguauggcgauugucugggcgacauugccgccagggaucugauuugcgcccagaaguuuaacggacugacagugcugccuccucugcugaccgaugagaugaucgcccaguacacaucugcccugcuggccggcacaaucacaagcggcuggacauuuggagcuggcgccgcucugcagauccccuuugcuaugcagauggccuaccgguucaacggcaucggagugacccagaaugugcuguacgagaaccagaagcugaucgccaaccaguucaacagcgccaucggcaagauccaggacagccugagcagcacagcaagcgcccugggaaagcugcaggacguggucaaccagaaugcccaggcacugaacacccuggucaagcagcuguccuccaacuucggcgccaucagcucugugcugaacgauauccugagcagacuggacaaggucgaggccgaggugcagaucgacagacugaucacaggcagacugcagagccuccagacauacgugacccagcagcugaucagagccgccgagauuagagccucugccaaucuggccgccaccaagaugucugagugugugcugggccagagcaagagaguggacuuuugcggcaagggcuaccaccugaugagcuucccucagucugccccucacggcgugguguuucugcacgugacauaugugcccgcucaagagaagaauuucaccaccgcuccagccaucugccacgacggcaaagcccacuuuccuagagaaggcguguucguguccaacggcacccauugguucgugacacagcggaacuucuacgagccccagaucaucaccaccgacaacaccuucgugucuggcaacugcgacguugugaucggcauugugaacaauaccguguacgacccucugcagcccgagcuggacagcuucaaagaggaacuggacaaguacuuuaagaaccacacaagccccgacguggaccugggcgauaucagcggaaucaaugccagcgucgugaacauccagaaagagaucgaccggcugaacgagguggccaagaaucugaacgagagccugaucgaccugcaagaacuggggaaguacgagcaguacaucaaguggcccugguacaucuggcugggcuuuaucgccggacugauugccaucgugauggucacaaucaugcuguguugcaugaccagcugcuguagcugccugaagggcuguuguagcuguggcagcugcugcaaguucgacgaggacgauucugagcccgugcugaagggcgugaaacugcacuacaccugaggacuaguguccaccugucccuccugggcugcuggauugucucguuuuccugccaaauaaacaggaucagcgcuuuacagaucuaaaaaaaaaaaaaaaaaaaaaaaaaaaaaaaaaaaaaaaaaaaaaaaaaaaaaaaaaaaaaaaaaaaaaaaaaaaaaaaaaaaaaaaaaaaaaaaaaaaa

SEQ ID NO: 25256 - RNA, 4105 nt, Artificial Sequence
  SARS-CoV-2/Wuhan/WIV05/2019__EPI_ISL_402128 spike protein mRNA gc mod (1-1273)(E484K_D614G)
aggagacccgugacccggaaguuguacggcuacgcgacuuucccucccacaaacccucgcgcccuuccuuuccuacuugggcccggcagaaagcuuaccauguucguguuucuggugcugcugccccugguguccagccagugugugaaccugaccaccagaacacagcugccuccagccuacaccaacagcuucaccagaggcguguacuaccccgacaagguguucagauccagcgugcugcacucuacccaggaccuguuccugccuuucuucagcaacgugaccugguuccacgccauccacguguccggcaccaauggcaccaagagauucgacaaccccgugcugcccuucaacgacgggguguacuuugccagcaccgagaaguccaacaucaucagaggcuggaucuucggcaccacacuggacagcaagacccagagccugcugaucgugaacaacgccaccaacguggucaucaaagugugcgaguuccaguucugcaacgaccccuuccugggcgucuacuaccacaagaacaacaagagcuggauggaaagcgaguuccggguguacagcagcgccaacaacugcaccuucgaguacgugucccagccuuuccugauggaccuggaaggcaagcagggcaacuucaagaaccugcgcgaguucguguucaagaacaucgacggcuacuucaaaaucuacagcaagcacaccccuaucaaccucgugcgggaucugccucagggcuucucugcucuggaaccccugguggaucugcccaucggcaucaacaucacccgguuucagacacugcuggcccugcacagaagcuaccugacaccuggcgauagcagcagcggauggacagcuggugccgccgcuuacuaugugggcuaccugcagccuagaaccuuccugcugaaguacaacgagaacggcaccaucaccgacgccguggauugugcucuggauccucugagcgagacaaagugcacccugaaguccuucaccguggaaaagggcaucuaccagaccagcaacuuccgggugcagcccaccgaauccaucgugcgguuccccaauaucaccaaucugugccccuucggcgagguguucaaugccaccagauucgccucuguguacgccuggaaccggaagcggaucagcaauugcguggccgacuacuccgugcuguacaacuccgccagcuucagcaccuucaagugcuacggcguguccccuaccaagcugaacgaccugugcuucacaaacguguacgccgacagcuucgugauccggggagaugaagugcggcagauugccccuggacagacaggcaagaucgccgacuacaacuacaagcugcccgacgacuucaccggcugugugauugccuggaacagcaacaaccuggacuccaaagucggcggcaacuacaauuaccuguaccggcuguuccggaaguccaaucugaagcccuucgagcgggacaucagcaccgaaaucuaucaggccggcagcaccccuugcaacggcgugaagggcuucaacugcuacuucccacugcaguccuacggcuuucagcccacaaauggcgugggcuaucagcccuacagagugguggugcugagcuucgaacugcugcaugcuccugccacagugugcggcccuaagaaaagcaccaaucucgugaagaacaaaugcgugaacuucaacuucaacggccugaccggcaccggcgugcugacagagagcaacaagaaguuccugccauuccagcaguuuggccgggauaucgccgauaccacagacgccguuagagauccccagacacuggaaauccuggacaucaccccaugcagcuucggcggagugucugugaucaccccuggcaccaacaccagcaaucagguggcagugcuguaccagggcgugaacuguaccgaagugcccguggccauucacgccgaucagcugacaccuacauggcggguguacuccaccggcagcaauguguuucagaccagagccggcugucugaucggagccgagcacgugaacaauagcuacgagugcgacauccccaucggcgcuggcaucugugccagcuaccagacacagacaaacagccccagacgggcuagaagcguggccagccagagcaucauugccuacacaaugucucugggcgccgagaacagcguggccuacuccaacaacucuaucgcuauccccaccaacuucaccaucagcgugaccaccgagauccugccuguguccaugaccaagaccagcguggacugcaccauguacaucugcggcgauuccaccgagugcuccaaccugcugcugcaguacggcagcuucugcacccagcugaauagagcccugacagggaucgccguggaacaggacaagaacacccaagagguguucgcccaagugaagcaaaucuacaagaccccuccuaucaaggacuucggcggcuucaauuucagccagauucugcccgauccuagcaagcccagcaagcggagcuucaucgaggaccugcuguucaacaaagugacacuggccgacgccggcuucaucaagcaguauggcgauugucugggcgacauugccgccagggaucugauuugcgcccagaaguuuaacggacugacagugcugccuccucugcugaccgaugagaugaucgcccaguacacaucugcccugcuggccggcacaaucacaagcggcuggacauuuggagcuggcgccgcucugcagauccccuuugcuaugcagauggccuaccgguucaacggcaucggagugacccagaaugugcuguacgagaaccagaagcugaucgccaaccaguucaacagcgccaucggcaagauccaggacagccugagcagcacagcaagcgcccugggaaagcugcaggacguggucaaccagaaugcccaggcacugaacacccuggucaagcagcuguccuccaacuucggcgccaucagcucugugcugaacgauauccugagcagacuggacaaggucgaggccgaggugcagaucgacagacugaucacaggcagacugcagagccuccagacauacgugacccagcagcugaucagagccgccgagauuagagccucugccaaucuggccgccaccaagaugucugagugugugcugggccagagcaagagaguggacuuuugcggcaagggcuaccaccugaugagcuucccucagucugccccucacggcgugguguuucugcacgugacauaugugcccgcucaagagaagaauuucaccaccgcuccagccaucugccacgacggcaaagcccacuuuccuagagaaggcguguucguguccaacggcacccauugguucgugacacagcggaacuucuacgagccccagaucaucaccaccgacaacaccuucgugucuggcaacugcgacguugugaucggcauugugaacaauaccguguacgacccucugcagcccgagcuggacagcuucaaagaggaacuggacaaguacuuuaagaaccacacaagccccgacguggaccugggcgauaucagcggaaucaaugccagcgucgugaacauccagaaagagaucgaccggcugaacgagguggccaagaaucugaacgagagccugaucgaccugcaagaacuggggaaguacgagcaguacaucaaguggcccugguacaucuggcugggcuuuaucgccggacugauugccaucgugauggucacaaucaugcuguguugcaugaccagcugcuguagcugccugaagggcuguuguagcuguggcagcugcugcaaguucgacgaggacgauucugagcccgugcugaagggcgugaaacugcacuacaccugaggacuaguguccaccugucccuccugggcugcuggauugucucguuuuccugccaaauaaacaggaucagcgcuuuacagaucuaaaaaaaaaaaaaaaaaaaaaaaaaaaaaaaaaaaaaaaaaaaaaaaaaaaaaaaaaaaaaaaaaaaaaaaaaaaaaaaaaaaaaaaaaaaaaaaaaaaa

SEQ ID NO: 25257 - RNA, 4105 nt, Artificial Sequence
  SARS-CoV-2/Wuhan/WIV05/2019__EPI_ISL_402128 spike protein mRNA gc mod (1-1273)(L18F_T20N_P26S_D138Y_R190S_K417T_E484K_N501Y_D614G_H655Y _T1027I)
aggagacccgugacccggaaguuguacggcuacgcgacuuucccucccacaaacccucgcgcccuuccuuuccuacuugggcccggcagaaagcuuaccauguucguguuucuggugcugcugccccugguguccagccagugugugaacuucaccaacagaacacagcugccuagcgccuacaccaacagcuucaccagaggcguguacuaccccgacaagguguucagauccagcgugcugcacucuacccaggaccuguuccugccuuucuucagcaacgugaccugguuccacgccauccacguguccggcaccaauggcaccaagagauucgacaaccccgugcugcccuucaacgacgggguguacuuugccagcaccgagaaguccaacaucaucagaggcuggaucuucggcaccacacuggacagcaagacccagagccugcugaucgugaacaacgccaccaacguggucaucaaagugugcgaguuccaguucugcaacuaccccuuccugggcgucuacuaccacaagaacaacaagagcuggauggaaagcgaguuccggguguacagcagcgccaacaacugcaccuucgaguacgugucccagccuuuccugauggaccuggaaggcaagcagggcaacuucaagaaccugagcgaguucguguucaagaacaucgacggcuacuucaaaaucuacagcaagcacaccccuaucaaccucgugcgggaucugccucagggcuucucugcucuggaaccccugguggaucugcccaucggcaucaacaucacccgguuucagacacugcuggcccugcacagaagcuaccugacaccuggcgauagcagcagcggauggacagcuggugccgccgcuuacuaugugggcuaccugcagccuagaaccuuccugcugaaguacaacgagaacggcaccaucaccgacgccguggauugugcucuggauccucugagcgagacaaagugcacccugaaguccuucaccguggaaaagggcaucuaccagaccagcaacuuccgggugcagcccaccgaauccaucgugcgguuccccaauaucaccaaucugugccccuucggcgagguguucaaugccaccagauucgccucuguguacgccuggaaccggaagcggaucagcaauugcguggccgacuacuccgugcuguacaacuccgccagcuucagcaccuucaagugcuacggcguguccccuaccaagcugaacgaccugugcuucacaaacguguacgccgacagcuucgugauccggggagaugaagugcggcagauugccccuggacagacaggcaccaucgccgacuacaacuacaagcugcccgacgacuucaccggcugugugauugccuggaacagcaacaaccuggacuccaaagucggcggcaacuacaauuaccuguaccggcuguuccggaaguccaaucugaagcccuucgagcgggacaucagcaccgaaaucuaucaggccggcagcaccccuugcaacggcgugaagggcuucaacugcuacuucccacugcaguccuacggcuuucagcccacauacggcgugggcuaucagcccuacagagugguggugcugagcuucgaacugcugcaugcuccugccacagugugcggcccuaagaaaagcaccaaucucgugaagaacaaaugcgugaacuucaacuucaacggccugaccggcaccggcgugcugacagagagcaacaagaaguuccugccauuccagcaguuuggccgggauaucgccgauaccacagacgccguuagagauccccagacacuggaaauccuggacaucaccccaugcagcuucggcggagugucugugaucaccccuggcaccaacaccagcaaucagguggcagugcuguaccagggcgugaacuguaccgaagugcccguggccauucacgccgaucagcugacaccuacauggcggguguacuccaccggcagcaauguguuucagaccagagccggcugucugaucggagccgaguacgugaacaauagcuacgagugcgacauccccaucggcgcuggcaucugugccagcuaccagacacagacaaacagccccagacgggcuagaagcguggccagccagagcaucauugccuacacaaugucucugggcgccgagaacagcguggccuacuccaacaacucuaucgcuauccccaccaacuucaccaucagcgugaccaccgagauccugccuguguccaugaccaagaccagcguggacugcaccauguacaucugcggcgauuccaccgagugcuccaaccugcugcugcaguacggcagcuucugcacccagcugaauagagcccugacagggaucgccguggaacaggacaagaacacccaagagguguucgcccaagugaagcaaaucuacaagaccccuccuaucaaggacuucggcggcuucaauuucagccagauucugcccgauccuagcaagcccagcaagcggagcuucaucgaggaccugcuguucaacaaagugacacuggccgacgccggcuucaucaagcaguauggcgauugucugggcgacauugccgccagggaucugauuugcgcccagaaguuuaacggacugacagugcugccuccucugcugaccgaugagaugaucgcccaguacacaucugcccugcuggccggcacaaucacaagcggcuggacauuuggagcuggcgccgcucugcagauccccuuugcuaugcagauggccuaccgguucaacggcaucggagugacccagaaugugcuguacgagaaccagaagcugaucgccaaccaguucaacagcgccaucggcaagauccaggacagccugagcagcacagcaagcgcccugggaaagcugcaggacguggucaaccagaaugcccaggcacugaacacccuggucaagcagcuguccuccaacuucggcgccaucagcucugugcugaacgauauccugagcagacuggacaaggucgaggccgaggugcagaucgacagacugaucacaggcagacugcagagccuccagacauacgugacccagcagcugaucagagccgccgagauuagagccucugccaaucuggccgccaucaagaugucugagugugugcugggccagagcaagagaguggacuuuugcggcaagggcuaccaccugaugagcuucccucagucugccccucacggcgugguguuucugcacgugacauaugugcccgcucaagagaagaauuucaccaccgcuccagccaucugccacgacggcaaagcccacuuuccuagagaaggcguguucguguccaacggcacccauugguucgugacacagcggaacuucuacgagccccagaucaucaccaccgacaacaccuucgugucuggcaacugcgacguugugaucggcauugugaacaauaccguguacgacccucugcagcccgagcuggacagcuucaaagaggaacuggacaaguacuuuaagaaccacacaagccccgacguggaccugggcgauaucagcggaaucaaugccagcgucgugaacauccagaaagagaucgaccggcugaacgagguggccaagaaucugaacgagagccugaucgaccugcaagaacuggggaaguacgagcaguacaucaaguggcccugguacaucuggcugggcuuuaucgccggacugauugccaucgugauggucacaaucaugcuguguugcaugaccagcugcuguagcugccugaagggcuguuguagcuguggcagcugcugcaaguucgacgaggacgauucugagcccgugcugaagggcgugaaacugcacuacaccugaggacuaguguccaccugucccuccugggcugcuggauugucucguuuuccugccaaauaaacaggaucagcgcuuuacagaucuaaaaaaaaaaaaaaaaaaaaaaaaaaaaaaaaaaaaaaaaaaaaaaaaaaaaaaaaaaaaaaaaaaaaaaaaaaaaaaaaaaaaaaaaaaaaaaaaaaaa

SEQ ID NO: 25258 - RNA, 4105 nt, Artificial Sequence
  SARS-CoV-2/Wuhan/WIV05/2019__EPI_ISL_402128 spike protein mRNA gc mod (1-1273)(S13I_W152C_L452R_D614G)
aggagacccgugacccggaaguuguacggcuacgcgacuuucccucccacaaacccucgcgcccuuccuuuccuacuugggcccggcagaaagcuuaccauguucguguuucuggugcugcugccccugguguccauccagugugugaaccugaccaccagaacacagcugccuccagccuacaccaacagcuucaccagaggcguguacuaccccgacaagguguucagauccagcgugcugcacucuacccaggaccuguuccugccuuucuucagcaacgugaccugguuccacgccauccacguguccggcaccaauggcaccaagagauucgacaaccccgugcugcccuucaacgacgggguguacuuugccagcaccgagaaguccaacaucaucagaggcuggaucuucggcaccacacuggacagcaagacccagagccugcugaucgugaacaacgccaccaacguggucaucaaagugugcgaguuccaguucugcaacgaccccuuccugggcgucuacuaccacaagaacaacaagagcugcauggaaagcgaguuccggguguacagcagcgccaacaacugcaccuucgaguacgugucccagccuuuccugauggaccuggaaggcaagcagggcaacuucaagaaccugcgcgaguucguguucaagaacaucgacggcuacuucaaaaucuacagcaagcacaccccuaucaaccucgugcgggaucugccucagggcuucucugcucuggaaccccugguggaucugcccaucggcaucaacaucacccgguuucagacacugcuggcccugcacagaagcuaccugacaccuggcgauagcagcagcggauggacagcuggugccgccgcuuacuaugugggcuaccugcagccuagaaccuuccugcugaaguacaacgagaacggcaccaucaccgacgccguggauugugcucuggauccucugagcgagacaaagugcacccugaaguccuucaccguggaaaagggcaucuaccagaccagcaacuuccgggugcagcccaccgaauccaucgugcgguuccccaauaucaccaaucugugccccuucggcgagguguucaaugccaccagauucgccucuguguacgccuggaaccggaagcggaucagcaauugcguggccgacuacuccgugcuguacaacuccgccagcuucagcaccuucaagugcuacggcguguccccuaccaagcugaacgaccugugcuucacaaacguguacgccgacagcuucgugauccggggagaugaagugcggcagauugccccuggacagacaggcaagaucgccgacuacaacuacaagcugcccgacgacuucaccggcugugugauugccuggaacagcaacaaccuggacuccaaagucggcggcaacuacaauuaccgcuaccggcuguuccggaaguccaaucugaagcccuucgagcgggacaucagcaccgaaaucuaucaggccggcagcaccccuugcaacggcguggaaggcuucaacugcuacuucccacugcaguccuacggcuuucagcccacaaauggcgugggcuaucagcccuacagagugguggugcugagcuucgaacugcugcaugcuccugccacagugugcggcccuaagaaaagcaccaaucucgugaagaacaaaugcgugaacuucaacuucaacggccugaccggcaccggcgugcugacagagagcaacaagaaguuccugccauuccagcaguuuggccgggauaucgccgauaccacagacgccguuagagauccccagacacuggaaauccuggacaucaccccaugcagcuucggcggagugucugugaucaccccuggcaccaacaccagcaaucagguggcagugcuguaccagggcgugaacuguaccgaagugcccguggccauucacgccgaucagcugacaccuacauggcggguguacuccaccggcagcaauguguuucagaccagagccggcugucugaucggagccgagcacgugaacaauagcuacgagugcgacauccccaucggcgcuggcaucugugccagcuaccagacacagacaaacagccccagacgggcuagaagcguggccagccagagcaucauugccuacacaaugucucugggcgccgagaacagcguggccuacuccaacaacucuaucgcuauccccaccaacuucaccaucagcgugaccaccgagauccugccuguguccaugaccaagaccagcguggacugcaccauguacaucugcggcgauuccaccgagugcuccaaccugcugcugcaguacggcagcuucugcacccagcugaauagagcccugacagggaucgccguggaacaggacaagaacacccaagagguguucgcccaagugaagcaaaucuacaagaccccuccuaucaaggacuucggcggcuucaauuucagccagauucugcccgauccuagcaagcccagcaagcggagcuucaucgaggaccugcuguucaacaaagugacacuggccgacgccggcuucaucaagcaguauggcgauugucugggcgacauugccgccagggaucugauuugcgcccagaaguuuaacggacugacagugcugccuccucugcugaccgaugagaugaucgcccaguacacaucugcccugcuggccggcacaaucacaagcggcuggacauuuggagcuggcgccgcucugcagauccccuuugcuaugcagauggccuaccgguucaacggcaucggagugacccagaaugugcuguacgagaaccagaagcugaucgccaaccaguucaacagcgccaucggcaagauccaggacagccugagcagcacagcaagcgcccugggaaagcugcaggacguggucaaccagaaugcccaggcacugaacacccuggucaagcagcuguccuccaacuucggcgccaucagcucugugcugaacgauauccugagcagacuggacaaggucgaggccgaggugcagaucgacagacugaucacaggcagacugcagagccuccagacauacgugacccagcagcugaucagagccgccgagauuagagccucugccaaucuggccgccaccaagaugucugagugugugcugggccagagcaagagaguggacuuuugcggcaagggcuaccaccugaugagcuucccucagucugccccucacggcgugguguuucugcacgugacauaugugcccgcucaagagaagaauuucaccaccgcuccagccaucugccacgacggcaaagcccacuuuccuagagaaggcguguucguguccaacggcacccauugguucgugacacagcggaacuucuacgagccccagaucaucaccaccgacaacaccuucgugucuggcaacugcgacguugugaucggcauugugaacaauaccguguacgacccucugcagcccgagcuggacagcuucaaagaggaacuggacaaguacuuuaagaaccacacaagccccgacguggaccugggcgauaucagcggaaucaaugccagcgucgugaacauccagaaagagaucgaccggcugaacgagguggccaagaaucugaacgagagccugaucgaccugcaagaacuggggaaguacgagcaguacaucaaguggcccugguacaucuggcugggcuuuaucgccggacugauugccaucgugauggucacaaucaugcuguguugcaugaccagcugcuguagcugccugaagggcuguuguagcuguggcagcugcugcaaguucgacgaggacgauucugagcccgugcugaagggcgugaaacugcacuacaccugaggacuaguguccaccugucccuccugggcugcuggauugucucguuuuccugccaaauaaacaggaucagcgcuuuacagaucuaaaaaaaaaaaaaaaaaaaaaaaaaaaaaaaaaaaaaaaaaaaaaaaaaaaaaaaaaaaaaaaaaaaaaaaaaaaaaaaaaaaaaaaaaaaaaaaaaaaa

SEQ ID NO: 25259 - RNA, 4105 nt, Artificial Sequence
  SARS-CoV-2/Wuhan/WIV05/2019__EPI_ISL_402128 spike protein mRNA gc mod (1-1273)
aggagacccgugacccggaaguuguacggcuacgcgacuuucccucccacaaacccucgcgcccuuccuuuccuacuugggcccggcagaaagcuuaccauguucguguuccuggugcugcugccucugguguccagccagugugugaaccugaccaccagaacacagcugccuccagccuacaccaacagcuuuaccagaggcguguacuaccccgacaagguguucagauccagcgugcugcacucuacccaggaccuguuccugccuuucuucagcaacgugaccugguuccacgccauccacguguccggcaccaauggcaccaagagauucgacaaccccgugcugcccuucaacgacgggguguacuuugccagcaccgagaaguccaacaucaucagaggcuggaucuucggcaccacacuggacagcaagacccagagccugcugaucgugaacaacgccaccaacguggucaucaaagugugcgaguuccaguucugcaacgaccccuuccugggcgucuacuaccacaagaacaacaagagcuggauggaaagcgaguuccggguguacagcagcgccaacaacugcaccuucgaguacgugucccagccuuuccugauggaccuggaaggcaagcagggcaacuucaagaaccugcgcgaguucguguuuaagaacaucgacggcuacuucaagaucuacagcaagcacaccccuaucaaccucgugcgggaucugccucagggcuucucugcucuggaaccccugguggaucugcccaucggcaucaacaucacccgguuucagacacugcuggcccugcacagaagcuaccugacaccuggcgauagcagcagcggauggacagcuggugccgccgcuuacuaugugggcuaccugcagccuagaaccuuccugcugaaguacaacgagaacggcaccaucaccgacgccguggauugugcucuggauccucugagcgagacaaagugcacccugaaguccuucaccguggaaaagggcaucuaccagaccagcaacuuccgggugcagcccaccgaauccaucgugcgguuccccaauaucaccaaucugugccccuucggcgagguguucaaugccaccagauucgccucuguguacgccuggaaccggaagcggaucagcaauugcguggccgacuacuccgugcuguacaacuccgccagcuucagcaccuucaagugcuacggcguguccccuaccaagcugaacgaccugugcuucacaaacguguacgccgacagcuucgugauccggggagaugaagugcggcagauugccccuggacagacaggcaagaucgccgacuacaacuacaagcugcccgacgacuucaccggcugugugauugccuggaacagcaacaaccuggacuccaaagucggcggcaacuacaauuaccuguaccggcuguuccggaaguccaaucugaagcccuucgagcgggacaucuccaccgagaucuaucaggccggcagcaccccuuguaacggcguggaaggcuucaacugcuacuucccacugcaguccuacggcuuucagcccacaaauggcgugggcuaucagcccuacagagugguggugcugagcuucgaacugcugcaugccccugccacagugugcggcccuaagaaaagcaccaaucucgugaagaacaaaugcgugaacuucaacuucaacggccugaccggcaccggcgugcugacagagagcaacaagaaguuccugccauuccagcaguuuggccgggauaucgccgauaccacagacgccguuagagauccccagacacuggaaauccuggacaucaccccuugcagcuucggcggagugucugugaucaccccuggcaccaacaccagcaaucagguggcagugcuguaccaggacgugaacuguaccgaagugcccguggccauucacgccgaucagcugacaccuacauggcggguguacuccaccggcagcaauguguuucagaccagagccggcugucugaucggagccgagcacgugaacaauagcuacgagugcgacauccccaucggcgcuggaaucugcgccagcuaccagacacagacaaacagcccucggagagccagaagcguggccagccagagcaucauugccuacacaaugucucugggcgccgagaacagcguggccuacuccaacaacucuaucgcuauccccaccaacuucaccaucagcgugaccacagagauccugccuguguccaugaccaagaccagcguggacugcaccauguacaucugcggcgauuccaccgagugcuccaaccugcugcugcaguacggcagcuucugcacccagcugaauagagcccugacagggaucgccguggaacaggacaagaacacccaagagguguucgcccaagugaagcagaucuacaagaccccuccuaucaaggacuucggcggcuucaauuucagccagauucugcccgauccuagcaagcccagcaagcggagcuucaucgaggaccugcuguucaacaaagugacacuggccgacgccggcuucaucaagcaguauggcgauugucugggcgacauugccgccagggaucugauuugcgcccagaaguuuaacggacugacagugcugccuccucugcugaccgaugagaugaucgcccaguacacaucugcccugcuggccggcacaaucacaagcggcuggacauuuggagcaggcgccgcucugcagauccccuuugcuaugcagauggccuaccgguucaacggcaucggagugacccagaaugugcuguacgagaaccagaagcugaucgccaaccaguucaacagcgccaucggcaagauccaggacagccugagcagcacagcaagcgcccugggaaagcugcaggacguggucaaccagaaugcccaggcacugaacacccuggucaagcagcuguccuccaacuucggcgccaucagcucugugcugaacgauauccugagcagacuggacaaggucgaggccgaggugcagaucgacagacugaucacaggcagacugcagagccuccagacauacgugacccagcagcugaucagagccgccgagauuagagccucugccaaucuggccgccaccaagaugucugagugugugcugggccagagcaagagaguggacuuuugcggcaagggcuaccaccugaugagcuucccucagucugccccucacggcgugguguuucugcacgugacauaugugcccgcucaagagaagaauuucaccaccgcuccagccaucugccacgacggcaaagcccacuuuccuagagaaggcguguucguguccaacggcacccauugguucgugacacagcggaacuucuacgagccccagaucaucaccaccgacaacaccuucgugucuggcaacugcgacgucgugaucggcauugugaacaauaccguguacgacccucugcagcccgagcuggacagcuucaaagaggaacuggacaaguacuuuaagaaccacacaagccccgacguggaccugggcgauaucagcggaaucaaugccagcgucgugaacauccagaaagagaucgaccggcugaacgagguggccaagaaucugaacgagagccugaucgaccugcaagaacuggggaaguacgagcaguacaucaaguggcccugguacaucuggcugggcuuuaucgccggacugauugccaucgugauggucacaaucaugcuguguugcaugaccagcugcuguagcugccugaagggcuguuguagcuguggcagcugcugcaaguucgacgaggacgauucugagcccgugcugaagggcgugaaacugcacuacacaugaggacuaguguccaccugucccuccugggcugcuggauugucucguuuuccugccaaauaaacaggaucagcgcuuuacagaucuaaaaaaaaaaaaaaaaaaaaaaaaaaaaaaaaaaaaaaaaaaaaaaaaaaaaaaaaaaaaaaaaaaaaaaaaaaaaaaaaaaaaaaaaaaaaaaaaaaaa

SEQ ID NO: 25260 - RNA, 4105 nt, Artificial Sequence
  SARS-CoV-2/Wuhan/WIV05/2019__EPI_ISL_402128 spike protein mRNA gc mod (1-1273)(D614G)
aggagacccgugacccggaaguuguacggcuacgcgacuuucccucccacaaacccucgcgcccuuccuuuccuacuugggcccggcagaaagcuuaccauguucguguuccuggugcugcugccucugguguccagccagugugugaaccugaccaccagaacacagcugccuccagccuacaccaacagcuuuaccagaggcguguacuaccccgacaagguguucagauccagcgugcugcacucuacccaggaccuguuccugccuuucuucagcaacgugaccugguuccacgccauccacguguccggcaccaauggcaccaagagauucgacaaccccgugcugcccuucaacgacgggguguacuuugccagcaccgagaaguccaacaucaucagaggcuggaucuucggcaccacacuggacagcaagacccagagccugcugaucgugaacaacgccaccaacguggucaucaaagugugcgaguuccaguucugcaacgaccccuuccugggcgucuacuaccacaagaacaacaagagcuggauggaaagcgaguuccggguguacagcagcgccaacaacugcaccuucgaguacgugucccagccuuuccugauggaccuggaaggcaagcagggcaacuucaagaaccugcgcgaguucguguuuaagaacaucgacggcuacuucaagaucuacagcaagcacaccccuaucaaccucgugcgggaucugccucagggcuucucugcucuggaaccccugguggaucugcccaucggcaucaacaucacccgguuucagacacugcuggcccugcacagaagcuaccugacaccuggcgauagcagcagcggauggacagcuggugccgccgcuuacuaugugggcuaccugcagccuagaaccuuccugcugaaguacaacgagaacggcaccaucaccgacgccguggauugugcucuggauccucugagcgagacaaagugcacccugaaguccuucaccguggaaaagggcaucuaccagaccagcaacuuccgggugcagcccaccgaauccaucgugcgguuccccaauaucaccaaucugugccccuucggcgagguguucaaugccaccagauucgccucuguguacgccuggaaccggaagcggaucagcaauugcguggccgacuacuccgugcuguacaacuccgccagcuucagcaccuucaagugcuacggcguguccccuaccaagcugaacgaccugugcuucacaaacguguacgccgacagcuucgugauccggggagaugaagugcggcagauugccccuggacagacaggcaagaucgccgacuacaacuacaagcugcccgacgacuucaccggcugugugauugccuggaacagcaacaaccuggacuccaaagucggcggcaacuacaauuaccuguaccggcuguuccggaaguccaaucugaagcccuucgagcgggacaucuccaccgagaucuaucaggccggcagcaccccuuguaacggcguggaaggcuucaacugcuacuucccacugcaguccuacggcuuucagcccacaaauggcgugggcuaucagcccuacagagugguggugcugagcuucgaacugcugcaugccccugccacagugugcggcccuaagaaaagcaccaaucucgugaagaacaaaugcgugaacuucaacuucaacggccugaccggcaccggcgugcugacagagagcaacaagaaguuccugccauuccagcaguuuggccgggauaucgccgauaccacagacgccguuagagauccccagacacuggaaauccuggacaucaccccuugcagcuucggcggagugucugugaucaccccuggcaccaacaccagcaaucagguggcagugcuguaccagggcgugaacuguaccgaagugcccguggccauucacgccgaucagcugacaccuacauggcggguguacuccaccggcagcaauguguuucagaccagagccggcugucugaucggagccgagcacgugaacaauagcuacgagugcgacauccccaucggcgcuggaaucugcgccagcuaccagacacagacaaacagcccucggagagccagaagcguggccagccagagcaucauugccuacacaaugucucugggcgccgagaacagcguggccuacuccaacaacucuaucgcuauccccaccaacuucaccaucagcgugaccacagagauccugccuguguccaugaccaagaccagcguggacugcaccauguacaucugcggcgauuccaccgagugcuccaaccugcugcugcaguacggcagcuucugcacccagcugaauagagcccugacagggaucgccguggaacaggacaagaacacccaagagguguucgcccaagugaagcagaucuacaagaccccuccuaucaaggacuucggcggcuucaauuucagccagauucugcccgauccuagcaagcccagcaagcggagcuucaucgaggaccugcuguucaacaaagugacacuggccgacgccggcuucaucaagcaguauggcgauugucugggcgacauugccgccagggaucugauuugcgcccagaaguuuaacggacugacagugcugccuccucugcugaccgaugagaugaucgcccaguacacaucugcccugcuggccggcacaaucacaagcggcuggacauuuggagcaggcgccgcucugcagauccccuuugcuaugcagauggccuaccgguucaacggcaucggagugacccagaaugugcuguacgagaaccagaagcugaucgccaaccaguucaacagcgccaucggcaagauccaggacagccugagcagcacagcaagcgcccugggaaagcugcaggacguggucaaccagaaugcccaggcacugaacacccuggucaagcagcuguccuccaacuucggcgccaucagcucugugcugaacgauauccugagcagacuggacaaggucgaggccgaggugcagaucgacagacugaucacaggcagacugcagagccuccagacauacgugacccagcagcugaucagagccgccgagauuagagccucugccaaucuggccgccaccaagaugucugagugugugcugggccagagcaagagaguggacuuuugcggcaagggcuaccaccugaugagcuucccucagucugccccucacggcgugguguuucugcacgugacauaugugcccgcucaagagaagaauuucaccaccgcuccagccaucugccacgacggcaaagcccacuuuccuagagaaggcguguucguguccaacggcacccauugguucgugacacagcggaacuucuacgagccccagaucaucaccaccgacaacaccuucgugucuggcaacugcgacgucgugaucggcauugugaacaauaccguguacgacccucugcagcccgagcuggacagcuucaaagaggaacuggacaaguacuuuaagaaccacacaagccccgacguggaccugggcgauaucagcggaaucaaugccagcgucgugaacauccagaaagagaucgaccggcugaacgagguggccaagaaucugaacgagagccugaucgaccugcaagaacuggggaaguacgagcaguacaucaaguggcccugguacaucuggcugggcuuuaucgccggacugauugccaucgugauggucacaaucaugcuguguugcaugaccagcugcuguagcugccugaagggcuguuguagcuguggcagcugcugcaaguucgacgaggacgauucugagcccgugcugaagggcgugaaacugcacuacacaugaggacuaguguccaccugucccuccugggcugcuggauugucucguuuuccugccaaauaaacaggaucagcgcuuuacagaucuaaaaaaaaaaaaaaaaaaaaaaaaaaaaaaaaaaaaaaaaaaaaaaaaaaaaaaaaaaaaaaaaaaaaaaaaaaaaaaaaaaaaaaaaaaaaaaaaaaaa

SEQ ID NO: 25261 - RNA, 4105 nt, Artificial Sequence
  SARS-CoV-2/Wuhan/WIV05/2019__EPI_ISL_402128 spike protein mRNA gc mod (1-1273)(A222V_D614G)
aggagacccgugacccggaaguuguacggcuacgcgacuuucccucccacaaacccucgcgcccuuccuuuccuacuugggcccggcagaaagcuuaccauguucguguuccuggugcugcugccucugguguccagccagugugugaaccugaccaccagaacacagcugccuccagccuacaccaacagcuuuaccagaggcguguacuaccccgacaagguguucagauccagcgugcugcacucuacccaggaccuguuccugccuuucuucagcaacgugaccugguuccacgccauccacguguccggcaccaauggcaccaagagauucgacaaccccgugcugcccuucaacgacgggguguacuuugccagcaccgagaaguccaacaucaucagaggcuggaucuucggcaccacacuggacagcaagacccagagccugcugaucgugaacaacgccaccaacguggucaucaaagugugcgaguuccaguucugcaacgaccccuuccugggcgucuacuaccacaagaacaacaagagcuggauggaaagcgaguuccggguguacagcagcgccaacaacugcaccuucgaguacgugucccagccuuuccugauggaccuggaaggcaagcagggcaacuucaagaaccugcgcgaguucguguuuaagaacaucgacggcuacuucaagaucuacagcaagcacaccccuaucaaccucgugcgggaucugccucagggcuucucugugcuggaaccccugguggaucugcccaucggcaucaacaucacccgguuucagacacugcuggcccugcacagaagcuaccugacaccuggcgauagcagcagcggauggacagcuggugccgccgcuuacuaugugggcuaccugcagccuagaaccuuccugcugaaguacaacgagaacggcaccaucaccgacgccguggauugugcucuggauccucugagcgagacaaagugcacccugaaguccuucaccguggaaaagggcaucuaccagaccagcaacuuccgggugcagcccaccgaauccaucgugcgguuccccaauaucaccaaucugugccccuucggcgagguguucaaugccaccagauucgccucuguguacgccuggaaccggaagcggaucagcaauugcguggccgacuacuccgugcuguacaacuccgccagcuucagcaccuucaagugcuacggcguguccccuaccaagcugaacgaccugugcuucacaaacguguacgccgacagcuucgugauccggggagaugaagugcggcagauugccccuggacagacaggcaagaucgccgacuacaacuacaagcugcccgacgacuucaccggcugugugauugccuggaacagcaacaaccuggacuccaaagucggcggcaacuacaauuaccuguaccggcuguuccggaaguccaaucugaagcccuucgagcgggacaucuccaccgagaucuaucaggccggcagcaccccuuguaacggcguggaaggcuucaacugcuacuucccacugcaguccuacggcuuucagcccacaaauggcgugggcuaucagcccuacagagugguggugcugagcuucgaacugcugcaugccccugccacagugugcggcccuaagaaaagcaccaaucucgugaagaacaaaugcgugaacuucaacuucaacggccugaccggcaccggcgugcugacagagagcaacaagaaguuccugccauuccagcaguuuggccgggauaucgccgauaccacagacgccguuagagauccccagacacuggaaauccuggacaucaccccuugcagcuucggcggagugucugugaucaccccuggcaccaacaccagcaaucagguggcagugcuguaccagggcgugaacuguaccgaagugcccguggccauucacgccgaucagcugacaccuacauggcggguguacuccaccggcagcaauguguuucagaccagagccggcugucugaucggagccgagcacgugaacaauagcuacgagugcgacauccccaucggcgcuggaaucugcgccagcuaccagacacagacaaacagcccucggagagccagaagcguggccagccagagcaucauugccuacacaaugucucugggcgccgagaacagcguggccuacuccaacaacucuaucgcuauccccaccaacuucaccaucagcgugaccacagagauccugccuguguccaugaccaagaccagcguggacugcaccauguacaucugcggcgauuccaccgagugcuccaaccugcugcugcaguacggcagcuucugcacccagcugaauagagcccugacagggaucgccguggaacaggacaagaacacccaagagguguucgcccaagugaagcagaucuacaagaccccuccuaucaaggacuucggcggcuucaauuucagccagauucugcccgauccuagcaagcccagcaagcggagcuucaucgaggaccugcuguucaacaaagugacacuggccgacgccggcuucaucaagcaguauggcgauugucugggcgacauugccgccagggaucugauuugcgcccagaaguuuaacggacugacagugcugccuccucugcugaccgaugagaugaucgcccaguacacaucugcccugcuggccggcacaaucacaagcggcuggacauuuggagcaggcgccgcucugcagauccccuuugcuaugcagauggccuaccgguucaacggcaucggagugacccagaaugugcuguacgagaaccagaagcugaucgccaaccaguucaacagcgccaucggcaagauccaggacagccugagcagcacagcaagcgcccugggaaagcugcaggacguggucaaccagaaugcccaggcacugaacacccuggucaagcagcuguccuccaacuucggcgccaucagcucugugcugaacgauauccugagcagacuggacaaggucgaggccgaggugcagaucgacagacugaucacaggcagacugcagagccuccagacauacgugacccagcagcugaucagagccgccgagauuagagccucugccaaucuggccgccaccaagaugucugagugugugcugggccagagcaagagaguggacuuuugcggcaagggcuaccaccugaugagcuucccucagucugccccucacggcgugguguuucugcacgugacauaugugcccgcucaagagaagaauuucaccaccgcuccagccaucugccacgacggcaaagcccacuuuccuagagaaggcguguucguguccaacggcacccauugguucgugacacagcggaacuucuacgagccccagaucaucaccaccgacaacaccuucgugucuggcaacugcgacgucgugaucggcauugugaacaauaccguguacgacccucugcagcccgagcuggacagcuucaaagaggaacuggacaaguacuuuaagaaccacacaagccccgacguggaccugggcgauaucagcggaaucaaugccagcgucgugaacauccagaaagagaucgaccggcugaacgagguggccaagaaucugaacgagagccugaucgaccugcaagaacuggggaaguacgagcaguacaucaaguggcccugguacaucuggcugggcuuuaucgccggacugauugccaucgugauggucacaaucaugcuguguugcaugaccagcugcuguagcugccugaagggcuguuguagcuguggcagcugcugcaaguucgacgaggacgauucugagcccgugcugaagggcgugaaacugcacuacacaugaggacuaguguccaccugucccuccugggcugcuggauugucucguuuuccugccaaauaaacaggaucagcgcuuuacagaucuaaaaaaaaaaaaaaaaaaaaaaaaaaaaaaaaaaaaaaaaaaaaaaaaaaaaaaaaaaaaaaaaaaaaaaaaaaaaaaaaaaaaaaaaaaaaaaaaaaaa

SEQ ID NO: 25262 - RNA, 4105 nt, Artificial Sequence
  SARS-CoV-2/Wuhan/WIV05/2019__EPI_ISL_402128 spike protein mRNA gc mod (1-1273)(N439K_D614G)
aggagacccgugacccggaaguuguacggcuacgcgacuuucccucccacaaacccucgcgcccuuccuuuccuacuugggcccggcagaaagcuuaccauguucguguuccuggugcugcugccucugguguccagccagugugugaaccugaccaccagaacacagcugccuccagccuacaccaacagcuuuaccagaggcguguacuaccccgacaagguguucagauccagcgugcugcacucuacccaggaccuguuccugccuuucuucagcaacgugaccugguuccacgccauccacguguccggcaccaauggcaccaagagauucgacaaccccgugcugcccuucaacgacgggguguacuuugccagcaccgagaaguccaacaucaucagaggcuggaucuucggcaccacacuggacagcaagacccagagccugcugaucgugaacaacgccaccaacguggucaucaaagugugcgaguuccaguucugcaacgaccccuuccugggcgucuacuaccacaagaacaacaagagcuggauggaaagcgaguuccggguguacagcagcgccaacaacugcaccuucgaguacgugucccagccuuuccugauggaccuggaaggcaagcagggcaacuucaagaaccugcgcgaguucguguuuaagaacaucgacggcuacuucaagaucuacagcaagcacaccccuaucaaccucgugcgggaucugccucagggcuucucugcucuggaaccccugguggaucugcccaucggcaucaacaucacccgguuucagacacugcuggcccugcacagaagcuaccugacaccuggcgauagcagcagcggauggacagcuggugccgccgcuuacuaugugggcuaccugcagccuagaaccuuccugcugaaguacaacgagaacggcaccaucaccgacgccguggauugugcucuggauccucugagcgagacaaagugcacccugaaguccuucaccguggaaaagggcaucuaccagaccagcaacuuccgggugcagcccaccgaauccaucgugcgguuccccaauaucaccaaucugugccccuucggcgagguguucaaugccaccagauucgccucuguguacgccuggaaccggaagcggaucagcaauugcguggccgacuacuccgugcuguacaacuccgccagcuucagcaccuucaagugcuacggcguguccccuaccaagcugaacgaccugugcuucacaaacguguacgccgacagcuucgugauccggggagaugaagugcggcagauugccccuggacagacaggcaagaucgccgacuacaacuacaagcugcccgacgacuucaccggcugugugauugccuggaacagcaagaaccuggacuccaaagucggcggcaacuacaauuaccuguaccggcuguuccggaaguccaaucugaagcccuucgagcgggacaucuccaccgagaucuaucaggccggcagcaccccuuguaacggcguggaaggcuucaacugcuacuucccacugcaguccuacggcuuucagcccacaaauggcgugggcuaucagcccuacagagugguggugcugagcuucgaacugcugcaugccccugccacagugugcggcccuaagaaaagcaccaaucucgugaagaacaaaugcgugaacuucaacuucaacggccugaccggcaccggcgugcugacagagagcaacaagaaguuccugccauuccagcaguuuggccgggauaucgccgauaccacagacgccguuagagauccccagacacuggaaauccuggacaucaccccuugcagcuucggcggagugucugugaucaccccuggcaccaacaccagcaaucagguggcagugcuguaccagggcgugaacuguaccgaagugcccguggccauucacgccgaucagcugacaccuacauggcggguguacuccaccggcagcaauguguuucagaccagagccggcugucugaucggagccgagcacgugaacaauagcuacgagugcgacauccccaucggcgcuggaaucugcgccagcuaccagacacagacaaacagcccucggagagccagaagcguggccagccagagcaucauugccuacacaaugucucugggcgccgagaacagcguggccuacuccaacaacucuaucgcuauccccaccaacuucaccaucagcgugaccacagagauccugccuguguccaugaccaagaccagcguggacugcaccauguacaucugcggcgauuccaccgagugcuccaaccugcugcugcaguacggcagcuucugcacccagcugaauagagcccugacagggaucgccguggaacaggacaagaacacccaagagguguucgcccaagugaagcagaucuacaagaccccuccuaucaaggacuucggcggcuucaauuucagccagauucugcccgauccuagcaagcccagcaagcggagcuucaucgaggaccugcuguucaacaaagugacacuggccgacgccggcuucaucaagcaguauggcgauugucugggcgacauugccgccagggaucugauuugcgcccagaaguuuaacggacugacagugcugccuccucugcugaccgaugagaugaucgcccaguacacaucugcccugcuggccggcacaaucacaagcggcuggacauuuggagcaggcgccgcucugcagauccccuuugcuaugcagauggccuaccgguucaacggcaucggagugacccagaaugugcuguacgagaaccagaagcugaucgccaaccaguucaacagcgccaucggcaagauccaggacagccugagcagcacagcaagcgcccugggaaagcugcaggacguggucaaccagaaugcccaggcacugaacacccuggucaagcagcuguccuccaacuucggcgccaucagcucugugcugaacgauauccugagcagacuggacaaggucgaggccgaggugcagaucgacagacugaucacaggcagacugcagagccuccagacauacgugacccagcagcugaucagagccgccgagauuagagccucugccaaucuggccgccaccaagaugucugagugugugcugggccagagcaagagaguggacuuuugcggcaagggcuaccaccugaugagcuucccucagucugccccucacggcgugguguuucugcacgugacauaugugcccgcucaagagaagaauuucaccaccgcuccagccaucugccacgacggcaaagcccacuuuccuagagaaggcguguucguguccaacggcacccauugguucgugacacagcggaacuucuacgagccccagaucaucaccaccgacaacaccuucgugucuggcaacugcgacgucgugaucggcauugugaacaauaccguguacgacccucugcagcccgagcuggacagcuucaaagaggaacuggacaaguacuuuaagaaccacacaagccccgacguggaccugggcgauaucagcggaaucaaugccagcgucgugaacauccagaaagagaucgaccggcugaacgagguggccaagaaucugaacgagagccugaucgaccugcaagaacuggggaaguacgagcaguacaucaaguggcccugguacaucuggcugggcuuuaucgccggacugauugccaucgugauggucacaaucaugcuguguugcaugaccagcugcuguagcugccugaagggcuguuguagcuguggcagcugcugcaaguucgacgaggacgauucugagcccgugcugaagggcgugaaacugcacuacacaugaggacuaguguccaccugucccuccugggcugcuggauugucucguuuuccugccaaauaaacaggaucagcgcuuuacagaucuaaaaaaaaaaaaaaaaaaaaaaaaaaaaaaaaaaaaaaaaaaaaaaaaaaaaaaaaaaaaaaaaaaaaaaaaaaaaaaaaaaaaaaaaaaaaaaaaaaaa

SEQ ID NO: 25263 - RNA, 4105 nt, Artificial Sequence
  SARS-CoV-2/Wuhan/WIV05/2019__EPI_ISL_402128 spike protein mRNA gc mod (1-1273)(S477N_D614G)
aggagacccgugacccggaaguuguacggcuacgcgacuuucccucccacaaacccucgcgcccuuccuuuccuacuugggcccggcagaaagcuuaccauguucguguuccuggugcugcugccucugguguccagccagugugugaaccugaccaccagaacacagcugccuccagccuacaccaacagcuuuaccagaggcguguacuaccccgacaagguguucagauccagcgugcugcacucuacccaggaccuguuccugccuuucuucagcaacgugaccugguuccacgccauccacguguccggcaccaauggcaccaagagauucgacaaccccgugcugcccuucaacgacgggguguacuuugccagcaccgagaaguccaacaucaucagaggcuggaucuucggcaccacacuggacagcaagacccagagccugcugaucgugaacaacgccaccaacguggucaucaaagugugcgaguuccaguucugcaacgaccccuuccugggcgucuacuaccacaagaacaacaagagcuggauggaaagcgaguuccggguguacagcagcgccaacaacugcaccuucgaguacgugucccagccuuuccugauggaccuggaaggcaagcagggcaacuucaagaaccugcgcgaguucguguuuaagaacaucgacggcuacuucaagaucuacagcaagcacaccccuaucaaccucgugcgggaucugccucagggcuucucugcucuggaaccccugguggaucugcccaucggcaucaacaucacccgguuucagacacugcuggcccugcacagaagcuaccugacaccuggcgauagcagcagcggauggacagcuggugccgccgcuuacuaugugggcuaccugcagccuagaaccuuccugcugaaguacaacgagaacggcaccaucaccgacgccguggauugugcucuggauccucugagcgagacaaagugcacccugaaguccuucaccguggaaaagggcaucuaccagaccagcaacuuccgggugcagcccaccgaauccaucgugcgguuccccaauaucaccaaucugugccccuucggcgagguguucaaugccaccagauucgccucuguguacgccuggaaccggaagcggaucagcaauugcguggccgacuacuccgugcuguacaacuccgccagcuucagcaccuucaagugcuacggcguguccccuaccaagcugaacgaccugugcuucacaaacguguacgccgacagcuucgugauccggggagaugaagugcggcagauugccccuggacagacaggcaagaucgccgacuacaacuacaagcugcccgacgacuucaccggcugugugauugccuggaacagcaacaaccuggacuccaaagucggcggcaacuacaauuaccuguaccggcuguuccggaaguccaaucugaagcccuucgagcgggacaucuccaccgagaucuaucaggccggcaacaccccuuguaacggcguggaaggcuucaacugcuacuucccacugcaguccuacggcuuucagcccacaaauggcgugggcuaucagcccuacagagugguggugcugagcuucgaacugcugcaugccccugccacagugugcggcccuaagaaaagcaccaaucucgugaagaacaaaugcgugaacuucaacuucaacggccugaccggcaccggcgugcugacagagagcaacaagaaguuccugccauuccagcaguuuggccgggauaucgccgauaccacagacgccguuagagauccccagacacuggaaauccuggacaucaccccuugcagcuucggcggagugucugugaucaccccuggcaccaacaccagcaaucagguggcagugcuguaccagggcgugaacuguaccgaagugcccguggccauucacgccgaucagcugacaccuacauggcggguguacuccaccggcagcaauguguuucagaccagagccggcugucugaucggagccgagcacgugaacaauagcuacgagugcgacauccccaucggcgcuggaaucugcgccagcuaccagacacagacaaacagcccucggagagccagaagcguggccagccagagcaucauugccuacacaaugucucugggcgccgagaacagcguggccuacuccaacaacucuaucgcuauccccaccaacuucaccaucagcgugaccacagagauccugccuguguccaugaccaagaccagcguggacugcaccauguacaucugcggcgauuccaccgagugcuccaaccugcugcugcaguacggcagcuucugcacccagcugaauagagcccugacagggaucgccguggaacaggacaagaacacccaagagguguucgcccaagugaagcagaucuacaagaccccuccuaucaaggacuucggcggcuucaauuucagccagauucugcccgauccuagcaagcccagcaagcggagcuucaucgaggaccugcuguucaacaaagugacacuggccgacgccggcuucaucaagcaguauggcgauugucugggcgacauugccgccagggaucugauuugcgcccagaaguuuaacggacugacagugcugccuccucugcugaccgaugagaugaucgcccaguacacaucugcccugcuggccggcacaaucacaagcggcuggacauuuggagcaggcgccgcucugcagauccccuuugcuaugcagauggccuaccgguucaacggcaucggagugacccagaaugugcuguacgagaaccagaagcugaucgccaaccaguucaacagcgccaucggcaagauccaggacagccugagcagcacagcaagcgcccugggaaagcugcaggacguggucaaccagaaugcccaggcacugaacacccuggucaagcagcuguccuccaacuucggcgccaucagcucugugcugaacgauauccugagcagacuggacaaggucgaggccgaggugcagaucgacagacugaucacaggcagacugcagagccuccagacauacgugacccagcagcugaucagagccgccgagauuagagccucugccaaucuggccgccaccaagaugucugagugugugcugggccagagcaagagaguggacuuuugcggcaagggcuaccaccugaugagcuucccucagucugccccucacggcgugguguuucugcacgugacauaugugcccgcucaagagaagaauuucaccaccgcuccagccaucugccacgacggcaaagcccacuuuccuagagaaggcguguucguguccaacggcacccauugguucgugacacagcggaacuucuacgagccccagaucaucaccaccgacaacaccuucgugucuggcaacugcgacgucgugaucggcauugugaacaauaccguguacgacccucugcagcccgagcuggacagcuucaaagaggaacuggacaaguacuuuaagaaccacacaagccccgacguggaccugggcgauaucagcggaaucaaugccagcgucgugaacauccagaaagagaucgaccggcugaacgagguggccaagaaucugaacgagagccugaucgaccugcaagaacuggggaaguacgagcaguacaucaaguggcccugguacaucuggcugggcuuuaucgccggacugauugccaucgugauggucacaaucaugcuguguugcaugaccagcugcuguagcugccugaagggcuguuguagcuguggcagcugcugcaaguucgacgaggacgauucugagcccgugcugaagggcgugaaacugcacuacacaugaggacuaguguccaccugucccuccugggcugcuggauugucucguuuuccugccaaauaaacaggaucagcgcuuuacagaucuaaaaaaaaaaaaaaaaaaaaaaaaaaaaaaaaaaaaaaaaaaaaaaaaaaaaaaaaaaaaaaaaaaaaaaaaaaaaaaaaaaaaaaaaaaaaaaaaaaaa

SEQ ID NO: 25264 - RNA, 4105 nt, Artificial Sequence
  SARS-CoV-2/Wuhan/WIV05/2019__EPI_ISL_402128 spike protein mRNA gc mod (1-1273)(N501Y_D614G)
aggagacccgugacccggaaguuguacggcuacgcgacuuucccucccacaaacccucgcgcccuuccuuuccuacuugggcccggcagaaagcuuaccauguucguguuccuggugcugcugccucugguguccagccagugugugaaccugaccaccagaacacagcugccuccagccuacaccaacagcuuuaccagaggcguguacuaccccgacaagguguucagauccagcgugcugcacucuacccaggaccuguuccugccuuucuucagcaacgugaccugguuccacgccauccacguguccggcaccaauggcaccaagagauucgacaaccccgugcugcccuucaacgacgggguguacuuugccagcaccgagaaguccaacaucaucagaggcuggaucuucggcaccacacuggacagcaagacccagagccugcugaucgugaacaacgccaccaacguggucaucaaagugugcgaguuccaguucugcaacgaccccuuccugggcgucuacuaccacaagaacaacaagagcuggauggaaagcgaguuccggguguacagcagcgccaacaacugcaccuucgaguacgugucccagccuuuccugauggaccuggaaggcaagcagggcaacuucaagaaccugcgcgaguucguguuuaagaacaucgacggcuacuucaagaucuacagcaagcacaccccuaucaaccucgugcgggaucugccucagggcuucucugcucuggaaccccugguggaucugcccaucggcaucaacaucacccgguuucagacacugcuggcccugcacagaagcuaccugacaccuggcgauagcagcagcggauggacagcuggugccgccgcuuacuaugugggcuaccugcagccuagaaccuuccugcugaaguacaacgagaacggcaccaucaccgacgccguggauugugcucuggauccucugagcgagacaaagugcacccugaaguccuucaccguggaaaagggcaucuaccagaccagcaacuuccgggugcagcccaccgaauccaucgugcgguuccccaauaucaccaaucugugccccuucggcgagguguucaaugccaccagauucgccucuguguacgccuggaaccggaagcggaucagcaauugcguggccgacuacuccgugcuguacaacuccgccagcuucagcaccuucaagugcuacggcguguccccuaccaagcugaacgaccugugcuucacaaacguguacgccgacagcuucgugauccggggagaugaagugcggcagauugccccuggacagacaggcaagaucgccgacuacaacuacaagcugcccgacgacuucaccggcugugugauugccuggaacagcaacaaccuggacuccaaagucggcggcaacuacaauuaccuguaccggcuguuccggaaguccaaucugaagcccuucgagcgggacaucuccaccgagaucuaucaggccggcagcaccccuuguaacggcguggaaggcuucaacugcuacuucccacugcaguccuacggcuuucagcccacauacggcgugggcuaucagcccuacagagugguggugcugagcuucgaacugcugcaugccccugccacagugugcggcccuaagaaaagcaccaaucucgugaagaacaaaugcgugaacuucaacuucaacggccugaccggcaccggcgugcugacagagagcaacaagaaguuccugccauuccagcaguuuggccgggauaucgccgauaccacagacgccguuagagauccccagacacuggaaauccuggacaucaccccuugcagcuucggcggagugucugugaucaccccuggcaccaacaccagcaaucagguggcagugcuguaccagggcgugaacuguaccgaagugcccguggccauucacgccgaucagcugacaccuacauggcggguguacuccaccggcagcaauguguuucagaccagagccggcugucugaucggagccgagcacgugaacaauagcuacgagugcgacauccccaucggcgcuggaaucugcgccagcuaccagacacagacaaacagcccucggagagccagaagcguggccagccagagcaucauugccuacacaaugucucugggcgccgagaacagcguggccuacuccaacaacucuaucgcuauccccaccaacuucaccaucagcgugaccacagagauccugccuguguccaugaccaagaccagcguggacugcaccauguacaucugcggcgauuccaccgagugcuccaaccugcugcugcaguacggcagcuucugcacccagcugaauagagcccugacagggaucgccguggaacaggacaagaacacccaagagguguucgcccaagugaagcagaucuacaagaccccuccuaucaaggacuucggcggcuucaauuucagccagauucugcccgauccuagcaagcccagcaagcggagcuucaucgaggaccugcuguucaacaaagugacacuggccgacgccggcuucaucaagcaguauggcgauugucugggcgacauugccgccagggaucugauuugcgcccagaaguuuaacggacugacagugcugccuccucugcugaccgaugagaugaucgcccaguacacaucugcccugcuggccggcacaaucacaagcggcuggacauuuggagcaggcgccgcucugcagauccccuuugcuaugcagauggccuaccgguucaacggcaucggagugacccagaaugugcuguacgagaaccagaagcugaucgccaaccaguucaacagcgccaucggcaagauccaggacagccugagcagcacagcaagcgcccugggaaagcugcaggacguggucaaccagaaugcccaggcacugaacacccuggucaagcagcuguccuccaacuucggcgccaucagcucugugcugaacgauauccugagcagacuggacaaggucgaggccgaggugcagaucgacagacugaucacaggcagacugcagagccuccagacauacgugacccagcagcugaucagagccgccgagauuagagccucugccaaucuggccgccaccaagaugucugagugugugcugggccagagcaagagaguggacuuuugcggcaagggcuaccaccugaugagcuucccucagucugccccucacggcgugguguuucugcacgugacauaugugcccgcucaagagaagaauuucaccaccgcuccagccaucugccacgacggcaaagcccacuuuccuagagaaggcguguucguguccaacggcacccauugguucgugacacagcggaacuucuacgagccccagaucaucaccaccgacaacaccuucgugucuggcaacugcgacgucgugaucggcauugugaacaauaccguguacgacccucugcagcccgagcuggacagcuucaaagaggaacuggacaaguacuuuaagaaccacacaagccccgacguggaccugggcgauaucagcggaaucaaugccagcgucgugaacauccagaaagagaucgaccggcugaacgagguggccaagaaucugaacgagagccugaucgaccugcaagaacuggggaaguacgagcaguacaucaaguggcccugguacaucuggcugggcuuuaucgccggacugauugccaucgugauggucacaaucaugcuguguugcaugaccagcugcuguagcugccugaagggcuguuguagcuguggcagcugcugcaaguucgacgaggacgauucugagcccgugcugaagggcgugaaacugcacuacacaugaggacuaguguccaccugucccuccugggcugcuggauugucucguuuuccugccaaauaaacaggaucagcgcuuuacagaucuaaaaaaaaaaaaaaaaaaaaaaaaaaaaaaaaaaaaaaaaaaaaaaaaaaaaaaaaaaaaaaaaaaaaaaaaaaaaaaaaaaaaaaaaaaaaaaaaaaaa

SEQ ID NO: 25265 - RNA, 4099 nt, Artificial Sequence
  SARS-CoV-2/Wuhan/WIV05/2019__EPI_ISL_402128 spike protein mRNA gc mod (1-1273)(H69del_V70del_D614G)
aggagacccgugacccggaaguuguacggcuacgcgacuuucccucccacaaacccucgcgcccuuccuuuccuacuugggcccggcagaaagcuuaccauguucguguuccuggugcugcugccucugguguccagccagugugugaaccugaccaccagaacacagcugccuccagccuacaccaacagcuuuaccagaggcguguacuaccccgacaagguguucagauccagcgugcugcacucuacccaggaccuguuccugccuuucuucagcaacgugaccugguuccacgccaucuccggcaccaauggcaccaagagauucgacaaccccgugcugcccuucaacgacgggguguacuuugccagcaccgagaaguccaacaucaucagaggcuggaucuucggcaccacacuggacagcaagacccagagccugcugaucgugaacaacgccaccaacguggucaucaaagugugcgaguuccaguucugcaacgaccccuuccugggcgucuacuaccacaagaacaacaagagcuggauggaaagcgaguuccggguguacagcagcgccaacaacugcaccuucgaguacgugucccagccuuuccugauggaccuggaaggcaagcagggcaacuucaagaaccugcgcgaguucguguuuaagaacaucgacggcuacuucaagaucuacagcaagcacaccccuaucaaccucgugcgggaucugccucagggcuucucugcucuggaaccccugguggaucugcccaucggcaucaacaucacccgguuucagacacugcuggcccugcacagaagcuaccugacaccuggcgauagcagcagcggauggacagcuggugccgccgcuuacuaugugggcuaccugcagccuagaaccuuccugcugaaguacaacgagaacggcaccaucaccgacgccguggauugugcucuggauccucugagcgagacaaagugcacccugaaguccuucaccguggaaaagggcaucuaccagaccagcaacuuccgggugcagcccaccgaauccaucgugcgguuccccaauaucaccaaucugugccccuucggcgagguguucaaugccaccagauucgccucuguguacgccuggaaccggaagcggaucagcaauugcguggccgacuacuccgugcuguacaacuccgccagcuucagcaccuucaagugcuacggcguguccccuaccaagcugaacgaccugugcuucacaaacguguacgccgacagcuucgugauccggggagaugaagugcggcagauugccccuggacagacaggcaagaucgccgacuacaacuacaagcugcccgacgacuucaccggcugugugauugccuggaacagcaacaaccuggacuccaaagucggcggcaacuacaauuaccuguaccggcuguuccggaaguccaaucugaagcccuucgagcgggacaucuccaccgagaucuaucaggccggcagcaccccuuguaacggcguggaaggcuucaacugcuacuucccacugcaguccuacggcuuucagcccacaaauggcgugggcuaucagcccuacagagugguggugcugagcuucgaacugcugcaugccccugccacagugugcggcccuaagaaaagcaccaaucucgugaagaacaaaugcgugaacuucaacuucaacggccugaccggcaccggcgugcugacagagagcaacaagaaguuccugccauuccagcaguuuggccgggauaucgccgauaccacagacgccguuagagauccccagacacuggaaauccuggacaucaccccuugcagcuucggcggagugucugugaucaccccuggcaccaacaccagcaaucagguggcagugcuguaccagggcgugaacuguaccgaagugcccguggccauucacgccgaucagcugacaccuacauggcggguguacuccaccggcagcaauguguuucagaccagagccggcugucugaucggagccgagcacgugaacaauagcuacgagugcgacauccccaucggcgcuggaaucugcgccagcuaccagacacagacaaacagcccucggagagccagaagcguggccagccagagcaucauugccuacacaaugucucugggcgccgagaacagcguggccuacuccaacaacucuaucgcuauccccaccaacuucaccaucagcgugaccacagagauccugccuguguccaugaccaagaccagcguggacugcaccauguacaucugcggcgauuccaccgagugcuccaaccugcugcugcaguacggcagcuucugcacccagcugaauagagcccugacagggaucgccguggaacaggacaagaacacccaagagguguucgcccaagugaagcagaucuacaagaccccuccuaucaaggacuucggcggcuucaauuucagccagauucugcccgauccuagcaagcccagcaagcggagcuucaucgaggaccugcuguucaacaaagugacacuggccgacgccggcuucaucaagcaguauggcgauugucugggcgacauugccgccagggaucugauuugcgcccagaaguuuaacggacugacagugcugccuccucugcugaccgaugagaugaucgcccaguacacaucugcccugcuggccggcacaaucacaagcggcuggacauuuggagcaggcgccgcucugcagauccccuuugcuaugcagauggccuaccgguucaacggcaucggagugacccagaaugugcuguacgagaaccagaagcugaucgccaaccaguucaacagcgccaucggcaagauccaggacagccugagcagcacagcaagcgcccugggaaagcugcaggacguggucaaccagaaugcccaggcacugaacacccuggucaagcagcuguccuccaacuucggcgccaucagcucugugcugaacgauauccugagcagacuggacaaggucgaggccgaggugcagaucgacagacugaucacaggcagacugcagagccuccagacauacgugacccagcagcugaucagagccgccgagauuagagccucugccaaucuggccgccaccaagaugucugagugugugcugggccagagcaagagaguggacuuuugcggcaagggcuaccaccugaugagcuucccucagucugccccucacggcgugguguuucugcacgugacauaugugcccgcucaagagaagaauuucaccaccgcuccagccaucugccacgacggcaaagcccacuuuccuagagaaggcguguucguguccaacggcacccauugguucgugacacagcggaacuucuacgagccccagaucaucaccaccgacaacaccuucgugucuggcaacugcgacgucgugaucggcauugugaacaauaccguguacgacccucugcagcccgagcuggacagcuucaaagaggaacuggacaaguacuuuaagaaccacacaagccccgacguggaccugggcgauaucagcggaaucaaugccagcgucgugaacauccagaaagagaucgaccggcugaacgagguggccaagaaucugaacgagagccugaucgaccugcaagaacuggggaaguacgagcaguacaucaaguggcccugguacaucuggcugggcuuuaucgccggacugauugccaucgugauggucacaaucaugcuguguugcaugaccagcugcuguagcugccugaagggcuguuguagcuguggcagcugcugcaaguucgacgaggacgauucugagcccgugcugaagggcgugaaacugcacuacacaugaggacuaguguccaccugucccuccugggcugcuggauugucucguuuuccugccaaauaaacaggaucagcgcuuuacagaucuaaaaaaaaaaaaaaaaaaaaaaaaaaaaaaaaaaaaaaaaaaaaaaaaaaaaaaaaaaaaaaaaaaaaaaaaaaaaaaaaaaaaaaaaaaaaaaaaaaaa

SEQ ID NO: 25266 - RNA, 4105 nt, Artificial Sequence
  SARS-CoV-2/Wuhan/WIV05/2019__EPI_ISL_402128 spike protein mRNA gc mod (1-1273)(Y453F_D614G)
aggagacccgugacccggaaguuguacggcuacgcgacuuucccucccacaaacccucgcgcccuuccuuuccuacuugggcccggcagaaagcuuaccauguucguguuccuggugcugcugccucugguguccagccagugugugaaccugaccaccagaacacagcugccuccagccuacaccaacagcuuuaccagaggcguguacuaccccgacaagguguucagauccagcgugcugcacucuacccaggaccuguuccugccuuucuucagcaacgugaccugguuccacgccauccacguguccggcaccaauggcaccaagagauucgacaaccccgugcugcccuucaacgacgggguguacuuugccagcaccgagaaguccaacaucaucagaggcuggaucuucggcaccacacuggacagcaagacccagagccugcugaucgugaacaacgccaccaacguggucaucaaagugugcgaguuccaguucugcaacgaccccuuccugggcgucuacuaccacaagaacaacaagagcuggauggaaagcgaguuccggguguacagcagcgccaacaacugcaccuucgaguacgugucccagccuuuccugauggaccuggaaggcaagcagggcaacuucaagaaccugcgcgaguucguguuuaagaacaucgacggcuacuucaagaucuacagcaagcacaccccuaucaaccucgugcgggaucugccucagggcuucucugcucuggaaccccugguggaucugcccaucggcaucaacaucacccgguuucagacacugcuggcccugcacagaagcuaccugacaccuggcgauagcagcagcggauggacagcuggugccgccgcuuacuaugugggcuaccugcagccuagaaccuuccugcugaaguacaacgagaacggcaccaucaccgacgccguggauugugcucuggauccucugagcgagacaaagugcacccugaaguccuucaccguggaaaagggcaucuaccagaccagcaacuuccgggugcagcccaccgaauccaucgugcgguuccccaauaucaccaaucugugccccuucggcgagguguucaaugccaccagauucgccucuguguacgccuggaaccggaagcggaucagcaauugcguggccgacuacuccgugcuguacaacuccgccagcuucagcaccuucaagugcuacggcguguccccuaccaagcugaacgaccugugcuucacaaacguguacgccgacagcuucgugauccggggagaugaagugcggcagauugccccuggacagacaggcaagaucgccgacuacaacuacaagcugcccgacgacuucaccggcugugugauugccuggaacagcaacaaccuggacuccaaagucggcggcaacuacaauuaccuguuccggcuguuccggaaguccaaucugaagcccuucgagcgggacaucuccaccgagaucuaucaggccggcagcaccccuuguaacggcguggaaggcuucaacugcuacuucccacugcaguccuacggcuuucagcccacaaauggcgugggcuaucagcccuacagagugguggugcugagcuucgaacugcugcaugccccugccacagugugcggcccuaagaaaagcaccaaucucgugaagaacaaaugcgugaacuucaacuucaacggccugaccggcaccggcgugcugacagagagcaacaagaaguuccugccauuccagcaguuuggccgggauaucgccgauaccacagacgccguuagagauccccagacacuggaaauccuggacaucaccccuugcagcuucggcggagugucugugaucaccccuggcaccaacaccagcaaucagguggcagugcuguaccagggcgugaacuguaccgaagugcccguggccauucacgccgaucagcugacaccuacauggcggguguacuccaccggcagcaauguguuucagaccagagccggcugucugaucggagccgagcacgugaacaauagcuacgagugcgacauccccaucggcgcuggaaucugcgccagcuaccagacacagacaaacagcccucggagagccagaagcguggccagccagagcaucauugccuacacaaugucucugggcgccgagaacagcguggccuacuccaacaacucuaucgcuauccccaccaacuucaccaucagcgugaccacagagauccugccuguguccaugaccaagaccagcguggacugcaccauguacaucugcggcgauuccaccgagugcuccaaccugcugcugcaguacggcagcuucugcacccagcugaauagagcccugacagggaucgccguggaacaggacaagaacacccaagagguguucgcccaagugaagcagaucuacaagaccccuccuaucaaggacuucggcggcuucaauuucagccagauucugcccgauccuagcaagcccagcaagcggagcuucaucgaggaccugcuguucaacaaagugacacuggccgacgccggcuucaucaagcaguauggcgauugucugggcgacauugccgccagggaucugauuugcgcccagaaguuuaacggacugacagugcugccuccucugcugaccgaugagaugaucgcccaguacacaucugcccugcuggccggcacaaucacaagcggcuggacauuuggagcaggcgccgcucugcagauccccuuugcuaugcagauggccuaccgguucaacggcaucggagugacccagaaugugcuguacgagaaccagaagcugaucgccaaccaguucaacagcgccaucggcaagauccaggacagccugagcagcacagcaagcgcccugggaaagcugcaggacguggucaaccagaaugcccaggcacugaacacccuggucaagcagcuguccuccaacuucggcgccaucagcucugugcugaacgauauccugagcagacuggacaaggucgaggccgaggugcagaucgacagacugaucacaggcagacugcagagccuccagacauacgugacccagcagcugaucagagccgccgagauuagagccucugccaaucuggccgccaccaagaugucugagugugugcugggccagagcaagagaguggacuuuugcggcaagggcuaccaccugaugagcuucccucagucugccccucacggcgugguguuucugcacgugacauaugugcccgcucaagagaagaauuucaccaccgcuccagccaucugccacgacggcaaagcccacuuuccuagagaaggcguguucguguccaacggcacccauugguucgugacacagcggaacuucuacgagccccagaucaucaccaccgacaacaccuucgugucuggcaacugcgacgucgugaucggcauugugaacaauaccguguacgacccucugcagcccgagcuggacagcuucaaagaggaacuggacaaguacuuuaagaaccacacaagccccgacguggaccugggcgauaucagcggaaucaaugccagcgucgugaacauccagaaagagaucgaccggcugaacgagguggccaagaaucugaacgagagccugaucgaccugcaagaacuggggaaguacgagcaguacaucaaguggcccugguacaucuggcugggcuuuaucgccggacugauugccaucgugauggucacaaucaugcuguguugcaugaccagcugcuguagcugccugaagggcuguuguagcuguggcagcugcugcaaguucgacgaggacgauucugagcccgugcugaagggcgugaaacugcacuacacaugaggacuaguguccaccugucccuccugggcugcuggauugucucguuuuccugccaaauaaacaggaucagcgcuuuacagaucuaaaaaaaaaaaaaaaaaaaaaaaaaaaaaaaaaaaaaaaaaaaaaaaaaaaaaaaaaaaaaaaaaaaaaaaaaaaaaaaaaaaaaaaaaaaaaaaaaaaa

SEQ ID NO: 25267 - RNA, 4105 nt, Artificial Sequence
  SARS-CoV-2/Wuhan/WIV05/2019__EPI_ISL_402128 spike protein mRNA gc mod (1-1273)(D614G_I692V)
aggagacccgugacccggaaguuguacggcuacgcgacuuucccucccacaaacccucgcgcccuuccuuuccuacuugggcccggcagaaagcuuaccauguucguguuccuggugcugcugccucugguguccagccagugugugaaccugaccaccagaacacagcugccuccagccuacaccaacagcuuuaccagaggcguguacuaccccgacaagguguucagauccagcgugcugcacucuacccaggaccuguuccugccuuucuucagcaacgugaccugguuccacgccauccacguguccggcaccaauggcaccaagagauucgacaaccccgugcugcccuucaacgacgggguguacuuugccagcaccgagaaguccaacaucaucagaggcuggaucuucggcaccacacuggacagcaagacccagagccugcugaucgugaacaacgccaccaacguggucaucaaagugugcgaguuccaguucugcaacgaccccuuccugggcgucuacuaccacaagaacaacaagagcuggauggaaagcgaguuccggguguacagcagcgccaacaacugcaccuucgaguacgugucccagccuuuccugauggaccuggaaggcaagcagggcaacuucaagaaccugcgcgaguucguguuuaagaacaucgacggcuacuucaagaucuacagcaagcacaccccuaucaaccucgugcgggaucugccucagggcuucucugcucuggaaccccugguggaucugcccaucggcaucaacaucacccgguuucagacacugcuggcccugcacagaagcuaccugacaccuggcgauagcagcagcggauggacagcuggugccgccgcuuacuaugugggcuaccugcagccuagaaccuuccugcugaaguacaacgagaacggcaccaucaccgacgccguggauugugcucuggauccucugagcgagacaaagugcacccugaaguccuucaccguggaaaagggcaucuaccagaccagcaacuuccgggugcagcccaccgaauccaucgugcgguuccccaauaucaccaaucugugccccuucggcgagguguucaaugccaccagauucgccucuguguacgccuggaaccggaagcggaucagcaauugcguggccgacuacuccgugcuguacaacuccgccagcuucagcaccuucaagugcuacggcguguccccuaccaagcugaacgaccugugcuucacaaacguguacgccgacagcuucgugauccggggagaugaagugcggcagauugccccuggacagacaggcaagaucgccgacuacaacuacaagcugcccgacgacuucaccggcugugugauugccuggaacagcaacaaccuggacuccaaagucggcggcaacuacaauuaccuguaccggcuguuccggaaguccaaucugaagcccuucgagcgggacaucuccaccgagaucuaucaggccggcagcaccccuuguaacggcguggaaggcuucaacugcuacuucccacugcaguccuacggcuuucagcccacaaauggcgugggcuaucagcccuacagagugguggugcugagcuucgaacugcugcaugccccugccacagugugcggcccuaagaaaagcaccaaucucgugaagaacaaaugcgugaacuucaacuucaacggccugaccggcaccggcgugcugacagagagcaacaagaaguuccugccauuccagcaguuuggccgggauaucgccgauaccacagacgccguuagagauccccagacacuggaaauccuggacaucaccccuugcagcuucggcggagugucugugaucaccccuggcaccaacaccagcaaucagguggcagugcuguaccagggcgugaacuguaccgaagugcccguggccauucacgccgaucagcugacaccuacauggcggguguacuccaccggcagcaauguguuucagaccagagccggcugucugaucggagccgagcacgugaacaauagcuacgagugcgacauccccaucggcgcuggaaucugcgccagcuaccagacacagacaaacagcccucggagagccagaagcguggccagccagagcgugauugccuacacaaugucucugggcgccgagaacagcguggccuacuccaacaacucuaucgcuauccccaccaacuucaccaucagcgugaccacagagauccugccuguguccaugaccaagaccagcguggacugcaccauguacaucugcggcgauuccaccgagugcuccaaccugcugcugcaguacggcagcuucugcacccagcugaauagagcccugacagggaucgccguggaacaggacaagaacacccaagagguguucgcccaagugaagcagaucuacaagaccccuccuaucaaggacuucggcggcuucaauuucagccagauucugcccgauccuagcaagcccagcaagcggagcuucaucgaggaccugcuguucaacaaagugacacuggccgacgccggcuucaucaagcaguauggcgauugucugggcgacauugccgccagggaucugauuugcgcccagaaguuuaacggacugacagugcugccuccucugcugaccgaugagaugaucgcccaguacacaucugcccugcuggccggcacaaucacaagcggcuggacauuuggagcaggcgccgcucugcagauccccuuugcuaugcagauggccuaccgguucaacggcaucggagugacccagaaugugcuguacgagaaccagaagcugaucgccaaccaguucaacagcgccaucggcaagauccaggacagccugagcagcacagcaagcgcccugggaaagcugcaggacguggucaaccagaaugcccaggcacugaacacccuggucaagcagcuguccuccaacuucggcgccaucagcucugugcugaacgauauccugagcagacuggacaaggucgaggccgaggugcagaucgacagacugaucacaggcagacugcagagccuccagacauacgugacccagcagcugaucagagccgccgagauuagagccucugccaaucuggccgccaccaagaugucugagugugugcugggccagagcaagagaguggacuuuugcggcaagggcuaccaccugaugagcuucccucagucugccccucacggcgugguguuucugcacgugacauaugugcccgcucaagagaagaauuucaccaccgcuccagccaucugccacgacggcaaagcccacuuuccuagagaaggcguguucguguccaacggcacccauugguucgugacacagcggaacuucuacgagccccagaucaucaccaccgacaacaccuucgugucuggcaacugcgacgucgugaucggcauugugaacaauaccguguacgacccucugcagcccgagcuggacagcuucaaagaggaacuggacaaguacuuuaagaaccacacaagccccgacguggaccugggcgauaucagcggaaucaaugccagcgucgugaacauccagaaagagaucgaccggcugaacgagguggccaagaaucugaacgagagccugaucgaccugcaagaacuggggaaguacgagcaguacaucaaguggcccugguacaucuggcugggcuuuaucgccggacugauugccaucgugauggucacaaucaugcuguguugcaugaccagcugcuguagcugccugaagggcuguuguagcuguggcagcugcugcaaguucgacgaggacgauucugagcccgugcugaagggcgugaaacugcacuacacaugaggacuaguguccaccugucccuccugggcugcuggauugucucguuuuccugccaaauaaacaggaucagcgcuuuacagaucuaaaaaaaaaaaaaaaaaaaaaaaaaaaaaaaaaaaaaaaaaaaaaaaaaaaaaaaaaaaaaaaaaaaaaaaaaaaaaaaaaaaaaaaaaaaaaaaaaaaa

SEQ ID NO: 25268 - RNA, 4105 nt, Artificial Sequence
  SARS-CoV-2/Wuhan/WIV05/2019__EPI_ISL_402128 spike protein mRNA gc mod (1-1273)(D614G_M1229I)
aggagacccgugacccggaaguuguacggcuacgcgacuuucccucccacaaacccucgcgcccuuccuuuccuacuugggcccggcagaaagcuuaccauguucguguuccuggugcugcugccucugguguccagccagugugugaaccugaccaccagaacacagcugccuccagccuacaccaacagcuuuaccagaggcguguacuaccccgacaagguguucagauccagcgugcugcacucuacccaggaccuguuccugccuuucuucagcaacgugaccugguuccacgccauccacguguccggcaccaauggcaccaagagauucgacaaccccgugcugcccuucaacgacgggguguacuuugccagcaccgagaaguccaacaucaucagaggcuggaucuucggcaccacacuggacagcaagacccagagccugcugaucgugaacaacgccaccaacguggucaucaaagugugcgaguuccaguucugcaacgaccccuuccugggcgucuacuaccacaagaacaacaagagcuggauggaaagcgaguuccggguguacagcagcgccaacaacugcaccuucgaguacgugucccagccuuuccugauggaccuggaaggcaagcagggcaacuucaagaaccugcgcgaguucguguuuaagaacaucgacggcuacuucaagaucuacagcaagcacaccccuaucaaccucgugcgggaucugccucagggcuucucugcucuggaaccccugguggaucugcccaucggcaucaacaucacccgguuucagacacugcuggcccugcacagaagcuaccugacaccuggcgauagcagcagcggauggacagcuggugccgccgcuuacuaugugggcuaccugcagccuagaaccuuccugcugaaguacaacgagaacggcaccaucaccgacgccguggauugugcucuggauccucugagcgagacaaagugcacccugaaguccuucaccguggaaaagggcaucuaccagaccagcaacuuccgggugcagcccaccgaauccaucgugcgguuccccaauaucaccaaucugugccccuucggcgagguguucaaugccaccagauucgccucuguguacgccuggaaccggaagcggaucagcaauugcguggccgacuacuccgugcuguacaacuccgccagcuucagcaccuucaagugcuacggcguguccccuaccaagcugaacgaccugugcuucacaaacguguacgccgacagcuucgugauccggggagaugaagugcggcagauugccccuggacagacaggcaagaucgccgacuacaacuacaagcugcccgacgacuucaccggcugugugauugccuggaacagcaacaaccuggacuccaaagucggcggcaacuacaauuaccuguaccggcuguuccggaaguccaaucugaagcccuucgagcgggacaucuccaccgagaucuaucaggccggcagcaccccuuguaacggcguggaaggcuucaacugcuacuucccacugcaguccuacggcuuucagcccacaaauggcgugggcuaucagcccuacagagugguggugcugagcuucgaacugcugcaugccccugccacagugugcggcccuaagaaaagcaccaaucucgugaagaacaaaugcgugaacuucaacuucaacggccugaccggcaccggcgugcugacagagagcaacaagaaguuccugccauuccagcaguuuggccgggauaucgccgauaccacagacgccguuagagauccccagacacuggaaauccuggacaucaccccuugcagcuucggcggagugucugugaucaccccuggcaccaacaccagcaaucagguggcagugcuguaccagggcgugaacuguaccgaagugcccguggccauucacgccgaucagcugacaccuacauggcggguguacuccaccggcagcaauguguuucagaccagagccggcugucugaucggagccgagcacgugaacaauagcuacgagugcgacauccccaucggcgcuggaaucugcgccagcuaccagacacagacaaacagcccucggagagccagaagcguggccagccagagcaucauugccuacacaaugucucugggcgccgagaacagcguggccuacuccaacaacucuaucgcuauccccaccaacuucaccaucagcgugaccacagagauccugccuguguccaugaccaagaccagcguggacugcaccauguacaucugcggcgauuccaccgagugcuccaaccugcugcugcaguacggcagcuucugcacccagcugaauagagcccugacagggaucgccguggaacaggacaagaacacccaagagguguucgcccaagugaagcagaucuacaagaccccuccuaucaaggacuucggcggcuucaauuucagccagauucugcccgauccuagcaagcccagcaagcggagcuucaucgaggaccugcuguucaacaaagugacacuggccgacgccggcuucaucaagcaguauggcgauugucugggcgacauugccgccagggaucugauuugcgcccagaaguuuaacggacugacagugcugccuccucugcugaccgaugagaugaucgcccaguacacaucugcccugcuggccggcacaaucacaagcggcuggacauuuggagcaggcgccgcucugcagauccccuuugcuaugcagauggccuaccgguucaacggcaucggagugacccagaaugugcuguacgagaaccagaagcugaucgccaaccaguucaacagcgccaucggcaagauccaggacagccugagcagcacagcaagcgcccugggaaagcugcaggacguggucaaccagaaugcccaggcacugaacacccuggucaagcagcuguccuccaacuucggcgccaucagcucugugcugaacgauauccugagcagacuggacaaggucgaggccgaggugcagaucgacagacugaucacaggcagacugcagagccuccagacauacgugacccagcagcugaucagagccgccgagauuagagccucugccaaucuggccgccaccaagaugucugagugugugcugggccagagcaagagaguggacuuuugcggcaagggcuaccaccugaugagcuucccucagucugccccucacggcgugguguuucugcacgugacauaugugcccgcucaagagaagaauuucaccaccgcuccagccaucugccacgacggcaaagcccacuuuccuagagaaggcguguucguguccaacggcacccauugguucgugacacagcggaacuucuacgagccccagaucaucaccaccgacaacaccuucgugucuggcaacugcgacgucgugaucggcauugugaacaauaccguguacgacccucugcagcccgagcuggacagcuucaaagaggaacuggacaaguacuuuaagaaccacacaagccccgacguggaccugggcgauaucagcggaaucaaugccagcgucgugaacauccagaaagagaucgaccggcugaacgagguggccaagaaucugaacgagagccugaucgaccugcaagaacuggggaaguacgagcaguacaucaaguggcccugguacaucuggcugggcuuuaucgccggacugauugccaucgugaucgucacaaucaugcuguguugcaugaccagcugcuguagcugccugaagggcuguuguagcuguggcagcugcugcaaguucgacgaggacgauucugagcccgugcugaagggcgugaaacugcacuacacaugaggacuaguguccaccugucccuccugggcugcuggauugucucguuuuccugccaaauaaacaggaucagcgcuuuacagaucuaaaaaaaaaaaaaaaaaaaaaaaaaaaaaaaaaaaaaaaaaaaaaaaaaaaaaaaaaaaaaaaaaaaaaaaaaaaaaaaaaaaaaaaaaaaaaaaaaaaa

SEQ ID NO: 25269 - RNA, 4099 nt, Artificial Sequence
  SARS-CoV-2/Wuhan/WIV05/2019__EPI_ISL_402128 spike protein mRNA gc mod (1-1273)(H69del_V70del_A222V_Y453F_S477N_D614G_I692V)
aggagacccgugacccggaaguuguacggcuacgcgacuuucccucccacaaacccucgcgcccuuccuuuccuacuugggcccggcagaaagcuuaccauguucguguuccuggugcugcugccucugguguccagccagugugugaaccugaccaccagaacacagcugccuccagccuacaccaacagcuuuaccagaggcguguacuaccccgacaagguguucagauccagcgugcugcacucuacccaggaccuguuccugccuuucuucagcaacgugaccugguuccacgccaucuccggcaccaauggcaccaagagauucgacaaccccgugcugcccuucaacgacgggguguacuuugccagcaccgagaaguccaacaucaucagaggcuggaucuucggcaccacacuggacagcaagacccagagccugcugaucgugaacaacgccaccaacguggucaucaaagugugcgaguuccaguucugcaacgaccccuuccugggcgucuacuaccacaagaacaacaagagcuggauggaaagcgaguuccggguguacagcagcgccaacaacugcaccuucgaguacgugucccagccuuuccugauggaccuggaaggcaagcagggcaacuucaagaaccugcgcgaguucguguuuaagaacaucgacggcuacuucaagaucuacagcaagcacaccccuaucaaccucgugcgggaucugccucagggcuucucugugcuggaaccccugguggaucugcccaucggcaucaacaucacccgguuucagacacugcuggcccugcacagaagcuaccugacaccuggcgauagcagcagcggauggacagcuggugccgccgcuuacuaugugggcuaccugcagccuagaaccuuccugcugaaguacaacgagaacggcaccaucaccgacgccguggauugugcucuggauccucugagcgagacaaagugcacccugaaguccuucaccguggaaaagggcaucuaccagaccagcaacuuccgggugcagcccaccgaauccaucgugcgguuccccaauaucaccaaucugugccccuucggcgagguguucaaugccaccagauucgccucuguguacgccuggaaccggaagcggaucagcaauugcguggccgacuacuccgugcuguacaacuccgccagcuucagcaccuucaagugcuacggcguguccccuaccaagcugaacgaccugugcuucacaaacguguacgccgacagcuucgugauccggggagaugaagugcggcagauugccccuggacagacaggcaagaucgccgacuacaacuacaagcugcccgacgacuucaccggcugugugauugccuggaacagcaacaaccuggacuccaaagucggcggcaacuacaauuaccuguuccggcuguuccggaaguccaaucugaagcccuucgagcgggacaucuccaccgagaucuaucaggccggcaacaccccuuguaacggcguggaaggcuucaacugcuacuucccacugcaguccuacggcuuucagcccacaaauggcgugggcuaucagcccuacagagugguggugcugagcuucgaacugcugcaugccccugccacagugugcggcccuaagaaaagcaccaaucucgugaagaacaaaugcgugaacuucaacuucaacggccugaccggcaccggcgugcugacagagagcaacaagaaguuccugccauuccagcaguuuggccgggauaucgccgauaccacagacgccguuagagauccccagacacuggaaauccuggacaucaccccuugcagcuucggcggagugucugugaucaccccuggcaccaacaccagcaaucagguggcagugcuguaccagggcgugaacuguaccgaagugcccguggccauucacgccgaucagcugacaccuacauggcggguguacuccaccggcagcaauguguuucagaccagagccggcugucugaucggagccgagcacgugaacaauagcuacgagugcgacauccccaucggcgcuggaaucugcgccagcuaccagacacagacaaacagcccucggagagccagaagcguggccagccagagcgugauugccuacacaaugucucugggcgccgagaacagcguggccuacuccaacaacucuaucgcuauccccaccaacuucaccaucagcgugaccacagagauccugccuguguccaugaccaagaccagcguggacugcaccauguacaucugcggcgauuccaccgagugcuccaaccugcugcugcaguacggcagcuucugcacccagcugaauagagcccugacagggaucgccguggaacaggacaagaacacccaagagguguucgcccaagugaagcagaucuacaagaccccuccuaucaaggacuucggcggcuucaauuucagccagauucugcccgauccuagcaagcccagcaagcggagcuucaucgaggaccugcuguucaacaaagugacacuggccgacgccggcuucaucaagcaguauggcgauugucugggcgacauugccgccagggaucugauuugcgcccagaaguuuaacggacugacagugcugccuccucugcugaccgaugagaugaucgcccaguacacaucugcccugcuggccggcacaaucacaagcggcuggacauuuggagcaggcgccgcucugcagauccccuuugcuaugcagauggccuaccgguucaacggcaucggagugacccagaaugugcuguacgagaaccagaagcugaucgccaaccaguucaacagcgccaucggcaagauccaggacagccugagcagcacagcaagcgcccugggaaagcugcaggacguggucaaccagaaugcccaggcacugaacacccuggucaagcagcuguccuccaacuucggcgccaucagcucugugcugaacgauauccugagcagacuggacaaggucgaggccgaggugcagaucgacagacugaucacaggcagacugcagagccuccagacauacgugacccagcagcugaucagagccgccgagauuagagccucugccaaucuggccgccaccaagaugucugagugugugcugggccagagcaagagaguggacuuuugcggcaagggcuaccaccugaugagcuucccucagucugccccucacggcgugguguuucugcacgugacauaugugcccgcucaagagaagaauuucaccaccgcuccagccaucugccacgacggcaaagcccacuuuccuagagaaggcguguucguguccaacggcacccauugguucgugacacagcggaacuucuacgagccccagaucaucaccaccgacaacaccuucgugucuggcaacugcgacgucgugaucggcauugugaacaauaccguguacgacccucugcagcccgagcuggacagcuucaaagaggaacuggacaaguacuuuaagaaccacacaagccccgacguggaccugggcgauaucagcggaaucaaugccagcgucgugaacauccagaaagagaucgaccggcugaacgagguggccaagaaucugaacgagagccugaucgaccugcaagaacuggggaaguacgagcaguacaucaaguggcccugguacaucuggcugggcuuuaucgccggacugauugccaucgugauggucacaaucaugcuguguugcaugaccagcugcuguagcugccugaagggcuguuguagcuguggcagcugcugcaaguucgacgaggacgauucugagcccgugcugaagggcgugaaacugcacuacacaugaggacuaguguccaccugucccuccugggcugcuggauugucucguuuuccugccaaauaaacaggaucagcgcuuuacagaucuaaaaaaaaaaaaaaaaaaaaaaaaaaaaaaaaaaaaaaaaaaaaaaaaaaaaaaaaaaaaaaaaaaaaaaaaaaaaaaaaaaaaaaaaaaaaaaaaaaaa

SEQ ID NO: 25270 - RNA, 4099 nt, Artificial Sequence
  SARS-CoV-2/Wuhan/WIV05/2019__EPI_ISL_402128 spike protein mRNA gc mod (1-1273)(H69del_V70del_Y453F_D614G_I692V_M1229I)
aggagacccgugacccggaaguuguacggcuacgcgacuuucccucccacaaacccucgcgcccuuccuuuccuacuugggcccggcagaaagcuuaccauguucguguuccuggugcugcugccucugguguccagccagugugugaaccugaccaccagaacacagcugccuccagccuacaccaacagcuuuaccagaggcguguacuaccccgacaagguguucagauccagcgugcugcacucuacccaggaccuguuccugccuuucuucagcaacgugaccugguuccacgccaucuccggcaccaauggcaccaagagauucgacaaccccgugcugcccuucaacgacgggguguacuuugccagcaccgagaaguccaacaucaucagaggcuggaucuucggcaccacacuggacagcaagacccagagccugcugaucgugaacaacgccaccaacguggucaucaaagugugcgaguuccaguucugcaacgaccccuuccugggcgucuacuaccacaagaacaacaagagcuggauggaaagcgaguuccggguguacagcagcgccaacaacugcaccuucgaguacgugucccagccuuuccugauggaccuggaaggcaagcagggcaacuucaagaaccugcgcgaguucguguuuaagaacaucgacggcuacuucaagaucuacagcaagcacaccccuaucaaccucgugcgggaucugccucagggcuucucugcucuggaaccccugguggaucugcccaucggcaucaacaucacccgguuucagacacugcuggcccugcacagaagcuaccugacaccuggcgauagcagcagcggauggacagcuggugccgccgcuuacuaugugggcuaccugcagccuagaaccuuccugcugaaguacaacgagaacggcaccaucaccgacgccguggauugugcucuggauccucugagcgagacaaagugcacccugaaguccuucaccguggaaaagggcaucuaccagaccagcaacuuccgggugcagcccaccgaauccaucgugcgguuccccaauaucaccaaucugugccccuucggcgagguguucaaugccaccagauucgccucuguguacgccuggaaccggaagcggaucagcaauugcguggccgacuacuccgugcuguacaacuccgccagcuucagcaccuucaagugcuacggcguguccccuaccaagcugaacgaccugugcuucacaaacguguacgccgacagcuucgugauccggggagaugaagugcggcagauugccccuggacagacaggcaagaucgccgacuacaacuacaagcugcccgacgacuucaccggcugugugauugccuggaacagcaacaaccuggacuccaaagucggcggcaacuacaauuaccuguuccggcuguuccggaaguccaaucugaagcccuucgagcgggacaucuccaccgagaucuaucaggccggcagcaccccuuguaacggcguggaaggcuucaacugcuacuucccacugcaguccuacggcuuucagcccacaaauggcgugggcuaucagcccuacagagugguggugcugagcuucgaacugcugcaugccccugccacagugugcggcccuaagaaaagcaccaaucucgugaagaacaaaugcgugaacuucaacuucaacggccugaccggcaccggcgugcugacagagagcaacaagaaguuccugccauuccagcaguuuggccgggauaucgccgauaccacagacgccguuagagauccccagacacuggaaauccuggacaucaccccuugcagcuucggcggagugucugugaucaccccuggcaccaacaccagcaaucagguggcagugcuguaccagggcgugaacuguaccgaagugcccguggccauucacgccgaucagcugacaccuacauggcggguguacuccaccggcagcaauguguuucagaccagagccggcugucugaucggagccgagcacgugaacaauagcuacgagugcgacauccccaucggcgcuggaaucugcgccagcuaccagacacagacaaacagcccucggagagccagaagcguggccagccagagcgugauugccuacacaaugucucugggcgccgagaacagcguggccuacuccaacaacucuaucgcuauccccaccaacuucaccaucagcgugaccacagagauccugccuguguccaugaccaagaccagcguggacugcaccauguacaucugcggcgauuccaccgagugcuccaaccugcugcugcaguacggcagcuucugcacccagcugaauagagcccugacagggaucgccguggaacaggacaagaacacccaagagguguucgcccaagugaagcagaucuacaagaccccuccuaucaaggacuucggcggcuucaauuucagccagauucugcccgauccuagcaagcccagcaagcggagcuucaucgaggaccugcuguucaacaaagugacacuggccgacgccggcuucaucaagcaguauggcgauugucugggcgacauugccgccagggaucugauuugcgcccagaaguuuaacggacugacagugcugccuccucugcugaccgaugagaugaucgcccaguacacaucugcccugcuggccggcacaaucacaagcggcuggacauuuggagcaggcgccgcucugcagauccccuuugcuaugcagauggccuaccgguucaacggcaucggagugacccagaaugugcuguacgagaaccagaagcugaucgccaaccaguucaacagcgccaucggcaagauccaggacagccugagcagcacagcaagcgcccugggaaagcugcaggacguggucaaccagaaugcccaggcacugaacacccuggucaagcagcuguccuccaacuucggcgccaucagcucugugcugaacgauauccugagcagacuggacaaggucgaggccgaggugcagaucgacagacugaucacaggcagacugcagagccuccagacauacgugacccagcagcugaucagagccgccgagauuagagccucugccaaucuggccgccaccaagaugucugagugugugcugggccagagcaagagaguggacuuuugcggcaagggcuaccaccugaugagcuucccucagucugccccucacggcgugguguuucugcacgugacauaugugcccgcucaagagaagaauuucaccaccgcuccagccaucugccacgacggcaaagcccacuuuccuagagaaggcguguucguguccaacggcacccauugguucgugacacagcggaacuucuacgagccccagaucaucaccaccgacaacaccuucgugucuggcaacugcgacgucgugaucggcauugugaacaauaccguguacgacccucugcagcccgagcuggacagcuucaaagaggaacuggacaaguacuuuaagaaccacacaagccccgacguggaccugggcgauaucagcggaaucaaugccagcgucgugaacauccagaaagagaucgaccggcugaacgagguggccaagaaucugaacgagagccugaucgaccugcaagaacuggggaaguacgagcaguacaucaaguggcccugguacaucuggcugggcuuuaucgccggacugauugccaucgugaucgucacaaucaugcuguguugcaugaccagcugcuguagcugccugaagggcuguuguagcuguggcagcugcugcaaguucgacgaggacgauucugagcccgugcugaagggcgugaaacugcacuacacaugaggacuaguguccaccugucccuccugggcugcuggauugucucguuuuccugccaaauaaacaggaucagcgcuuuacagaucuaaaaaaaaaaaaaaaaaaaaaaaaaaaaaaaaaaaaaaaaaaaaaaaaaaaaaaaaaaaaaaaaaaaaaaaaaaaaaaaaaaaaaaaaaaaaaaaaaaaa

SEQ ID NO: 25271 - RNA, 4096 nt, Artificial Sequence
  SARS-CoV-2/Wuhan/WIV05/2019__EPI_ISL_402128 spike protein mRNA gc mod (1-1273)(H69del_V70del_Y144del_N501Y_A570D_D614G_P681H_T716I_S982 A_D1118H)
aggagacccgugacccggaaguuguacggcuacgcgacuuucccucccacaaacccucgcgcccuuccuuuccuacuugggcccggcagaaagcuuaccauguucguguuccuggugcugcugccucugguguccagccagugugugaaccugaccaccagaacacagcugccuccagccuacaccaacagcuuuaccagaggcguguacuaccccgacaagguguucagauccagcgugcugcacucuacccaggaccuguuccugccuuucuucagcaacgugaccugguuccacgccaucuccggcaccaauggcaccaagagauucgacaaccccgugcugcccuucaacgacgggguguacuuugccagcaccgagaaguccaacaucaucagaggcuggaucuucggcaccacacuggacagcaagacccagagccugcugaucgugaacaacgccaccaacguggucaucaaagugugcgaguuccaguucugcaacgaccccuuccugggcgucuaccacaagaacaacaagagcuggauggaaagcgaguuccggguguacagcagcgccaacaacugcaccuucgaguacgugucccagccuuuccugauggaccuggaaggcaagcagggcaacuucaagaaccugcgcgaguucguguuuaagaacaucgacggcuacuucaagaucuacagcaagcacaccccuaucaaccucgugcgggaucugccucagggcuucucugcucuggaaccccugguggaucugcccaucggcaucaacaucacccgguuucagacacugcuggcccugcacagaagcuaccugacaccuggcgauagcagcagcggauggacagcuggugccgccgcuuacuaugugggcuaccugcagccuagaaccuuccugcugaaguacaacgagaacggcaccaucaccgacgccguggauugugcucuggauccucugagcgagacaaagugcacccugaaguccuucaccguggaaaagggcaucuaccagaccagcaacuuccgggugcagcccaccgaauccaucgugcgguuccccaauaucaccaaucugugccccuucggcgagguguucaaugccaccagauucgccucuguguacgccuggaaccggaagcggaucagcaauugcguggccgacuacuccgugcuguacaacuccgccagcuucagcaccuucaagugcuacggcguguccccuaccaagcugaacgaccugugcuucacaaacguguacgccgacagcuucgugauccggggagaugaagugcggcagauugccccuggacagacaggcaagaucgccgacuacaacuacaagcugcccgacgacuucaccggcugugugauugccuggaacagcaacaaccuggacuccaaagucggcggcaacuacaauuaccuguaccggcuguuccggaaguccaaucugaagcccuucgagcgggacaucuccaccgagaucuaucaggccggcagcaccccuuguaacggcguggaaggcuucaacugcuacuucccacugcaguccuacggcuuucagcccacauacggcgugggcuaucagcccuacagagugguggugcugagcuucgaacugcugcaugccccugccacagugugcggcccuaagaaaagcaccaaucucgugaagaacaaaugcgugaacuucaacuucaacggccugaccggcaccggcgugcugacagagagcaacaagaaguuccugccauuccagcaguuuggccgggauaucgacgauaccacagacgccguuagagauccccagacacuggaaauccuggacaucaccccuugcagcuucggcggagugucugugaucaccccuggcaccaacaccagcaaucagguggcagugcuguaccagggcgugaacuguaccgaagugcccguggccauucacgccgaucagcugacaccuacauggcggguguacuccaccggcagcaauguguuucagaccagagccggcugucugaucggagccgagcacgugaacaauagcuacgagugcgacauccccaucggcgcuggaaucugcgccagcuaccagacacagacaaacagccaccggagagccagaagcguggccagccagagcaucauugccuacacaaugucucugggcgccgagaacagcguggccuacuccaacaacucuaucgcuauccccaucaacuucaccaucagcgugaccacagagauccugccuguguccaugaccaagaccagcguggacugcaccauguacaucugcggcgauuccaccgagugcuccaaccugcugcugcaguacggcagcuucugcacccagcugaauagagcccugacagggaucgccguggaacaggacaagaacacccaagagguguucgcccaagugaagcagaucuacaagaccccuccuaucaaggacuucggcggcuucaauuucagccagauucugcccgauccuagcaagcccagcaagcggagcuucaucgaggaccugcuguucaacaaagugacacuggccgacgccggcuucaucaagcaguauggcgauugucugggcgacauugccgccagggaucugauuugcgcccagaaguuuaacggacugacagugcugccuccucugcugaccgaugagaugaucgcccaguacacaucugcccugcuggccggcacaaucacaagcggcuggacauuuggagcaggcgccgcucugcagauccccuuugcuaugcagauggccuaccgguucaacggcaucggagugacccagaaugugcuguacgagaaccagaagcugaucgccaaccaguucaacagcgccaucggcaagauccaggacagccugagcagcacagcaagcgcccugggaaagcugcaggacguggucaaccagaaugcccaggcacugaacacccuggucaagcagcuguccuccaacuucggcgccaucagcucugugcugaacgauauccuggccagacuggacaaggucgaggccgaggugcagaucgacagacugaucacaggcagacugcagagccuccagacauacgugacccagcagcugaucagagccgccgagauuagagccucugccaaucuggccgccaccaagaugucugagugugugcugggccagagcaagagaguggacuuuugcggcaagggcuaccaccugaugagcuucccucagucugccccucacggcgugguguuucugcacgugacauaugugcccgcucaagagaagaauuucaccaccgcuccagccaucugccacgacggcaaagcccacuuuccuagagaaggcguguucguguccaacggcacccauugguucgugacacagcggaacuucuacgagccccagaucaucaccacccacaacaccuucgugucuggcaacugcgacgucgugaucggcauugugaacaauaccguguacgacccucugcagcccgagcuggacagcuucaaagaggaacuggacaaguacuuuaagaaccacacaagccccgacguggaccugggcgauaucagcggaaucaaugccagcgucgugaacauccagaaagagaucgaccggcugaacgagguggccaagaaucugaacgagagccugaucgaccugcaagaacuggggaaguacgagcaguacaucaaguggcccugguacaucuggcugggcuuuaucgccggacugauugccaucgugauggucacaaucaugcuguguugcaugaccagcugcuguagcugccugaagggcuguuguagcuguggcagcugcugcaaguucgacgaggacgauucugagcccgugcugaagggcgugaaacugcacuacacaugaggacuaguguccaccugucccuccugggcugcuggauugucucguuuuccugccaaauaaacaggaucagcgcuuuacagaucuaaaaaaaaaaaaaaaaaaaaaaaaaaaaaaaaaaaaaaaaaaaaaaaaaaaaaaaaaaaaaaaaaaaaaaaaaaaaaaaaaaaaaaaaaaaaaaaaaaaa

SEQ ID NO: 25272 - RNA, 4105 nt, Artificial Sequence
  SARS-CoV-2/Wuhan/WIV05/2019__EPI_ISL_402128 spike protein mRNA gc mod (1-1273)(K417N_E484K_N501Y_D614G)
aggagacccgugacccggaaguuguacggcuacgcgacuuucccucccacaaacccucgcgcccuuccuuuccuacuugggcccggcagaaagcuuaccauguucguguuccuggugcugcugccucugguguccagccagugugugaaccugaccaccagaacacagcugccuccagccuacaccaacagcuuuaccagaggcguguacuaccccgacaagguguucagauccagcgugcugcacucuacccaggaccuguuccugccuuucuucagcaacgugaccugguuccacgccauccacguguccggcaccaauggcaccaagagauucgacaaccccgugcugcccuucaacgacgggguguacuuugccagcaccgagaaguccaacaucaucagaggcuggaucuucggcaccacacuggacagcaagacccagagccugcugaucgugaacaacgccaccaacguggucaucaaagugugcgaguuccaguucugcaacgaccccuuccugggcgucuacuaccacaagaacaacaagagcuggauggaaagcgaguuccggguguacagcagcgccaacaacugcaccuucgaguacgugucccagccuuuccugauggaccuggaaggcaagcagggcaacuucaagaaccugcgcgaguucguguuuaagaacaucgacggcuacuucaagaucuacagcaagcacaccccuaucaaccucgugcgggaucugccucagggcuucucugcucuggaaccccugguggaucugcccaucggcaucaacaucacccgguuucagacacugcuggcccugcacagaagcuaccugacaccuggcgauagcagcagcggauggacagcuggugccgccgcuuacuaugugggcuaccugcagccuagaaccuuccugcugaaguacaacgagaacggcaccaucaccgacgccguggauugugcucuggauccucugagcgagacaaagugcacccugaaguccuucaccguggaaaagggcaucuaccagaccagcaacuuccgggugcagcccaccgaauccaucgugcgguuccccaauaucaccaaucugugccccuucggcgagguguucaaugccaccagauucgccucuguguacgccuggaaccggaagcggaucagcaauugcguggccgacuacuccgugcuguacaacuccgccagcuucagcaccuucaagugcuacggcguguccccuaccaagcugaacgaccugugcuucacaaacguguacgccgacagcuucgugauccggggagaugaagugcggcagauugccccuggacagacaggcaacaucgccgacuacaacuacaagcugcccgacgacuucaccggcugugugauugccuggaacagcaacaaccuggacuccaaagucggcggcaacuacaauuaccuguaccggcuguuccggaaguccaaucugaagcccuucgagcgggacaucuccaccgagaucuaucaggccggcagcaccccuuguaacggcgugaagggcuucaacugcuacuucccacugcaguccuacggcuuucagcccacauacggcgugggcuaucagcccuacagagugguggugcugagcuucgaacugcugcaugccccugccacagugugcggcccuaagaaaagcaccaaucucgugaagaacaaaugcgugaacuucaacuucaacggccugaccggcaccggcgugcugacagagagcaacaagaaguuccugccauuccagcaguuuggccgggauaucgccgauaccacagacgccguuagagauccccagacacuggaaauccuggacaucaccccuugcagcuucggcggagugucugugaucaccccuggcaccaacaccagcaaucagguggcagugcuguaccagggcgugaacuguaccgaagugcccguggccauucacgccgaucagcugacaccuacauggcggguguacuccaccggcagcaauguguuucagaccagagccggcugucugaucggagccgagcacgugaacaauagcuacgagugcgacauccccaucggcgcuggaaucugcgccagcuaccagacacagacaaacagcccucggagagccagaagcguggccagccagagcaucauugccuacacaaugucucugggcgccgagaacagcguggccuacuccaacaacucuaucgcuauccccaccaacuucaccaucagcgugaccacagagauccugccuguguccaugaccaagaccagcguggacugcaccauguacaucugcggcgauuccaccgagugcuccaaccugcugcugcaguacggcagcuucugcacccagcugaauagagcccugacagggaucgccguggaacaggacaagaacacccaagagguguucgcccaagugaagcagaucuacaagaccccuccuaucaaggacuucggcggcuucaauuucagccagauucugcccgauccuagcaagcccagcaagcggagcuucaucgaggaccugcuguucaacaaagugacacuggccgacgccggcuucaucaagcaguauggcgauugucugggcgacauugccgccagggaucugauuugcgcccagaaguuuaacggacugacagugcugccuccucugcugaccgaugagaugaucgcccaguacacaucugcccugcuggccggcacaaucacaagcggcuggacauuuggagcaggcgccgcucugcagauccccuuugcuaugcagauggccuaccgguucaacggcaucggagugacccagaaugugcuguacgagaaccagaagcugaucgccaaccaguucaacagcgccaucggcaagauccaggacagccugagcagcacagcaagcgcccugggaaagcugcaggacguggucaaccagaaugcccaggcacugaacacccuggucaagcagcuguccuccaacuucggcgccaucagcucugugcugaacgauauccugagcagacuggacaaggucgaggccgaggugcagaucgacagacugaucacaggcagacugcagagccuccagacauacgugacccagcagcugaucagagccgccgagauuagagccucugccaaucuggccgccaccaagaugucugagugugugcugggccagagcaagagaguggacuuuugcggcaagggcuaccaccugaugagcuucccucagucugccccucacggcgugguguuucugcacgugacauaugugcccgcucaagagaagaauuucaccaccgcuccagccaucugccacgacggcaaagcccacuuuccuagagaaggcguguucguguccaacggcacccauugguucgugacacagcggaacuucuacgagccccagaucaucaccaccgacaacaccuucgugucuggcaacugcgacgucgugaucggcauugugaacaauaccguguacgacccucugcagcccgagcuggacagcuucaaagaggaacuggacaaguacuuuaagaaccacacaagccccgacguggaccugggcgauaucagcggaaucaaugccagcgucgugaacauccagaaagagaucgaccggcugaacgagguggccaagaaucugaacgagagccugaucgaccugcaagaacuggggaaguacgagcaguacaucaaguggcccugguacaucuggcugggcuuuaucgccggacugauugccaucgugauggucacaaucaugcuguguugcaugaccagcugcuguagcugccugaagggcuguuguagcuguggcagcugcugcaaguucgacgaggacgauucugagcccgugcugaagggcgugaaacugcacuacacaugaggacuaguguccaccugucccuccugggcugcuggauugucucguuuuccugccaaauaaacaggaucagcgcuuuacagaucuaaaaaaaaaaaaaaaaaaaaaaaaaaaaaaaaaaaaaaaaaaaaaaaaaaaaaaaaaaaaaaaaaaaaaaaaaaaaaaaaaaaaaaaaaaaaaaaaaaaa

SEQ ID NO: 25273 - RNA, 4096 nt, Artificial Sequence
  SARS-CoV-2/Wuhan/WIV05/2019__EPI_ISL_402128 spike protein mRNA gc mod (1-1273)(L18F_D80A_D215G_L242del_A243del_L244del_R246I_K417N_E484 K_N501Y_D614G_A701V)
aggagacccgugacccggaaguuguacggcuacgcgacuuucccucccacaaacccucgcgcccuuccuuuccuacuugggcccggcagaaagcuuaccauguucguguuccuggugcugcugccucugguguccagccagugugugaacuucaccaccagaacacagcugccuccagccuacaccaacagcuuuaccagaggcguguacuaccccgacaagguguucagauccagcgugcugcacucuacccaggaccuguuccugccuuucuucagcaacgugaccugguuccacgccauccacguguccggcaccaauggcaccaagagauucgccaaccccgugcugcccuucaacgacgggguguacuuugccagcaccgagaaguccaacaucaucagaggcuggaucuucggcaccacacuggacagcaagacccagagccugcugaucgugaacaacgccaccaacguggucaucaaagugugcgaguuccaguucugcaacgaccccuuccugggcgucuacuaccacaagaacaacaagagcuggauggaaagcgaguuccggguguacagcagcgccaacaacugcaccuucgaguacgugucccagccuuuccugauggaccuggaaggcaagcagggcaacuucaagaaccugcgcgaguucguguuuaagaacaucgacggcuacuucaagaucuacagcaagcacaccccuaucaaccucgugcggggccugccucagggcuucucugcucuggaaccccugguggaucugcccaucggcaucaacaucacccgguuucagacacugcacaucagcuaccugacaccuggcgauagcagcagcggauggacagcuggugccgccgcuuacuaugugggcuaccugcagccuagaaccuuccugcugaaguacaacgagaacggcaccaucaccgacgccguggauugugcucuggauccucugagcgagacaaagugcacccugaaguccuucaccguggaaaagggcaucuaccagaccagcaacuuccgggugcagcccaccgaauccaucgugcgguuccccaauaucaccaaucugugccccuucggcgagguguucaaugccaccagauucgccucuguguacgccuggaaccggaagcggaucagcaauugcguggccgacuacuccgugcuguacaacuccgccagcuucagcaccuucaagugcuacggcguguccccuaccaagcugaacgaccugugcuucacaaacguguacgccgacagcuucgugauccggggagaugaagugcggcagauugccccuggacagacaggcaacaucgccgacuacaacuacaagcugcccgacgacuucaccggcugugugauugccuggaacagcaacaaccuggacuccaaagucggcggcaacuacaauuaccuguaccggcuguuccggaaguccaaucugaagcccuucgagcgggacaucuccaccgagaucuaucaggccggcagcaccccuuguaacggcgugaagggcuucaacugcuacuucccacugcaguccuacggcuuucagcccacauacggcgugggcuaucagcccuacagagugguggugcugagcuucgaacugcugcaugccccugccacagugugcggcccuaagaaaagcaccaaucucgugaagaacaaaugcgugaacuucaacuucaacggccugaccggcaccggcgugcugacagagagcaacaagaaguuccugccauuccagcaguuuggccgggauaucgccgauaccacagacgccguuagagauccccagacacuggaaauccuggacaucaccccuugcagcuucggcggagugucugugaucaccccuggcaccaacaccagcaaucagguggcagugcuguaccagggcgugaacuguaccgaagugcccguggccauucacgccgaucagcugacaccuacauggcggguguacuccaccggcagcaauguguuucagaccagagccggcugucugaucggagccgagcacgugaacaauagcuacgagugcgacauccccaucggcgcuggaaucugcgccagcuaccagacacagacaaacagcccucggagagccagaagcguggccagccagagcaucauugccuacacaaugucucugggcguggagaacagcguggccuacuccaacaacucuaucgcuauccccaccaacuucaccaucagcgugaccacagagauccugccuguguccaugaccaagaccagcguggacugcaccauguacaucugcggcgauuccaccgagugcuccaaccugcugcugcaguacggcagcuucugcacccagcugaauagagcccugacagggaucgccguggaacaggacaagaacacccaagagguguucgcccaagugaagcagaucuacaagaccccuccuaucaaggacuucggcggcuucaauuucagccagauucugcccgauccuagcaagcccagcaagcggagcuucaucgaggaccugcuguucaacaaagugacacuggccgacgccggcuucaucaagcaguauggcgauugucugggcgacauugccgccagggaucugauuugcgcccagaaguuuaacggacugacagugcugccuccucugcugaccgaugagaugaucgcccaguacacaucugcccugcuggccggcacaaucacaagcggcuggacauuuggagcaggcgccgcucugcagauccccuuugcuaugcagauggccuaccgguucaacggcaucggagugacccagaaugugcuguacgagaaccagaagcugaucgccaaccaguucaacagcgccaucggcaagauccaggacagccugagcagcacagcaagcgcccugggaaagcugcaggacguggucaaccagaaugcccaggcacugaacacccuggucaagcagcuguccuccaacuucggcgccaucagcucugugcugaacgauauccugagcagacuggacaaggucgaggccgaggugcagaucgacagacugaucacaggcagacugcagagccuccagacauacgugacccagcagcugaucagagccgccgagauuagagccucugccaaucuggccgccaccaagaugucugagugugugcugggccagagcaagagaguggacuuuugcggcaagggcuaccaccugaugagcuucccucagucugccccucacggcgugguguuucugcacgugacauaugugcccgcucaagagaagaauuucaccaccgcuccagccaucugccacgacggcaaagcccacuuuccuagagaaggcguguucguguccaacggcacccauugguucgugacacagcggaacuucuacgagccccagaucaucaccaccgacaacaccuucgugucuggcaacugcgacgucgugaucggcauugugaacaauaccguguacgacccucugcagcccgagcuggacagcuucaaagaggaacuggacaaguacuuuaagaaccacacaagccccgacguggaccugggcgauaucagcggaaucaaugccagcgucgugaacauccagaaagagaucgaccggcugaacgagguggccaagaaucugaacgagagccugaucgaccugcaagaacuggggaaguacgagcaguacaucaaguggcccugguacaucuggcugggcuuuaucgccggacugauugccaucgugauggucacaaucaugcuguguugcaugaccagcugcuguagcugccugaagggcuguuguagcuguggcagcugcugcaaguucgacgaggacgauucugagcccgugcugaagggcgugaaacugcacuacacaugaggacuaguguccaccugucccuccugggcugcuggauugucucguuuuccugccaaauaaacaggaucagcgcuuuacagaucuaaaaaaaaaaaaaaaaaaaaaaaaaaaaaaaaaaaaaaaaaaaaaaaaaaaaaaaaaaaaaaaaaaaaaaaaaaaaaaaaaaaaaaaaaaaaaaaaaaaa

SEQ ID NO: 25274 - RNA, 4105 nt, Artificial Sequence
  SARS-CoV-2/Wuhan/WIV05/2019__EPI_ISL_402128 spike protein mRNA gc mod (1-1273)(E484K_D614G)
aggagacccgugacccggaaguuguacggcuacgcgacuuucccucccacaaacccucgcgcccuuccuuuccuacuugggcccggcagaaagcuuaccauguucguguuccuggugcugcugccucugguguccagccagugugugaaccugaccaccagaacacagcugccuccagccuacaccaacagcuuuaccagaggcguguacuaccccgacaagguguucagauccagcgugcugcacucuacccaggaccuguuccugccuuucuucagcaacgugaccugguuccacgccauccacguguccggcaccaauggcaccaagagauucgacaaccccgugcugcccuucaacgacgggguguacuuugccagcaccgagaaguccaacaucaucagaggcuggaucuucggcaccacacuggacagcaagacccagagccugcugaucgugaacaacgccaccaacguggucaucaaagugugcgaguuccaguucugcaacgaccccuuccugggcgucuacuaccacaagaacaacaagagcuggauggaaagcgaguuccggguguacagcagcgccaacaacugcaccuucgaguacgugucccagccuuuccugauggaccuggaaggcaagcagggcaacuucaagaaccugcgcgaguucguguuuaagaacaucgacggcuacuucaagaucuacagcaagcacaccccuaucaaccucgugcgggaucugccucagggcuucucugcucuggaaccccugguggaucugcccaucggcaucaacaucacccgguuucagacacugcuggcccugcacagaagcuaccugacaccuggcgauagcagcagcggauggacagcuggugccgccgcuuacuaugugggcuaccugcagccuagaaccuuccugcugaaguacaacgagaacggcaccaucaccgacgccguggauugugcucuggauccucugagcgagacaaagugcacccugaaguccuucaccguggaaaagggcaucuaccagaccagcaacuuccgggugcagcccaccgaauccaucgugcgguuccccaauaucaccaaucugugccccuucggcgagguguucaaugccaccagauucgccucuguguacgccuggaaccggaagcggaucagcaauugcguggccgacuacuccgugcuguacaacuccgccagcuucagcaccuucaagugcuacggcguguccccuaccaagcugaacgaccugugcuucacaaacguguacgccgacagcuucgugauccggggagaugaagugcggcagauugccccuggacagacaggcaagaucgccgacuacaacuacaagcugcccgacgacuucaccggcugugugauugccuggaacagcaacaaccuggacuccaaagucggcggcaacuacaauuaccuguaccggcuguuccggaaguccaaucugaagcccuucgagcgggacaucuccaccgagaucuaucaggccggcagcaccccuuguaacggcgugaagggcuucaacugcuacuucccacugcaguccuacggcuuucagcccacaaauggcgugggcuaucagcccuacagagugguggugcugagcuucgaacugcugcaugccccugccacagugugcggcccuaagaaaagcaccaaucucgugaagaacaaaugcgugaacuucaacuucaacggccugaccggcaccggcgugcugacagagagcaacaagaaguuccugccauuccagcaguuuggccgggauaucgccgauaccacagacgccguuagagauccccagacacuggaaauccuggacaucaccccuugcagcuucggcggagugucugugaucaccccuggcaccaacaccagcaaucagguggcagugcuguaccagggcgugaacuguaccgaagugcccguggccauucacgccgaucagcugacaccuacauggcggguguacuccaccggcagcaauguguuucagaccagagccggcugucugaucggagccgagcacgugaacaauagcuacgagugcgacauccccaucggcgcuggaaucugcgccagcuaccagacacagacaaacagcccucggagagccagaagcguggccagccagagcaucauugccuacacaaugucucugggcgccgagaacagcguggccuacuccaacaacucuaucgcuauccccaccaacuucaccaucagcgugaccacagagauccugccuguguccaugaccaagaccagcguggacugcaccauguacaucugcggcgauuccaccgagugcuccaaccugcugcugcaguacggcagcuucugcacccagcugaauagagcccugacagggaucgccguggaacaggacaagaacacccaagagguguucgcccaagugaagcagaucuacaagaccccuccuaucaaggacuucggcggcuucaauuucagccagauucugcccgauccuagcaagcccagcaagcggagcuucaucgaggaccugcuguucaacaaagugacacuggccgacgccggcuucaucaagcaguauggcgauugucugggcgacauugccgccagggaucugauuugcgcccagaaguuuaacggacugacagugcugccuccucugcugaccgaugagaugaucgcccaguacacaucugcccugcuggccggcacaaucacaagcggcuggacauuuggagcaggcgccgcucugcagauccccuuugcuaugcagauggccuaccgguucaacggcaucggagugacccagaaugugcuguacgagaaccagaagcugaucgccaaccaguucaacagcgccaucggcaagauccaggacagccugagcagcacagcaagcgcccugggaaagcugcaggacguggucaaccagaaugcccaggcacugaacacccuggucaagcagcuguccuccaacuucggcgccaucagcucugugcugaacgauauccugagcagacuggacaaggucgaggccgaggugcagaucgacagacugaucacaggcagacugcagagccuccagacauacgugacccagcagcugaucagagccgccgagauuagagccucugccaaucuggccgccaccaagaugucugagugugugcugggccagagcaagagaguggacuuuugcggcaagggcuaccaccugaugagcuucccucagucugccccucacggcgugguguuucugcacgugacauaugugcccgcucaagagaagaauuucaccaccgcuccagccaucugccacgacggcaaagcccacuuuccuagagaaggcguguucguguccaacggcacccauugguucgugacacagcggaacuucuacgagccccagaucaucaccaccgacaacaccuucgugucuggcaacugcgacgucgugaucggcauugugaacaauaccguguacgacccucugcagcccgagcuggacagcuucaaagaggaacuggacaaguacuuuaagaaccacacaagccccgacguggaccugggcgauaucagcggaaucaaugccagcgucgugaacauccagaaagagaucgaccggcugaacgagguggccaagaaucugaacgagagccugaucgaccugcaagaacuggggaaguacgagcaguacaucaaguggcccugguacaucuggcugggcuuuaucgccggacugauugccaucgugauggucacaaucaugcuguguugcaugaccagcugcuguagcugccugaagggcuguuguagcuguggcagcugcugcaaguucgacgaggacgauucugagcccgugcugaagggcgugaaacugcacuacacaugaggacuaguguccaccugucccuccugggcugcuggauugucucguuuuccugccaaauaaacaggaucagcgcuuuacagaucuaaaaaaaaaaaaaaaaaaaaaaaaaaaaaaaaaaaaaaaaaaaaaaaaaaaaaaaaaaaaaaaaaaaaaaaaaaaaaaaaaaaaaaaaaaaaaaaaaaaa

SEQ ID NO: 25275 - RNA, 4105 nt, Artificial Sequence
  SARS-CoV-2/Wuhan/WIV05/2019__EPI_ISL_402128 spike protein mRNA gc mod (1-1273)(L18F_T20N_P26S_D138Y_R190S_K417T_E484K_N501Y_D614G_H655Y _T1027I)
aggagacccgugacccggaaguuguacggcuacgcgacuuucccucccacaaacccucgcgcccuuccuuuccuacuugggcccggcagaaagcuuaccauguucguguuccuggugcugcugccucugguguccagccagugugugaacuucaccaacagaacacagcugccuagcgccuacaccaacagcuuuaccagaggcguguacuaccccgacaagguguucagauccagcgugcugcacucuacccaggaccuguuccugccuuucuucagcaacgugaccugguuccacgccauccacguguccggcaccaauggcaccaagagauucgacaaccccgugcugcccuucaacgacgggguguacuuugccagcaccgagaaguccaacaucaucagaggcuggaucuucggcaccacacuggacagcaagacccagagccugcugaucgugaacaacgccaccaacguggucaucaaagugugcgaguuccaguucugcaacuaccccuuccugggcgucuacuaccacaagaacaacaagagcuggauggaaagcgaguuccggguguacagcagcgccaacaacugcaccuucgaguacgugucccagccuuuccugauggaccuggaaggcaagcagggcaacuucaagaaccugagcgaguucguguuuaagaacaucgacggcuacuucaagaucuacagcaagcacaccccuaucaaccucgugcgggaucugccucagggcuucucugcucuggaaccccugguggaucugcccaucggcaucaacaucacccgguuucagacacugcuggcccugcacagaagcuaccugacaccuggcgauagcagcagcggauggacagcuggugccgccgcuuacuaugugggcuaccugcagccuagaaccuuccugcugaaguacaacgagaacggcaccaucaccgacgccguggauugugcucuggauccucugagcgagacaaagugcacccugaaguccuucaccguggaaaagggcaucuaccagaccagcaacuuccgggugcagcccaccgaauccaucgugcgguuccccaauaucaccaaucugugccccuucggcgagguguucaaugccaccagauucgccucuguguacgccuggaaccggaagcggaucagcaauugcguggccgacuacuccgugcuguacaacuccgccagcuucagcaccuucaagugcuacggcguguccccuaccaagcugaacgaccugugcuucacaaacguguacgccgacagcuucgugauccggggagaugaagugcggcagauugccccuggacagacaggcaccaucgccgacuacaacuacaagcugcccgacgacuucaccggcugugugauugccuggaacagcaacaaccuggacuccaaagucggcggcaacuacaauuaccuguaccggcuguuccggaaguccaaucugaagcccuucgagcgggacaucuccaccgagaucuaucaggccggcagcaccccuuguaacggcgugaagggcuucaacugcuacuucccacugcaguccuacggcuuucagcccacauacggcgugggcuaucagcccuacagagugguggugcugagcuucgaacugcugcaugccccugccacagugugcggcccuaagaaaagcaccaaucucgugaagaacaaaugcgugaacuucaacuucaacggccugaccggcaccggcgugcugacagagagcaacaagaaguuccugccauuccagcaguuuggccgggauaucgccgauaccacagacgccguuagagauccccagacacuggaaauccuggacaucaccccuugcagcuucggcggagugucugugaucaccccuggcaccaacaccagcaaucagguggcagugcuguaccagggcgugaacuguaccgaagugcccguggccauucacgccgaucagcugacaccuacauggcggguguacuccaccggcagcaauguguuucagaccagagccggcugucugaucggagccgaguacgugaacaauagcuacgagugcgacauccccaucggcgcuggaaucugcgccagcuaccagacacagacaaacagcccucggagagccagaagcguggccagccagagcaucauugccuacacaaugucucugggcgccgagaacagcguggccuacuccaacaacucuaucgcuauccccaccaacuucaccaucagcgugaccacagagauccugccuguguccaugaccaagaccagcguggacugcaccauguacaucugcggcgauuccaccgagugcuccaaccugcugcugcaguacggcagcuucugcacccagcugaauagagcccugacagggaucgccguggaacaggacaagaacacccaagagguguucgcccaagugaagcagaucuacaagaccccuccuaucaaggacuucggcggcuucaauuucagccagauucugcccgauccuagcaagcccagcaagcggagcuucaucgaggaccugcuguucaacaaagugacacuggccgacgccggcuucaucaagcaguauggcgauugucugggcgacauugccgccagggaucugauuugcgcccagaaguuuaacggacugacagugcugccuccucugcugaccgaugagaugaucgcccaguacacaucugcccugcuggccggcacaaucacaagcggcuggacauuuggagcaggcgccgcucugcagauccccuuugcuaugcagauggccuaccgguucaacggcaucggagugacccagaaugugcuguacgagaaccagaagcugaucgccaaccaguucaacagcgccaucggcaagauccaggacagccugagcagcacagcaagcgcccugggaaagcugcaggacguggucaaccagaaugcccaggcacugaacacccuggucaagcagcuguccuccaacuucggcgccaucagcucugugcugaacgauauccugagcagacuggacaaggucgaggccgaggugcagaucgacagacugaucacaggcagacugcagagccuccagacauacgugacccagcagcugaucagagccgccgagauuagagccucugccaaucuggccgccaucaagaugucugagugugugcugggccagagcaagagaguggacuuuugcggcaagggcuaccaccugaugagcuucccucagucugccccucacggcgugguguuucugcacgugacauaugugcccgcucaagagaagaauuucaccaccgcuccagccaucugccacgacggcaaagcccacuuuccuagagaaggcguguucguguccaacggcacccauugguucgugacacagcggaacuucuacgagccccagaucaucaccaccgacaacaccuucgugucuggcaacugcgacgucgugaucggcauugugaacaauaccguguacgacccucugcagcccgagcuggacagcuucaaagaggaacuggacaaguacuuuaagaaccacacaagccccgacguggaccugggcgauaucagcggaaucaaugccagcgucgugaacauccagaaagagaucgaccggcugaacgagguggccaagaaucugaacgagagccugaucgaccugcaagaacuggggaaguacgagcaguacaucaaguggcccugguacaucuggcugggcuuuaucgccggacugauugccaucgugauggucacaaucaugcuguguugcaugaccagcugcuguagcugccugaagggcuguuguagcuguggcagcugcugcaaguucgacgaggacgauucugagcccgugcugaagggcgugaaacugcacuacacaugaggacuaguguccaccugucccuccugggcugcuggauugucucguuuuccugccaaauaaacaggaucagcgcuuuacagaucuaaaaaaaaaaaaaaaaaaaaaaaaaaaaaaaaaaaaaaaaaaaaaaaaaaaaaaaaaaaaaaaaaaaaaaaaaaaaaaaaaaaaaaaaaaaaaaaaaaaa

SEQ ID NO: 25276 - RNA, 4105 nt, Artificial Sequence
  SARS-CoV-2/Wuhan/WIV05/2019__EPI_ISL_402128 spike protein mRNA gc mod (1-1273)(S13I_W152C_L452R_D614G)
aggagacccgugacccggaaguuguacggcuacgcgacuuucccucccacaaacccucgcgcccuuccuuuccuacuugggcccggcagaaagcuuaccauguucguguuccuggugcugcugccucugguguccauccagugugugaaccugaccaccagaacacagcugccuccagccuacaccaacagcuuuaccagaggcguguacuaccccgacaagguguucagauccagcgugcugcacucuacccaggaccuguuccugccuuucuucagcaacgugaccugguuccacgccauccacguguccggcaccaauggcaccaagagauucgacaaccccgugcugcccuucaacgacgggguguacuuugccagcaccgagaaguccaacaucaucagaggcuggaucuucggcaccacacuggacagcaagacccagagccugcugaucgugaacaacgccaccaacguggucaucaaagugugcgaguuccaguucugcaacgaccccuuccugggcgucuacuaccacaagaacaacaagagcugcauggaaagcgaguuccggguguacagcagcgccaacaacugcaccuucgaguacgugucccagccuuuccugauggaccuggaaggcaagcagggcaacuucaagaaccugcgcgaguucguguuuaagaacaucgacggcuacuucaagaucuacagcaagcacaccccuaucaaccucgugcgggaucugccucagggcuucucugcucuggaaccccugguggaucugcccaucggcaucaacaucacccgguuucagacacugcuggcccugcacagaagcuaccugacaccuggcgauagcagcagcggauggacagcuggugccgccgcuuacuaugugggcuaccugcagccuagaaccuuccugcugaaguacaacgagaacggcaccaucaccgacgccguggauugugcucuggauccucugagcgagacaaagugcacccugaaguccuucaccguggaaaagggcaucuaccagaccagcaacuuccgggugcagcccaccgaauccaucgugcgguuccccaauaucaccaaucugugccccuucggcgagguguucaaugccaccagauucgccucuguguacgccuggaaccggaagcggaucagcaauugcguggccgacuacuccgugcuguacaacuccgccagcuucagcaccuucaagugcuacggcguguccccuaccaagcugaacgaccugugcuucacaaacguguacgccgacagcuucgugauccggggagaugaagugcggcagauugccccuggacagacaggcaagaucgccgacuacaacuacaagcugcccgacgacuucaccggcugugugauugccuggaacagcaacaaccuggacuccaaagucggcggcaacuacaauuaccgcuaccggcuguuccggaaguccaaucugaagcccuucgagcgggacaucuccaccgagaucuaucaggccggcagcaccccuuguaacggcguggaaggcuucaacugcuacuucccacugcaguccuacggcuuucagcccacaaauggcgugggcuaucagcccuacagagugguggugcugagcuucgaacugcugcaugccccugccacagugugcggcccuaagaaaagcaccaaucucgugaagaacaaaugcgugaacuucaacuucaacggccugaccggcaccggcgugcugacagagagcaacaagaaguuccugccauuccagcaguuuggccgggauaucgccgauaccacagacgccguuagagauccccagacacuggaaauccuggacaucaccccuugcagcuucggcggagugucugugaucaccccuggcaccaacaccagcaaucagguggcagugcuguaccagggcgugaacuguaccgaagugcccguggccauucacgccgaucagcugacaccuacauggcggguguacuccaccggcagcaauguguuucagaccagagccggcugucugaucggagccgagcacgugaacaauagcuacgagugcgacauccccaucggcgcuggaaucugcgccagcuaccagacacagacaaacagcccucggagagccagaagcguggccagccagagcaucauugccuacacaaugucucugggcgccgagaacagcguggccuacuccaacaacucuaucgcuauccccaccaacuucaccaucagcgugaccacagagauccugccuguguccaugaccaagaccagcguggacugcaccauguacaucugcggcgauuccaccgagugcuccaaccugcugcugcaguacggcagcuucugcacccagcugaauagagcccugacagggaucgccguggaacaggacaagaacacccaagagguguucgcccaagugaagcagaucuacaagaccccuccuaucaaggacuucggcggcuucaauuucagccagauucugcccgauccuagcaagcccagcaagcggagcuucaucgaggaccugcuguucaacaaagugacacuggccgacgccggcuucaucaagcaguauggcgauugucugggcgacauugccgccagggaucugauuugcgcccagaaguuuaacggacugacagugcugccuccucugcugaccgaugagaugaucgcccaguacacaucugcccugcuggccggcacaaucacaagcggcuggacauuuggagcaggcgccgcucugcagauccccuuugcuaugcagauggccuaccgguucaacggcaucggagugacccagaaugugcuguacgagaaccagaagcugaucgccaaccaguucaacagcgccaucggcaagauccaggacagccugagcagcacagcaagcgcccugggaaagcugcaggacguggucaaccagaaugcccaggcacugaacacccuggucaagcagcuguccuccaacuucggcgccaucagcucugugcugaacgauauccugagcagacuggacaaggucgaggccgaggugcagaucgacagacugaucacaggcagacugcagagccuccagacauacgugacccagcagcugaucagagccgccgagauuagagccucugccaaucuggccgccaccaagaugucugagugugugcugggccagagcaagagaguggacuuuugcggcaagggcuaccaccugaugagcuucccucagucugccccucacggcgugguguuucugcacgugacauaugugcccgcucaagagaagaauuucaccaccgcuccagccaucugccacgacggcaaagcccacuuuccuagagaaggcguguucguguccaacggcacccauugguucgugacacagcggaacuucuacgagccccagaucaucaccaccgacaacaccuucgugucuggcaacugcgacgucgugaucggcauugugaacaauaccguguacgacccucugcagcccgagcuggacagcuucaaagaggaacuggacaaguacuuuaagaaccacacaagccccgacguggaccugggcgauaucagcggaaucaaugccagcgucgugaacauccagaaagagaucgaccggcugaacgagguggccaagaaucugaacgagagccugaucgaccugcaagaacuggggaaguacgagcaguacaucaaguggcccugguacaucuggcugggcuuuaucgccggacugauugccaucgugauggucacaaucaugcuguguugcaugaccagcugcuguagcugccugaagggcuguuguagcuguggcagcugcugcaaguucgacgaggacgauucugagcccgugcugaagggcgugaaacugcacuacacaugaggacuaguguccaccugucccuccugggcugcuggauugucucguuuuccugccaaauaaacaggaucagcgcuuuacagaucuaaaaaaaaaaaaaaaaaaaaaaaaaaaaaaaaaaaaaaaaaaaaaaaaaaaaaaaaaaaaaaaaaaaaaaaaaaaaaaaaaaaaaaaaaaaaaaaaaaaa

SEQ ID NO: 25277 - RNA, 4105 nt, Artificial Sequence
  SARS-CoV-2/Wuhan/WIV05/2019__EPI_ISL_402128 spike protein mRNA gc (1-1273)(K986P_V987P) R10156
aggagacccgugacccggaaguuguacggcuacgcgacuuucccucccacaaacccucgcgcccuuccuuuccuacuugggcccggcagaaagcuuaccauguucguguuccugguccuccugccccuggugagcucccagugcgugaaccucaccacccgcacgcagcugccgcccgccuacaccaacagcuucacccggggcgucuacuaccccgacaagguguuccgcuccagcgugcugcacuccacccaggaccucuuccugcccuucuucagcaacgucacgugguuccacgccauccacguguccgggaccaacggcaccaagcgguucgacaacccggugcugcccuucaacgacggggucuacuucgcgagcaccgagaaguccaacaucauccgcggcuggaucuucgggacgacccucgacagcaagacccagucccugcugaucgugaacaacgccaccaacguggucaucaaggugugcgaguuccaguucugcaacgaccccuuccucggcguguacuaccacaagaacaacaagagcuggauggaguccgaguuccgggucuacagcuccgccaacaacugcacguucgaguacgugagccagcccuuccugauggaccuggagggcaagcaggggaacuucaagaaccuccgcgaguucguguucaagaacaucgacggcuacuucaagaucuacuccaagcacaccccgaucaaccugguccgggaccugccccagggguucagcgcccucgagccccugguggaccugcccaucggcaucaacaucacccgcuuccagacccuccuggcccugcaccgguccuaccucacgccgggggacagcagcuccggcuggaccgcgggcgccgccgccuacuacgugggguaccugcagccccgcaccuuccugcucaaguacaacgagaacggcaccaucacggacgcggucgacugcgcccuggacccccugagcgagaccaagugcacccucaaguccuucaccguggagaaggggaucuaccagacgagcaacuuccgggugcagcccaccgaguccaucguccgcuucccgaacaucaccaaccugugccccuucggcgagguguucaacgccacccgguucgccagcgucuacgccuggaaccgcaagcggaucuccaacugcguggcggacuacagcgugcuguacaacuccgccagcuucuccacguucaagugcuacggcgucagccccaccaagcucaacgaccugugcuucaccaacguguacgccgacuccuucgugauccgcggggacgagguccggcagaucgcccccggccagaccgggaagaucgccgacuacaacuacaagcugccggacgacuucacgggcugcgugaucgcguggaacagcaacaaccucgacuccaaggucgggggcaacuacaacuaccuguaccgccuguuccgcaagagcaaccucaagcccuucgagcgggacaucuccaccgagaucuaccaggccggcagcacccccugcaacgggguggagggcuucaacugcuacuucccccugcaguccuacggguuccagccgaccaacggcgugggguaccagcccuaccggguggucgugcugagcuucgagcuccugcacgcccccgccacggugugcggccccaagaaguccaccaaccuggucaagaacaagugcgugaacuucaacuucaacggccucaccgggaccggcgugcugaccgagagcaacaagaaguuccugccguuccagcaguucgggcgcgacaucgccgacacgaccgacgcgguccgcgacccccagacccuggagauccucgacaucacccccugcagcuucggcgggguguccgugaucacgccgggcaccaacaccagcaaccaggucgccgugcuguaccaggacgugaacugcaccgagguccccguggccauccacgccgaccagcugacgcccaccuggcggguguacuccaccggcagcaacgucuuccagacccgcgccgggugccucaucggcgcggagcacgugaacaacuccuacgagugcgacauccccaucggggccggcaucugcgccagcuaccagacgcagaccaacuccccgcggcgcgcccggagcguggcgucccagagcaucaucgccuacaccaugucccugggcgccgagaacagcgucgccuacuccaacaacagcaucgccauccccaccaacuucacgaucuccgugaccaccgagauccugcccgugagcaugaccaagacgagcgucgacugcaccauguacaucugcggggacuccaccgagugcagcaaccuccugcugcaguacggcuccuucugcacccagcucaaccgcgcgcugacggggaucgccguggagcaggacaagaacacccaggagguguucgcccaggucaagcagaucuacaagacgcccccgaucaaggacuucggcggguucaacuucagccagauccugcccgaccccuccaagcccagcaagcgguccuucaucgaggaccuccuguucaacaaggugacccuggccgacgccggcuucaucaagcaguacggcgacugccucggggacaucgcggcccgcgaccugaucugcgcccagaaguucaacggccugaccgugcucccgccccugcugaccgacgagaugaucgcccaguacaccagcgcccuccuggcggggaccaucacguccggcuggaccuucggggccggcgccgcccugcagauccccuucgcgaugcagauggccuaccgguucaacggcaucggggucacccagaacgugcucuacgagaaccagaagcugaucgccaaccaguucaacagcgccaucggcaagauccaggacucccugagcuccaccgccagcgcgcucgggaagcugcaggacguggucaaccagaacgcccaggcccugaacacgcucgugaagcagcuguccagcaacuucggcgccaucuccagcgugcugaacgacauccucucccgccuggacccgcccgaggccgaggugcagaucgaccggcugaucaccgggcgccuccagagccugcagaccuacgugacccagcagcugauccgggcggccgagauccgcgccagcgccaaccucgccgcgaccaagauguccgagugcguccugggccagagcaagcggguggacuucugcggcaagggguaccaccugauguccuucccccagagcgccccgcacggcguggucuuccuccacgugacguacguccccgcccaggagaagaacuucaccaccgcccccgcgaucugccacgacgggaaggcccacuucccccgcgagggcguguucguguccaacgggacccacugguucgucacgcagcggaacuucuacgagccgcagaucaucaccaccgacaacaccuucgugagcggcaacugcgacguggucaucggcaucgugaacaacacgguguacgacccccugcagcccgagcuggacuccuucaaggaggagcucgacaaguacuucaagaaccacaccagccccgacgucgaccugggggacaucuccggcaucaacgccagcguggugaacauccagaaggagaucgaccgccugaacgaggucgccaagaaccucaacgagucccugaucgaccugcaggagcucgggaaguacgagcaguacaucaaguggccgugguacaucuggcugggcuucaucgccggccugaucgcgaucgugauggugaccaucaugcucugcugcaugaccagcugcugcuccugccugaaggggugcugcagcugcggcuccugcugcaaguucgacgaggacgacagcgagcccguccugaagggggugaagcuccacuacacgugaggacuaguguccaccugucccuccugggcugcuggauugucucguuuuccugccaaauaaacaggaucagcgcuuuacagaucuaaaaaaaaaaaaaaaaaaaaaaaaaaaaaaaaaaaaaaaaaaaaaaaaaaaaaaaaaaaaaaaaaaaaaaaaaaaaaaaaaaaaaaaaaaaaaaaaaaaa

SEQ ID NO: 25278 - RNA, 4105 nt, Artificial Sequence
  SARS-CoV-2/Wuhan/WIV05/2019__EPI_ISL_402128 spike protein mRNA gc (1-1273)(K986P_V987P_ D614G)
aggagacccgugacccggaaguuguacggcuacgcgacuuucccucccacaaacccucgcgcccuuccuuuccuacuugggcccggcagaaagcuuaccauguucguguuccugguccuccugccccuggugagcucccagugcgugaaccucaccacccgcacgcagcugccgcccgccuacaccaacagcuucacccggggcgucuacuaccccgacaagguguuccgcuccagcgugcugcacuccacccaggaccucuuccugcccuucuucagcaacgucacgugguuccacgccauccacguguccgggaccaacggcaccaagcgguucgacaacccggugcugcccuucaacgacggggucuacuucgcgagcaccgagaaguccaacaucauccgcggcuggaucuucgggacgacccucgacagcaagacccagucccugcugaucgugaacaacgccaccaacguggucaucaaggugugcgaguuccaguucugcaacgaccccuuccucggcguguacuaccacaagaacaacaagagcuggauggaguccgaguuccgggucuacagcuccgccaacaacugcacguucgaguacgugagccagcccuuccugauggaccuggagggcaagcaggggaacuucaagaaccuccgcgaguucguguucaagaacaucgacggcuacuucaagaucuacuccaagcacaccccgaucaaccugguccgggaccugccccagggguucagcgcccucgagccccugguggaccugcccaucggcaucaacaucacccgcuuccagacccuccuggcccugcaccgguccuaccucacgccgggggacagcagcuccggcuggaccgcgggcgccgccgccuacuacgugggguaccugcagccccgcaccuuccugcucaaguacaacgagaacggcaccaucacggacgcggucgacugcgcccuggacccccugagcgagaccaagugcacccucaaguccuucaccguggagaaggggaucuaccagacgagcaacuuccgggugcagcccaccgaguccaucguccgcuucccgaacaucaccaaccugugccccuucggcgagguguucaacgccacccgguucgccagcgucuacgccuggaaccgcaagcggaucuccaacugcguggcggacuacagcgugcuguacaacuccgccagcuucuccacguucaagugcuacggcgucagccccaccaagcucaacgaccugugcuucaccaacguguacgccgacuccuucgugauccgcggggacgagguccggcagaucgcccccggccagaccgggaagaucgccgacuacaacuacaagcugccggacgacuucacgggcugcgugaucgcguggaacagcaacaaccucgacuccaaggucgggggcaacuacaacuaccuguaccgccuguuccgcaagagcaaccucaagcccuucgagcgggacaucuccaccgagaucuaccaggccggcagcacccccugcaacgggguggagggcuucaacugcuacuucccccugcaguccuacggguuccagccgaccaacggcgugggguaccagcccuaccggguggucgugcugagcuucgagcuccugcacgcccccgccacggugugcggccccaagaaguccaccaaccuggucaagaacaagugcgugaacuucaacuucaacggccucaccgggaccggcgugcugaccgagagcaacaagaaguuccugccguuccagcaguucgggcgcgacaucgccgacacgaccgacgcgguccgcgacccccagacccuggagauccucgacaucacccccugcagcuucggcgggguguccgugaucacgccgggcaccaacaccagcaaccaggucgccgugcuguaccagggcgugaacugcaccgagguccccguggccauccacgccgaccagcugacgcccaccuggcggguguacuccaccggcagcaacgucuuccagacccgcgccgggugccucaucggcgcggagcacgugaacaacuccuacgagugcgacauccccaucggggccggcaucugcgccagcuaccagacgcagaccaacuccccgcggcgcgcccggagcguggcgucccagagcaucaucgccuacaccaugucccugggcgccgagaacagcgucgccuacuccaacaacagcaucgccauccccaccaacuucacgaucuccgugaccaccgagauccugcccgugagcaugaccaagacgagcgucgacugcaccauguacaucugcggggacuccaccgagugcagcaaccuccugcugcaguacggcuccuucugcacccagcucaaccgcgcgcugacggggaucgccguggagcaggacaagaacacccaggagguguucgcccaggucaagcagaucuacaagacgcccccgaucaaggacuucggcggguucaacuucagccagauccugcccgaccccuccaagcccagcaagcgguccuucaucgaggaccuccuguucaacaaggugacccuggccgacgccggcuucaucaagcaguacggcgacugccucggggacaucgcggcccgcgaccugaucugcgcccagaaguucaacggccugaccgugcucccgccccugcugaccgacgagaugaucgcccaguacaccagcgcccuccuggcggggaccaucacguccggcuggaccuucggggccggcgccgcccugcagauccccuucgcgaugcagauggccuaccgguucaacggcaucggggucacccagaacgugcucuacgagaaccagaagcugaucgccaaccaguucaacagcgccaucggcaagauccaggacucccugagcuccaccgccagcgcgcucgggaagcugcaggacguggucaaccagaacgcccaggcccugaacacgcucgugaagcagcuguccagcaacuucggcgccaucuccagcgugcugaacgacauccucucccgccuggacccgcccgaggccgaggugcagaucgaccggcugaucaccgggcgccuccagagccugcagaccuacgugacccagcagcugauccgggcggccgagauccgcgccagcgccaaccucgccgcgaccaagauguccgagugcguccugggccagagcaagcggguggacuucugcggcaagggguaccaccugauguccuucccccagagcgccccgcacggcguggucuuccuccacgugacguacguccccgcccaggagaagaacuucaccaccgcccccgcgaucugccacgacgggaaggcccacuucccccgcgagggcguguucguguccaacgggacccacugguucgucacgcagcggaacuucuacgagccgcagaucaucaccaccgacaacaccuucgugagcggcaacugcgacguggucaucggcaucgugaacaacacgguguacgacccccugcagcccgagcuggacuccuucaaggaggagcucgacaaguacuucaagaaccacaccagccccgacgucgaccugggggacaucuccggcaucaacgccagcguggugaacauccagaaggagaucgaccgccugaacgaggucgccaagaaccucaacgagucccugaucgaccugcaggagcucgggaaguacgagcaguacaucaaguggccgugguacaucuggcugggcuucaucgccggccugaucgcgaucgugauggugaccaucaugcucugcugcaugaccagcugcugcuccugccugaaggggugcugcagcugcggcuccugcugcaaguucgacgaggacgacagcgagcccguccugaagggggugaagcuccacuacacgugaggacuaguguccaccugucccuccugggcugcuggauugucucguuuuccugccaaauaaacaggaucagcgcuuuacagaucuaaaaaaaaaaaaaaaaaaaaaaaaaaaaaaaaaaaaaaaaaaaaaaaaaaaaaaaaaaaaaaaaaaaaaaaaaaaaaaaaaaaaaaaaaaaaaaaaaaaa

SEQ ID NO: 25279 - RNA, 4105 nt, Artificial Sequence
  SARS-CoV-2/Wuhan/WIV05/2019__EPI_ISL_402128 spike protein mRNA gc (1-1273)(K986P_V987P_A222V_D614G)
aggagacccgugacccggaaguuguacggcuacgcgacuuucccucccacaaacccucgcgcccuuccuuuccuacuugggcccggcagaaagcuuaccauguucguguuccugguccuccugccccuggugagcucccagugcgugaaccucaccacccgcacgcagcugccgcccgccuacaccaacagcuucacccggggcgucuacuaccccgacaagguguuccgcuccagcgugcugcacuccacccaggaccucuuccugcccuucuucagcaacgucacgugguuccacgccauccacguguccgggaccaacggcaccaagcgguucgacaacccggugcugcccuucaacgacggggucuacuucgcgagcaccgagaaguccaacaucauccgcggcuggaucuucgggacgacccucgacagcaagacccagucccugcugaucgugaacaacgccaccaacguggucaucaaggugugcgaguuccaguucugcaacgaccccuuccucggcguguacuaccacaagaacaacaagagcuggauggaguccgaguuccgggucuacagcuccgccaacaacugcacguucgaguacgugagccagcccuuccugauggaccuggagggcaagcaggggaacuucaagaaccuccgcgaguucguguucaagaacaucgacggcuacuucaagaucuacuccaagcacaccccgaucaaccugguccgggaccugccccagggguucagcguccucgagccccugguggaccugcccaucggcaucaacaucacccgcuuccagacccuccuggcccugcaccgguccuaccucacgccgggggacagcagcuccggcuggaccgcgggcgccgccgccuacuacgugggguaccugcagccccgcaccuuccugcucaaguacaacgagaacggcaccaucacggacgcggucgacugcgcccuggacccccugagcgagaccaagugcacccucaaguccuucaccguggagaaggggaucuaccagacgagcaacuuccgggugcagcccaccgaguccaucguccgcuucccgaacaucaccaaccugugccccuucggcgagguguucaacgccacccgguucgccagcgucuacgccuggaaccgcaagcggaucuccaacugcguggcggacuacagcgugcuguacaacuccgccagcuucuccacguucaagugcuacggcgucagccccaccaagcucaacgaccugugcuucaccaacguguacgccgacuccuucgugauccgcggggacgagguccggcagaucgcccccggccagaccgggaagaucgccgacuacaacuacaagcugccggacgacuucacgggcugcgugaucgcguggaacagcaacaaccucgacuccaaggucgggggcaacuacaacuaccuguaccgccuguuccgcaagagcaaccucaagcccuucgagcgggacaucuccaccgagaucuaccaggccggcagcacccccugcaacgggguggagggcuucaacugcuacuucccccugcaguccuacggguuccagccgaccaacggcgugggguaccagcccuaccggguggucgugcugagcuucgagcuccugcacgcccccgccacggugugcggccccaagaaguccaccaaccuggucaagaacaagugcgugaacuucaacuucaacggccucaccgggaccggcgugcugaccgagagcaacaagaaguuccugccguuccagcaguucgggcgcgacaucgccgacacgaccgacgcgguccgcgacccccagacccuggagauccucgacaucacccccugcagcuucggcgggguguccgugaucacgccgggcaccaacaccagcaaccaggucgccgugcuguaccagggcgugaacugcaccgagguccccguggccauccacgccgaccagcugacgcccaccuggcggguguacuccaccggcagcaacgucuuccagacccgcgccgggugccucaucggcgcggagcacgugaacaacuccuacgagugcgacauccccaucggggccggcaucugcgccagcuaccagacgcagaccaacuccccgcggcgcgcccggagcguggcgucccagagcaucaucgccuacaccaugucccugggcgccgagaacagcgucgccuacuccaacaacagcaucgccauccccaccaacuucacgaucuccgugaccaccgagauccugcccgugagcaugaccaagacgagcgucgacugcaccauguacaucugcggggacuccaccgagugcagcaaccuccugcugcaguacggcuccuucugcacccagcucaaccgcgcgcugacggggaucgccguggagcaggacaagaacacccaggagguguucgcccaggucaagcagaucuacaagacgcccccgaucaaggacuucggcggguucaacuucagccagauccugcccgaccccuccaagcccagcaagcgguccuucaucgaggaccuccuguucaacaaggugacccuggccgacgccggcuucaucaagcaguacggcgacugccucggggacaucgcggcccgcgaccugaucugcgcccagaaguucaacggccugaccgugcucccgccccugcugaccgacgagaugaucgcccaguacaccagcgcccuccuggcggggaccaucacguccggcuggaccuucggggccggcgccgcccugcagauccccuucgcgaugcagauggccuaccgguucaacggcaucggggucacccagaacgugcucuacgagaaccagaagcugaucgccaaccaguucaacagcgccaucggcaagauccaggacucccugagcuccaccgccagcgcgcucgggaagcugcaggacguggucaaccagaacgcccaggcccugaacacgcucgugaagcagcuguccagcaacuucggcgccaucuccagcgugcugaacgacauccucucccgccuggacccgcccgaggccgaggugcagaucgaccggcugaucaccgggcgccuccagagccugcagaccuacgugacccagcagcugauccgggcggccgagauccgcgccagcgccaaccucgccgcgaccaagauguccgagugcguccugggccagagcaagcggguggacuucugcggcaagggguaccaccugauguccuucccccagagcgccccgcacggcguggucuuccuccacgugacguacguccccgcccaggagaagaacuucaccaccgcccccgcgaucugccacgacgggaaggcccacuucccccgcgagggcguguucguguccaacgggacccacugguucgucacgcagcggaacuucuacgagccgcagaucaucaccaccgacaacaccuucgugagcggcaacugcgacguggucaucggcaucgugaacaacacgguguacgacccccugcagcccgagcuggacuccuucaaggaggagcucgacaaguacuucaagaaccacaccagccccgacgucgaccugggggacaucuccggcaucaacgccagcguggugaacauccagaaggagaucgaccgccugaacgaggucgccaagaaccucaacgagucccugaucgaccugcaggagcucgggaaguacgagcaguacaucaaguggccgugguacaucuggcugggcuucaucgccggccugaucgcgaucgugauggugaccaucaugcucugcugcaugaccagcugcugcuccugccugaaggggugcugcagcugcggcuccugcugcaaguucgacgaggacgacagcgagcccguccugaagggggugaagcuccacuacacgugaggacuaguguccaccugucccuccugggcugcuggauugucucguuuuccugccaaauaaacaggaucagcgcuuuacagaucuaaaaaaaaaaaaaaaaaaaaaaaaaaaaaaaaaaaaaaaaaaaaaaaaaaaaaaaaaaaaaaaaaaaaaaaaaaaaaaaaaaaaaaaaaaaaaaaaaaaa

SEQ ID NO: 25280 - RNA, 4105 nt, Artificial Sequence
  SARS-CoV-2/Wuhan/WIV05/2019__EPI_ISL_402128 spike protein mRNA gc (1-1273)(K986P_V987P_N439K_D614G)
aggagacccgugacccggaaguuguacggcuacgcgacuuucccucccacaaacccucgcgcccuuccuuuccuacuugggcccggcagaaagcuuaccauguucguguuccugguccuccugccccuggugagcucccagugcgugaaccucaccacccgcacgcagcugccgcccgccuacaccaacagcuucacccggggcgucuacuaccccgacaagguguuccgcuccagcgugcugcacuccacccaggaccucuuccugcccuucuucagcaacgucacgugguuccacgccauccacguguccgggaccaacggcaccaagcgguucgacaacccggugcugcccuucaacgacggggucuacuucgcgagcaccgagaaguccaacaucauccgcggcuggaucuucgggacgacccucgacagcaagacccagucccugcugaucgugaacaacgccaccaacguggucaucaaggugugcgaguuccaguucugcaacgaccccuuccucggcguguacuaccacaagaacaacaagagcuggauggaguccgaguuccgggucuacagcuccgccaacaacugcacguucgaguacgugagccagcccuuccugauggaccuggagggcaagcaggggaacuucaagaaccuccgcgaguucguguucaagaacaucgacggcuacuucaagaucuacuccaagcacaccccgaucaaccugguccgggaccugccccagggguucagcgcccucgagccccugguggaccugcccaucggcaucaacaucacccgcuuccagacccuccuggcccugcaccgguccuaccucacgccgggggacagcagcuccggcuggaccgcgggcgccgccgccuacuacgugggguaccugcagccccgcaccuuccugcucaaguacaacgagaacggcaccaucacggacgcggucgacugcgcccuggacccccugagcgagaccaagugcacccucaaguccuucaccguggagaaggggaucuaccagacgagcaacuuccgggugcagcccaccgaguccaucguccgcuucccgaacaucaccaaccugugccccuucggcgagguguucaacgccacccgguucgccagcgucuacgccuggaaccgcaagcggaucuccaacugcguggcggacuacagcgugcuguacaacuccgccagcuucuccacguucaagugcuacggcgucagccccaccaagcucaacgaccugugcuucaccaacguguacgccgacuccuucgugauccgcggggacgagguccggcagaucgcccccggccagaccgggaagaucgccgacuacaacuacaagcugccggacgacuucacgggcugcgugaucgcguggaacagcaagaaccucgacuccaaggucgggggcaacuacaacuaccuguaccgccuguuccgcaagagcaaccucaagcccuucgagcgggacaucuccaccgagaucuaccaggccggcagcacccccugcaacgggguggagggcuucaacugcuacuucccccugcaguccuacggguuccagccgaccaacggcgugggguaccagcccuaccggguggucgugcugagcuucgagcuccugcacgcccccgccacggugugcggccccaagaaguccaccaaccuggucaagaacaagugcgugaacuucaacuucaacggccucaccgggaccggcgugcugaccgagagcaacaagaaguuccugccguuccagcaguucgggcgcgacaucgccgacacgaccgacgcgguccgcgacccccagacccuggagauccucgacaucacccccugcagcuucggcgggguguccgugaucacgccgggcaccaacaccagcaaccaggucgccgugcuguaccagggcgugaacugcaccgagguccccguggccauccacgccgaccagcugacgcccaccuggcggguguacuccaccggcagcaacgucuuccagacccgcgccgggugccucaucggcgcggagcacgugaacaacuccuacgagugcgacauccccaucggggccggcaucugcgccagcuaccagacgcagaccaacuccccgcggcgcgcccggagcguggcgucccagagcaucaucgccuacaccaugucccugggcgccgagaacagcgucgccuacuccaacaacagcaucgccauccccaccaacuucacgaucuccgugaccaccgagauccugcccgugagcaugaccaagacgagcgucgacugcaccauguacaucugcggggacuccaccgagugcagcaaccuccugcugcaguacggcuccuucugcacccagcucaaccgcgcgcugacggggaucgccguggagcaggacaagaacacccaggagguguucgcccaggucaagcagaucuacaagacgcccccgaucaaggacuucggcggguucaacuucagccagauccugcccgaccccuccaagcccagcaagcgguccuucaucgaggaccuccuguucaacaaggugacccuggccgacgccggcuucaucaagcaguacggcgacugccucggggacaucgcggcccgcgaccugaucugcgcccagaaguucaacggccugaccgugcucccgccccugcugaccgacgagaugaucgcccaguacaccagcgcccuccuggcggggaccaucacguccggcuggaccuucggggccggcgccgcccugcagauccccuucgcgaugcagauggccuaccgguucaacggcaucggggucacccagaacgugcucuacgagaaccagaagcugaucgccaaccaguucaacagcgccaucggcaagauccaggacucccugagcuccaccgccagcgcgcucgggaagcugcaggacguggucaaccagaacgcccaggcccugaacacgcucgugaagcagcuguccagcaacuucggcgccaucuccagcgugcugaacgacauccucucccgccuggacccgcccgaggccgaggugcagaucgaccggcugaucaccgggcgccuccagagccugcagaccuacgugacccagcagcugauccgggcggccgagauccgcgccagcgccaaccucgccgcgaccaagauguccgagugcguccugggccagagcaagcggguggacuucugcggcaagggguaccaccugauguccuucccccagagcgccccgcacggcguggucuuccuccacgugacguacguccccgcccaggagaagaacuucaccaccgcccccgcgaucugccacgacgggaaggcccacuucccccgcgagggcguguucguguccaacgggacccacugguucgucacgcagcggaacuucuacgagccgcagaucaucaccaccgacaacaccuucgugagcggcaacugcgacguggucaucggcaucgugaacaacacgguguacgacccccugcagcccgagcuggacuccuucaaggaggagcucgacaaguacuucaagaaccacaccagccccgacgucgaccugggggacaucuccggcaucaacgccagcguggugaacauccagaaggagaucgaccgccugaacgaggucgccaagaaccucaacgagucccugaucgaccugcaggagcucgggaaguacgagcaguacaucaaguggccgugguacaucuggcugggcuucaucgccggccugaucgcgaucgugauggugaccaucaugcucugcugcaugaccagcugcugcuccugccugaaggggugcugcagcugcggcuccugcugcaaguucgacgaggacgacagcgagcccguccugaagggggugaagcuccacuacacgugaggacuaguguccaccugucccuccugggcugcuggauugucucguuuuccugccaaauaaacaggaucagcgcuuuacagaucuaaaaaaaaaaaaaaaaaaaaaaaaaaaaaaaaaaaaaaaaaaaaaaaaaaaaaaaaaaaaaaaaaaaaaaaaaaaaaaaaaaaaaaaaaaaaaaaaaaaa

SEQ ID NO: 25281 - RNA, 4105 nt, Artificial Sequence
  SARS-CoV-2/Wuhan/WIV05/2019__EPI_ISL_402128 spike protein mRNA gc (1-1273)(K986P_V987P_S477N_D614G)
aggagacccgugacccggaaguuguacggcuacgcgacuuucccucccacaaacccucgcgcccuuccuuuccuacuugggcccggcagaaagcuuaccauguucguguuccugguccuccugccccuggugagcucccagugcgugaaccucaccacccgcacgcagcugccgcccgccuacaccaacagcuucacccggggcgucuacuaccccgacaagguguuccgcuccagcgugcugcacuccacccaggaccucuuccugcccuucuucagcaacgucacgugguuccacgccauccacguguccgggaccaacggcaccaagcgguucgacaacccggugcugcccuucaacgacggggucuacuucgcgagcaccgagaaguccaacaucauccgcggcuggaucuucgggacgacccucgacagcaagacccagucccugcugaucgugaacaacgccaccaacguggucaucaaggugugcgaguuccaguucugcaacgaccccuuccucggcguguacuaccacaagaacaacaagagcuggauggaguccgaguuccgggucuacagcuccgccaacaacugcacguucgaguacgugagccagcccuuccugauggaccuggagggcaagcaggggaacuucaagaaccuccgcgaguucguguucaagaacaucgacggcuacuucaagaucuacuccaagcacaccccgaucaaccugguccgggaccugccccagggguucagcgcccucgagccccugguggaccugcccaucggcaucaacaucacccgcuuccagacccuccuggcccugcaccgguccuaccucacgccgggggacagcagcuccggcuggaccgcgggcgccgccgccuacuacgugggguaccugcagccccgcaccuuccugcucaaguacaacgagaacggcaccaucacggacgcggucgacugcgcccuggacccccugagcgagaccaagugcacccucaaguccuucaccguggagaaggggaucuaccagacgagcaacuuccgggugcagcccaccgaguccaucguccgcuucccgaacaucaccaaccugugccccuucggcgagguguucaacgccacccgguucgccagcgucuacgccuggaaccgcaagcggaucuccaacugcguggcggacuacagcgugcuguacaacuccgccagcuucuccacguucaagugcuacggcgucagccccaccaagcucaacgaccugugcuucaccaacguguacgccgacuccuucgugauccgcggggacgagguccggcagaucgcccccggccagaccgggaagaucgccgacuacaacuacaagcugccggacgacuucacgggcugcgugaucgcguggaacagcaacaaccucgacuccaaggucgggggcaacuacaacuaccuguaccgccuguuccgcaagagcaaccucaagcccuucgagcgggacaucuccaccgagaucuaccaggccggcaacacccccugcaacgggguggagggcuucaacugcuacuucccccugcaguccuacggguuccagccgaccaacggcgugggguaccagcccuaccggguggucgugcugagcuucgagcuccugcacgcccccgccacggugugcggccccaagaaguccaccaaccuggucaagaacaagugcgugaacuucaacuucaacggccucaccgggaccggcgugcugaccgagagcaacaagaaguuccugccguuccagcaguucgggcgcgacaucgccgacacgaccgacgcgguccgcgacccccagacccuggagauccucgacaucacccccugcagcuucggcgggguguccgugaucacgccgggcaccaacaccagcaaccaggucgccgugcuguaccagggcgugaacugcaccgagguccccguggccauccacgccgaccagcugacgcccaccuggcggguguacuccaccggcagcaacgucuuccagacccgcgccgggugccucaucggcgcggagcacgugaacaacuccuacgagugcgacauccccaucggggccggcaucugcgccagcuaccagacgcagaccaacuccccgcggcgcgcccggagcguggcgucccagagcaucaucgccuacaccaugucccugggcgccgagaacagcgucgccuacuccaacaacagcaucgccauccccaccaacuucacgaucuccgugaccaccgagauccugcccgugagcaugaccaagacgagcgucgacugcaccauguacaucugcggggacuccaccgagugcagcaaccuccugcugcaguacggcuccuucugcacccagcucaaccgcgcgcugacggggaucgccguggagcaggacaagaacacccaggagguguucgcccaggucaagcagaucuacaagacgcccccgaucaaggacuucggcggguucaacuucagccagauccugcccgaccccuccaagcccagcaagcgguccuucaucgaggaccuccuguucaacaaggugacccuggccgacgccggcuucaucaagcaguacggcgacugccucggggacaucgcggcccgcgaccugaucugcgcccagaaguucaacggccugaccgugcucccgccccugcugaccgacgagaugaucgcccaguacaccagcgcccuccuggcggggaccaucacguccggcuggaccuucggggccggcgccgcccugcagauccccuucgcgaugcagauggccuaccgguucaacggcaucggggucacccagaacgugcucuacgagaaccagaagcugaucgccaaccaguucaacagcgccaucggcaagauccaggacucccugagcuccaccgccagcgcgcucgggaagcugcaggacguggucaaccagaacgcccaggcccugaacacgcucgugaagcagcuguccagcaacuucggcgccaucuccagcgugcugaacgacauccucucccgccuggacccgcccgaggccgaggugcagaucgaccggcugaucaccgggcgccuccagagccugcagaccuacgugacccagcagcugauccgggcggccgagauccgcgccagcgccaaccucgccgcgaccaagauguccgagugcguccugggccagagcaagcggguggacuucugcggcaagggguaccaccugauguccuucccccagagcgccccgcacggcguggucuuccuccacgugacguacguccccgcccaggagaagaacuucaccaccgcccccgcgaucugccacgacgggaaggcccacuucccccgcgagggcguguucguguccaacgggacccacugguucgucacgcagcggaacuucuacgagccgcagaucaucaccaccgacaacaccuucgugagcggcaacugcgacguggucaucggcaucgugaacaacacgguguacgacccccugcagcccgagcuggacuccuucaaggaggagcucgacaaguacuucaagaaccacaccagccccgacgucgaccugggggacaucuccggcaucaacgccagcguggugaacauccagaaggagaucgaccgccugaacgaggucgccaagaaccucaacgagucccugaucgaccugcaggagcucgggaaguacgagcaguacaucaaguggccgugguacaucuggcugggcuucaucgccggccugaucgcgaucgugauggugaccaucaugcucugcugcaugaccagcugcugcuccugccugaaggggugcugcagcugcggcuccugcugcaaguucgacgaggacgacagcgagcccguccugaagggggugaagcuccacuacacgugaggacuaguguccaccugucccuccugggcugcuggauugucucguuuuccugccaaauaaacaggaucagcgcuuuacagaucuaaaaaaaaaaaaaaaaaaaaaaaaaaaaaaaaaaaaaaaaaaaaaaaaaaaaaaaaaaaaaaaaaaaaaaaaaaaaaaaaaaaaaaaaaaaaaaaaaaaa

SEQ ID NO: 25282 - RNA, 4105 nt, Artificial Sequence
  SARS-CoV-2/Wuhan/WIV05/2019__EPI_ISL_402128 spike protein mRNA gc (1-1273)(K986P_V987P_N501Y_D614G)
aggagacccgugacccggaaguuguacggcuacgcgacuuucccucccacaaacccucgcgcccuuccuuuccuacuugggcccggcagaaagcuuaccauguucguguuccugguccuccugccccuggugagcucccagugcgugaaccucaccacccgcacgcagcugccgcccgccuacaccaacagcuucacccggggcgucuacuaccccgacaagguguuccgcuccagcgugcugcacuccacccaggaccucuuccugcccuucuucagcaacgucacgugguuccacgccauccacguguccgggaccaacggcaccaagcgguucgacaacccggugcugcccuucaacgacggggucuacuucgcgagcaccgagaaguccaacaucauccgcggcuggaucuucgggacgacccucgacagcaagacccagucccugcugaucgugaacaacgccaccaacguggucaucaaggugugcgaguuccaguucugcaacgaccccuuccucggcguguacuaccacaagaacaacaagagcuggauggaguccgaguuccgggucuacagcuccgccaacaacugcacguucgaguacgugagccagcccuuccugauggaccuggagggcaagcaggggaacuucaagaaccuccgcgaguucguguucaagaacaucgacggcuacuucaagaucuacuccaagcacaccccgaucaaccugguccgggaccugccccagggguucagcgcccucgagccccugguggaccugcccaucggcaucaacaucacccgcuuccagacccuccuggcccugcaccgguccuaccucacgccgggggacagcagcuccggcuggaccgcgggcgccgccgccuacuacgugggguaccugcagccccgcaccuuccugcucaaguacaacgagaacggcaccaucacggacgcggucgacugcgcccuggacccccugagcgagaccaagugcacccucaaguccuucaccguggagaaggggaucuaccagacgagcaacuuccgggugcagcccaccgaguccaucguccgcuucccgaacaucaccaaccugugccccuucggcgagguguucaacgccacccgguucgccagcgucuacgccuggaaccgcaagcggaucuccaacugcguggcggacuacagcgugcuguacaacuccgccagcuucuccacguucaagugcuacggcgucagccccaccaagcucaacgaccugugcuucaccaacguguacgccgacuccuucgugauccgcggggacgagguccggcagaucgcccccggccagaccgggaagaucgccgacuacaacuacaagcugccggacgacuucacgggcugcgugaucgcguggaacagcaacaaccucgacuccaaggucgggggcaacuacaacuaccuguaccgccuguuccgcaagagcaaccucaagcccuucgagcgggacaucuccaccgagaucuaccaggccggcagcacccccugcaacgggguggagggcuucaacugcuacuucccccugcaguccuacggguuccagccgaccuacggcgugggguaccagcccuaccggguggucgugcugagcuucgagcuccugcacgcccccgccacggugugcggccccaagaaguccaccaaccuggucaagaacaagugcgugaacuucaacuucaacggccucaccgggaccggcgugcugaccgagagcaacaagaaguuccugccguuccagcaguucgggcgcgacaucgccgacacgaccgacgcgguccgcgacccccagacccuggagauccucgacaucacccccugcagcuucggcgggguguccgugaucacgccgggcaccaacaccagcaaccaggucgccgugcuguaccagggcgugaacugcaccgagguccccguggccauccacgccgaccagcugacgcccaccuggcggguguacuccaccggcagcaacgucuuccagacccgcgccgggugccucaucggcgcggagcacgugaacaacuccuacgagugcgacauccccaucggggccggcaucugcgccagcuaccagacgcagaccaacuccccgcggcgcgcccggagcguggcgucccagagcaucaucgccuacaccaugucccugggcgccgagaacagcgucgccuacuccaacaacagcaucgccauccccaccaacuucacgaucuccgugaccaccgagauccugcccgugagcaugaccaagacgagcgucgacugcaccauguacaucugcggggacuccaccgagugcagcaaccuccugcugcaguacggcuccuucugcacccagcucaaccgcgcgcugacggggaucgccguggagcaggacaagaacacccaggagguguucgcccaggucaagcagaucuacaagacgcccccgaucaaggacuucggcggguucaacuucagccagauccugcccgaccccuccaagcccagcaagcgguccuucaucgaggaccuccuguucaacaaggugacccuggccgacgccggcuucaucaagcaguacggcgacugccucggggacaucgcggcccgcgaccugaucugcgcccagaaguucaacggccugaccgugcucccgccccugcugaccgacgagaugaucgcccaguacaccagcgcccuccuggcggggaccaucacguccggcuggaccuucggggccggcgccgcccugcagauccccuucgcgaugcagauggccuaccgguucaacggcaucggggucacccagaacgugcucuacgagaaccagaagcugaucgccaaccaguucaacagcgccaucggcaagauccaggacucccugagcuccaccgccagcgcgcucgggaagcugcaggacguggucaaccagaacgcccaggcccugaacacgcucgugaagcagcuguccagcaacuucggcgccaucuccagcgugcugaacgacauccucucccgccuggacccgcccgaggccgaggugcagaucgaccggcugaucaccgggcgccuccagagccugcagaccuacgugacccagcagcugauccgggcggccgagauccgcgccagcgccaaccucgccgcgaccaagauguccgagugcguccugggccagagcaagcggguggacuucugcggcaagggguaccaccugauguccuucccccagagcgccccgcacggcguggucuuccuccacgugacguacguccccgcccaggagaagaacuucaccaccgcccccgcgaucugccacgacgggaaggcccacuucccccgcgagggcguguucguguccaacgggacccacugguucgucacgcagcggaacuucuacgagccgcagaucaucaccaccgacaacaccuucgugagcggcaacugcgacguggucaucggcaucgugaacaacacgguguacgacccccugcagcccgagcuggacuccuucaaggaggagcucgacaaguacuucaagaaccacaccagccccgacgucgaccugggggacaucuccggcaucaacgccagcguggugaacauccagaaggagaucgaccgccugaacgaggucgccaagaaccucaacgagucccugaucgaccugcaggagcucgggaaguacgagcaguacaucaaguggccgugguacaucuggcugggcuucaucgccggccugaucgcgaucgugauggugaccaucaugcucugcugcaugaccagcugcugcuccugccugaaggggugcugcagcugcggcuccugcugcaaguucgacgaggacgacagcgagcccguccugaagggggugaagcuccacuacacgugaggacuaguguccaccugucccuccugggcugcuggauugucucguuuuccugccaaauaaacaggaucagcgcuuuacagaucuaaaaaaaaaaaaaaaaaaaaaaaaaaaaaaaaaaaaaaaaaaaaaaaaaaaaaaaaaaaaaaaaaaaaaaaaaaaaaaaaaaaaaaaaaaaaaaaaaaaa

SEQ ID NO: 25283 - RNA, 4099 nt, Artificial Sequence
  SARS-CoV-2/Wuhan/WIV05/2019__EPI_ISL_402128 spike protein mRNA gc (1-1273)(K986P_V987P_H69del_V70del_D614G)
aggagacccgugacccggaaguuguacggcuacgcgacuuucccucccacaaacccucgcgcccuuccuuuccuacuugggcccggcagaaagcuuaccauguucguguuccugguccuccugccccuggugagcucccagugcgugaaccucaccacccgcacgcagcugccgcccgccuacaccaacagcuucacccggggcgucuacuaccccgacaagguguuccgcuccagcgugcugcacuccacccaggaccucuuccugcccuucuucagcaacgucacgugguuccacgccaucuccgggaccaacggcaccaagcgguucgacaacccggugcugcccuucaacgacggggucuacuucgcgagcaccgagaaguccaacaucauccgcggcuggaucuucgggacgacccucgacagcaagacccagucccugcugaucgugaacaacgccaccaacguggucaucaaggugugcgaguuccaguucugcaacgaccccuuccucggcguguacuaccacaagaacaacaagagcuggauggaguccgaguuccgggucuacagcuccgccaacaacugcacguucgaguacgugagccagcccuuccugauggaccuggagggcaagcaggggaacuucaagaaccuccgcgaguucguguucaagaacaucgacggcuacuucaagaucuacuccaagcacaccccgaucaaccugguccgggaccugccccagggguucagcgcccucgagccccugguggaccugcccaucggcaucaacaucacccgcuuccagacccuccuggcccugcaccgguccuaccucacgccgggggacagcagcuccggcuggaccgcgggcgccgccgccuacuacgugggguaccugcagccccgcaccuuccugcucaaguacaacgagaacggcaccaucacggacgcggucgacugcgcccuggacccccugagcgagaccaagugcacccucaaguccuucaccguggagaaggggaucuaccagacgagcaacuuccgggugcagcccaccgaguccaucguccgcuucccgaacaucaccaaccugugccccuucggcgagguguucaacgccacccgguucgccagcgucuacgccuggaaccgcaagcggaucuccaacugcguggcggacuacagcgugcuguacaacuccgccagcuucuccacguucaagugcuacggcgucagccccaccaagcucaacgaccugugcuucaccaacguguacgccgacuccuucgugauccgcggggacgagguccggcagaucgcccccggccagaccgggaagaucgccgacuacaacuacaagcugccggacgacuucacgggcugcgugaucgcguggaacagcaacaaccucgacuccaaggucgggggcaacuacaacuaccuguaccgccuguuccgcaagagcaaccucaagcccuucgagcgggacaucuccaccgagaucuaccaggccggcagcacccccugcaacgggguggagggcuucaacugcuacuucccccugcaguccuacggguuccagccgaccaacggcgugggguaccagcccuaccggguggucgugcugagcuucgagcuccugcacgcccccgccacggugugcggccccaagaaguccaccaaccuggucaagaacaagugcgugaacuucaacuucaacggccucaccgggaccggcgugcugaccgagagcaacaagaaguuccugccguuccagcaguucgggcgcgacaucgccgacacgaccgacgcgguccgcgacccccagacccuggagauccucgacaucacccccugcagcuucggcgggguguccgugaucacgccgggcaccaacaccagcaaccaggucgccgugcuguaccagggcgugaacugcaccgagguccccguggccauccacgccgaccagcugacgcccaccuggcggguguacuccaccggcagcaacgucuuccagacccgcgccgggugccucaucggcgcggagcacgugaacaacuccuacgagugcgacauccccaucggggccggcaucugcgccagcuaccagacgcagaccaacuccccgcggcgcgcccggagcguggcgucccagagcaucaucgccuacaccaugucccugggcgccgagaacagcgucgccuacuccaacaacagcaucgccauccccaccaacuucacgaucuccgugaccaccgagauccugcccgugagcaugaccaagacgagcgucgacugcaccauguacaucugcggggacuccaccgagugcagcaaccuccugcugcaguacggcuccuucugcacccagcucaaccgcgcgcugacggggaucgccguggagcaggacaagaacacccaggagguguucgcccaggucaagcagaucuacaagacgcccccgaucaaggacuucggcggguucaacuucagccagauccugcccgaccccuccaagcccagcaagcgguccuucaucgaggaccuccuguucaacaaggugacccuggccgacgccggcuucaucaagcaguacggcgacugccucggggacaucgcggcccgcgaccugaucugcgcccagaaguucaacggccugaccgugcucccgccccugcugaccgacgagaugaucgcccaguacaccagcgcccuccuggcggggaccaucacguccggcuggaccuucggggccggcgccgcccugcagauccccuucgcgaugcagauggccuaccgguucaacggcaucggggucacccagaacgugcucuacgagaaccagaagcugaucgccaaccaguucaacagcgccaucggcaagauccaggacucccugagcuccaccgccagcgcgcucgggaagcugcaggacguggucaaccagaacgcccaggcccugaacacgcucgugaagcagcuguccagcaacuucggcgccaucuccagcgugcugaacgacauccucucccgccuggacccgcccgaggccgaggugcagaucgaccggcugaucaccgggcgccuccagagccugcagaccuacgugacccagcagcugauccgggcggccgagauccgcgccagcgccaaccucgccgcgaccaagauguccgagugcguccugggccagagcaagcggguggacuucugcggcaagggguaccaccugauguccuucccccagagcgccccgcacggcguggucuuccuccacgugacguacguccccgcccaggagaagaacuucaccaccgcccccgcgaucugccacgacgggaaggcccacuucccccgcgagggcguguucguguccaacgggacccacugguucgucacgcagcggaacuucuacgagccgcagaucaucaccaccgacaacaccuucgugagcggcaacugcgacguggucaucggcaucgugaacaacacgguguacgacccccugcagcccgagcuggacuccuucaaggaggagcucgacaaguacuucaagaaccacaccagccccgacgucgaccugggggacaucuccggcaucaacgccagcguggugaacauccagaaggagaucgaccgccugaacgaggucgccaagaaccucaacgagucccugaucgaccugcaggagcucgggaaguacgagcaguacaucaaguggccgugguacaucuggcugggcuucaucgccggccugaucgcgaucgugauggugaccaucaugcucugcugcaugaccagcugcugcuccugccugaaggggugcugcagcugcggcuccugcugcaaguucgacgaggacgacagcgagcccguccugaagggggugaagcuccacuacacgugaggacuaguguccaccugucccuccugggcugcuggauugucucguuuuccugccaaauaaacaggaucagcgcuuuacagaucuaaaaaaaaaaaaaaaaaaaaaaaaaaaaaaaaaaaaaaaaaaaaaaaaaaaaaaaaaaaaaaaaaaaaaaaaaaaaaaaaaaaaaaaaaaaaaaaaaaaa

SEQ ID NO: 25284 - RNA, 4105 nt, Artificial Sequence
  SARS-CoV-2/Wuhan/WIV05/2019__EPI_ISL_402128 spike protein mRNA gc (1-1273)(K986P_V987P_Y453F_D614G)
aggagacccgugacccggaaguuguacggcuacgcgacuuucccucccacaaacccucgcgcccuuccuuuccuacuugggcccggcagaaagcuuaccauguucguguuccugguccuccugccccuggugagcucccagugcgugaaccucaccacccgcacgcagcugccgcccgccuacaccaacagcuucacccggggcgucuacuaccccgacaagguguuccgcuccagcgugcugcacuccacccaggaccucuuccugcccuucuucagcaacgucacgugguuccacgccauccacguguccgggaccaacggcaccaagcgguucgacaacccggugcugcccuucaacgacggggucuacuucgcgagcaccgagaaguccaacaucauccgcggcuggaucuucgggacgacccucgacagcaagacccagucccugcugaucgugaacaacgccaccaacguggucaucaaggugugcgaguuccaguucugcaacgaccccuuccucggcguguacuaccacaagaacaacaagagcuggauggaguccgaguuccgggucuacagcuccgccaacaacugcacguucgaguacgugagccagcccuuccugauggaccuggagggcaagcaggggaacuucaagaaccuccgcgaguucguguucaagaacaucgacggcuacuucaagaucuacuccaagcacaccccgaucaaccugguccgggaccugccccagggguucagcgcccucgagccccugguggaccugcccaucggcaucaacaucacccgcuuccagacccuccuggcccugcaccgguccuaccucacgccgggggacagcagcuccggcuggaccgcgggcgccgccgccuacuacgugggguaccugcagccccgcaccuuccugcucaaguacaacgagaacggcaccaucacggacgcggucgacugcgcccuggacccccugagcgagaccaagugcacccucaaguccuucaccguggagaaggggaucuaccagacgagcaacuuccgggugcagcccaccgaguccaucguccgcuucccgaacaucaccaaccugugccccuucggcgagguguucaacgccacccgguucgccagcgucuacgccuggaaccgcaagcggaucuccaacugcguggcggacuacagcgugcuguacaacuccgccagcuucuccacguucaagugcuacggcgucagccccaccaagcucaacgaccugugcuucaccaacguguacgccgacuccuucgugauccgcggggacgagguccggcagaucgcccccggccagaccgggaagaucgccgacuacaacuacaagcugccggacgacuucacgggcugcgugaucgcguggaacagcaacaaccucgacuccaaggucgggggcaacuacaacuaccuguuccgccuguuccgcaagagcaaccucaagcccuucgagcgggacaucuccaccgagaucuaccaggccggcagcacccccugcaacgggguggagggcuucaacugcuacuucccccugcaguccuacggguuccagccgaccaacggcgugggguaccagcccuaccggguggucgugcugagcuucgagcuccugcacgcccccgccacggugugcggccccaagaaguccaccaaccuggucaagaacaagugcgugaacuucaacuucaacggccucaccgggaccggcgugcugaccgagagcaacaagaaguuccugccguuccagcaguucgggcgcgacaucgccgacacgaccgacgcgguccgcgacccccagacccuggagauccucgacaucacccccugcagcuucggcgggguguccgugaucacgccgggcaccaacaccagcaaccaggucgccgugcuguaccagggcgugaacugcaccgagguccccguggccauccacgccgaccagcugacgcccaccuggcggguguacuccaccggcagcaacgucuuccagacccgcgccgggugccucaucggcgcggagcacgugaacaacuccuacgagugcgacauccccaucggggccggcaucugcgccagcuaccagacgcagaccaacuccccgcggcgcgcccggagcguggcgucccagagcaucaucgccuacaccaugucccugggcgccgagaacagcgucgccuacuccaacaacagcaucgccauccccaccaacuucacgaucuccgugaccaccgagauccugcccgugagcaugaccaagacgagcgucgacugcaccauguacaucugcggggacuccaccgagugcagcaaccuccugcugcaguacggcuccuucugcacccagcucaaccgcgcgcugacggggaucgccguggagcaggacaagaacacccaggagguguucgcccaggucaagcagaucuacaagacgcccccgaucaaggacuucggcggguucaacuucagccagauccugcccgaccccuccaagcccagcaagcgguccuucaucgaggaccuccuguucaacaaggugacccuggccgacgccggcuucaucaagcaguacggcgacugccucggggacaucgcggcccgcgaccugaucugcgcccagaaguucaacggccugaccgugcucccgccccugcugaccgacgagaugaucgcccaguacaccagcgcccuccuggcggggaccaucacguccggcuggaccuucggggccggcgccgcccugcagauccccuucgcgaugcagauggccuaccgguucaacggcaucggggucacccagaacgugcucuacgagaaccagaagcugaucgccaaccaguucaacagcgccaucggcaagauccaggacucccugagcuccaccgccagcgcgcucgggaagcugcaggacguggucaaccagaacgcccaggcccugaacacgcucgugaagcagcuguccagcaacuucggcgccaucuccagcgugcugaacgacauccucucccgccuggacccgcccgaggccgaggugcagaucgaccggcugaucaccgggcgccuccagagccugcagaccuacgugacccagcagcugauccgggcggccgagauccgcgccagcgccaaccucgccgcgaccaagauguccgagugcguccugggccagagcaagcggguggacuucugcggcaagggguaccaccugauguccuucccccagagcgccccgcacggcguggucuuccuccacgugacguacguccccgcccaggagaagaacuucaccaccgcccccgcgaucugccacgacgggaaggcccacuucccccgcgagggcguguucguguccaacgggacccacugguucgucacgcagcggaacuucuacgagccgcagaucaucaccaccgacaacaccuucgugagcggcaacugcgacguggucaucggcaucgugaacaacacgguguacgacccccugcagcccgagcuggacuccuucaaggaggagcucgacaaguacuucaagaaccacaccagccccgacgucgaccugggggacaucuccggcaucaacgccagcguggugaacauccagaaggagaucgaccgccugaacgaggucgccaagaaccucaacgagucccugaucgaccugcaggagcucgggaaguacgagcaguacaucaaguggccgugguacaucuggcugggcuucaucgccggccugaucgcgaucgugauggugaccaucaugcucugcugcaugaccagcugcugcuccugccugaaggggugcugcagcugcggcuccugcugcaaguucgacgaggacgacagcgagcccguccugaagggggugaagcuccacuacacgugaggacuaguguccaccugucccuccugggcugcuggauugucucguuuuccugccaaauaaacaggaucagcgcuuuacagaucuaaaaaaaaaaaaaaaaaaaaaaaaaaaaaaaaaaaaaaaaaaaaaaaaaaaaaaaaaaaaaaaaaaaaaaaaaaaaaaaaaaaaaaaaaaaaaaaaaaaa

SEQ ID NO: 25285 - RNA, 4105 nt, Artificial Sequence
  SARS-CoV-2/Wuhan/WIV05/2019__EPI_ISL_402128 spike protein mRNA gc (1-1273)(K986P_V987P_D614G_I692V)
aggagacccgugacccggaaguuguacggcuacgcgacuuucccucccacaaacccucgcgcccuuccuuuccuacuugggcccggcagaaagcuuaccauguucguguuccugguccuccugccccuggugagcucccagugcgugaaccucaccacccgcacgcagcugccgcccgccuacaccaacagcuucacccggggcgucuacuaccccgacaagguguuccgcuccagcgugcugcacuccacccaggaccucuuccugcccuucuucagcaacgucacgugguuccacgccauccacguguccgggaccaacggcaccaagcgguucgacaacccggugcugcccuucaacgacggggucuacuucgcgagcaccgagaaguccaacaucauccgcggcuggaucuucgggacgacccucgacagcaagacccagucccugcugaucgugaacaacgccaccaacguggucaucaaggugugcgaguuccaguucugcaacgaccccuuccucggcguguacuaccacaagaacaacaagagcuggauggaguccgaguuccgggucuacagcuccgccaacaacugcacguucgaguacgugagccagcccuuccugauggaccuggagggcaagcaggggaacuucaagaaccuccgcgaguucguguucaagaacaucgacggcuacuucaagaucuacuccaagcacaccccgaucaaccugguccgggaccugccccagggguucagcgcccucgagccccugguggaccugcccaucggcaucaacaucacccgcuuccagacccuccuggcccugcaccgguccuaccucacgccgggggacagcagcuccggcuggaccgcgggcgccgccgccuacuacgugggguaccugcagccccgcaccuuccugcucaaguacaacgagaacggcaccaucacggacgcggucgacugcgcccuggacccccugagcgagaccaagugcacccucaaguccuucaccguggagaaggggaucuaccagacgagcaacuuccgggugcagcccaccgaguccaucguccgcuucccgaacaucaccaaccugugccccuucggcgagguguucaacgccacccgguucgccagcgucuacgccuggaaccgcaagcggaucuccaacugcguggcggacuacagcgugcuguacaacuccgccagcuucuccacguucaagugcuacggcgucagccccaccaagcucaacgaccugugcuucaccaacguguacgccgacuccuucgugauccgcggggacgagguccggcagaucgcccccggccagaccgggaagaucgccgacuacaacuacaagcugccggacgacuucacgggcugcgugaucgcguggaacagcaacaaccucgacuccaaggucgggggcaacuacaacuaccuguaccgccuguuccgcaagagcaaccucaagcccuucgagcgggacaucuccaccgagaucuaccaggccggcagcacccccugcaacgggguggagggcuucaacugcuacuucccccugcaguccuacggguuccagccgaccaacggcgugggguaccagcccuaccggguggucgugcugagcuucgagcuccugcacgcccccgccacggugugcggccccaagaaguccaccaaccuggucaagaacaagugcgugaacuucaacuucaacggccucaccgggaccggcgugcugaccgagagcaacaagaaguuccugccguuccagcaguucgggcgcgacaucgccgacacgaccgacgcgguccgcgacccccagacccuggagauccucgacaucacccccugcagcuucggcgggguguccgugaucacgccgggcaccaacaccagcaaccaggucgccgugcuguaccagggcgugaacugcaccgagguccccguggccauccacgccgaccagcugacgcccaccuggcggguguacuccaccggcagcaacgucuuccagacccgcgccgggugccucaucggcgcggagcacgugaacaacuccuacgagugcgacauccccaucggggccggcaucugcgccagcuaccagacgcagaccaacuccccgcggcgcgcccggagcguggcgucccagagcgucaucgccuacaccaugucccugggcgccgagaacagcgucgccuacuccaacaacagcaucgccauccccaccaacuucacgaucuccgugaccaccgagauccugcccgugagcaugaccaagacgagcgucgacugcaccauguacaucugcggggacuccaccgagugcagcaaccuccugcugcaguacggcuccuucugcacccagcucaaccgcgcgcugacggggaucgccguggagcaggacaagaacacccaggagguguucgcccaggucaagcagaucuacaagacgcccccgaucaaggacuucggcggguucaacuucagccagauccugcccgaccccuccaagcccagcaagcgguccuucaucgaggaccuccuguucaacaaggugacccuggccgacgccggcuucaucaagcaguacggcgacugccucggggacaucgcggcccgcgaccugaucugcgcccagaaguucaacggccugaccgugcucccgccccugcugaccgacgagaugaucgcccaguacaccagcgcccuccuggcggggaccaucacguccggcuggaccuucggggccggcgccgcccugcagauccccuucgcgaugcagauggccuaccgguucaacggcaucggggucacccagaacgugcucuacgagaaccagaagcugaucgccaaccaguucaacagcgccaucggcaagauccaggacucccugagcuccaccgccagcgcgcucgggaagcugcaggacguggucaaccagaacgcccaggcccugaacacgcucgugaagcagcuguccagcaacuucggcgccaucuccagcgugcugaacgacauccucucccgccuggacccgcccgaggccgaggugcagaucgaccggcugaucaccgggcgccuccagagccugcagaccuacgugacccagcagcugauccgggcggccgagauccgcgccagcgccaaccucgccgcgaccaagauguccgagugcguccugggccagagcaagcggguggacuucugcggcaagggguaccaccugauguccuucccccagagcgccccgcacggcguggucuuccuccacgugacguacguccccgcccaggagaagaacuucaccaccgcccccgcgaucugccacgacgggaaggcccacuucccccgcgagggcguguucguguccaacgggacccacugguucgucacgcagcggaacuucuacgagccgcagaucaucaccaccgacaacaccuucgugagcggcaacugcgacguggucaucggcaucgugaacaacacgguguacgacccccugcagcccgagcuggacuccuucaaggaggagcucgacaaguacuucaagaaccacaccagccccgacgucgaccugggggacaucuccggcaucaacgccagcguggugaacauccagaaggagaucgaccgccugaacgaggucgccaagaaccucaacgagucccugaucgaccugcaggagcucgggaaguacgagcaguacaucaaguggccgugguacaucuggcugggcuucaucgccggccugaucgcgaucgugauggugaccaucaugcucugcugcaugaccagcugcugcuccugccugaaggggugcugcagcugcggcuccugcugcaaguucgacgaggacgacagcgagcccguccugaagggggugaagcuccacuacacgugaggacuaguguccaccugucccuccugggcugcuggauugucucguuuuccugccaaauaaacaggaucagcgcuuuacagaucuaaaaaaaaaaaaaaaaaaaaaaaaaaaaaaaaaaaaaaaaaaaaaaaaaaaaaaaaaaaaaaaaaaaaaaaaaaaaaaaaaaaaaaaaaaaaaaaaaaaa

SEQ ID NO: 25286 - RNA, 4105 nt, Artificial Sequence
  SARS-CoV-2/Wuhan/WIV05/2019__EPI_ISL_402128 spike protein mRNA gc (1-1273)(K986P_V987P_D614G_M1229I)
aggagacccgugacccggaaguuguacggcuacgcgacuuucccucccacaaacccucgcgcccuuccuuuccuacuugggcccggcagaaagcuuaccauguucguguuccugguccuccugccccuggugagcucccagugcgugaaccucaccacccgcacgcagcugccgcccgccuacaccaacagcuucacccggggcgucuacuaccccgacaagguguuccgcuccagcgugcugcacuccacccaggaccucuuccugcccuucuucagcaacgucacgugguuccacgccauccacguguccgggaccaacggcaccaagcgguucgacaacccggugcugcccuucaacgacggggucuacuucgcgagcaccgagaaguccaacaucauccgcggcuggaucuucgggacgacccucgacagcaagacccagucccugcugaucgugaacaacgccaccaacguggucaucaaggugugcgaguuccaguucugcaacgaccccuuccucggcguguacuaccacaagaacaacaagagcuggauggaguccgaguuccgggucuacagcuccgccaacaacugcacguucgaguacgugagccagcccuuccugauggaccuggagggcaagcaggggaacuucaagaaccuccgcgaguucguguucaagaacaucgacggcuacuucaagaucuacuccaagcacaccccgaucaaccugguccgggaccugccccagggguucagcgcccucgagccccugguggaccugcccaucggcaucaacaucacccgcuuccagacccuccuggcccugcaccgguccuaccucacgccgggggacagcagcuccggcuggaccgcgggcgccgccgccuacuacgugggguaccugcagccccgcaccuuccugcucaaguacaacgagaacggcaccaucacggacgcggucgacugcgcccuggacccccugagcgagaccaagugcacccucaaguccuucaccguggagaaggggaucuaccagacgagcaacuuccgggugcagcccaccgaguccaucguccgcuucccgaacaucaccaaccugugccccuucggcgagguguucaacgccacccgguucgccagcgucuacgccuggaaccgcaagcggaucuccaacugcguggcggacuacagcgugcuguacaacuccgccagcuucuccacguucaagugcuacggcgucagccccaccaagcucaacgaccugugcuucaccaacguguacgccgacuccuucgugauccgcggggacgagguccggcagaucgcccccggccagaccgggaagaucgccgacuacaacuacaagcugccggacgacuucacgggcugcgugaucgcguggaacagcaacaaccucgacuccaaggucgggggcaacuacaacuaccuguaccgccuguuccgcaagagcaaccucaagcccuucgagcgggacaucuccaccgagaucuaccaggccggcagcacccccugcaacgggguggagggcuucaacugcuacuucccccugcaguccuacggguuccagccgaccaacggcgugggguaccagcccuaccggguggucgugcugagcuucgagcuccugcacgcccccgccacggugugcggccccaagaaguccaccaaccuggucaagaacaagugcgugaacuucaacuucaacggccucaccgggaccggcgugcugaccgagagcaacaagaaguuccugccguuccagcaguucgggcgcgacaucgccgacacgaccgacgcgguccgcgacccccagacccuggagauccucgacaucacccccugcagcuucggcgggguguccgugaucacgccgggcaccaacaccagcaaccaggucgccgugcuguaccagggcgugaacugcaccgagguccccguggccauccacgccgaccagcugacgcccaccuggcggguguacuccaccggcagcaacgucuuccagacccgcgccgggugccucaucggcgcggagcacgugaacaacuccuacgagugcgacauccccaucggggccggcaucugcgccagcuaccagacgcagaccaacuccccgcggcgcgcccggagcguggcgucccagagcaucaucgccuacaccaugucccugggcgccgagaacagcgucgccuacuccaacaacagcaucgccauccccaccaacuucacgaucuccgugaccaccgagauccugcccgugagcaugaccaagacgagcgucgacugcaccauguacaucugcggggacuccaccgagugcagcaaccuccugcugcaguacggcuccuucugcacccagcucaaccgcgcgcugacggggaucgccguggagcaggacaagaacacccaggagguguucgcccaggucaagcagaucuacaagacgcccccgaucaaggacuucggcggguucaacuucagccagauccugcccgaccccuccaagcccagcaagcgguccuucaucgaggaccuccuguucaacaaggugacccuggccgacgccggcuucaucaagcaguacggcgacugccucggggacaucgcggcccgcgaccugaucugcgcccagaaguucaacggccugaccgugcucccgccccugcugaccgacgagaugaucgcccaguacaccagcgcccuccuggcggggaccaucacguccggcuggaccuucggggccggcgccgcccugcagauccccuucgcgaugcagauggccuaccgguucaacggcaucggggucacccagaacgugcucuacgagaaccagaagcugaucgccaaccaguucaacagcgccaucggcaagauccaggacucccugagcuccaccgccagcgcgcucgggaagcugcaggacguggucaaccagaacgcccaggcccugaacacgcucgugaagcagcuguccagcaacuucggcgccaucuccagcgugcugaacgacauccucucccgccuggacccgcccgaggccgaggugcagaucgaccggcugaucaccgggcgccuccagagccugcagaccuacgugacccagcagcugauccgggcggccgagauccgcgccagcgccaaccucgccgcgaccaagauguccgagugcguccugggccagagcaagcggguggacuucugcggcaagggguaccaccugauguccuucccccagagcgccccgcacggcguggucuuccuccacgugacguacguccccgcccaggagaagaacuucaccaccgcccccgcgaucugccacgacgggaaggcccacuucccccgcgagggcguguucguguccaacgggacccacugguucgucacgcagcggaacuucuacgagccgcagaucaucaccaccgacaacaccuucgugagcggcaacugcgacguggucaucggcaucgugaacaacacgguguacgacccccugcagcccgagcuggacuccuucaaggaggagcucgacaaguacuucaagaaccacaccagccccgacgucgaccugggggacaucuccggcaucaacgccagcguggugaacauccagaaggagaucgaccgccugaacgaggucgccaagaaccucaacgagucccugaucgaccugcaggagcucgggaaguacgagcaguacaucaaguggccgugguacaucuggcugggcuucaucgccggccugaucgcgaucgugaucgugaccaucaugcucugcugcaugaccagcugcugcuccugccugaaggggugcugcagcugcggcuccugcugcaaguucgacgaggacgacagcgagcccguccugaagggggugaagcuccacuacacgugaggacuaguguccaccugucccuccugggcugcuggauugucucguuuuccugccaaauaaacaggaucagcgcuuuacagaucuaaaaaaaaaaaaaaaaaaaaaaaaaaaaaaaaaaaaaaaaaaaaaaaaaaaaaaaaaaaaaaaaaaaaaaaaaaaaaaaaaaaaaaaaaaaaaaaaaaaa

SEQ ID NO: 25287 - RNA, 4099 nt, Artificial Sequence
  SARS-CoV-2/Wuhan/WIV05/2019__EPI_ISL_402128 spike protein mRNA gc (1-1273)(K986P_V987P_H69del_V70del_A222V_Y453F_S477N_D614G_I692V)
aggagacccgugacccggaaguuguacggcuacgcgacuuucccucccacaaacccucgcgcccuuccuuuccuacuugggcccggcagaaagcuuaccauguucguguuccugguccuccugccccuggugagcucccagugcgugaaccucaccacccgcacgcagcugccgcccgccuacaccaacagcuucacccggggcgucuacuaccccgacaagguguuccgcuccagcgugcugcacuccacccaggaccucuuccugcccuucuucagcaacgucacgugguuccacgccaucuccgggaccaacggcaccaagcgguucgacaacccggugcugcccuucaacgacggggucuacuucgcgagcaccgagaaguccaacaucauccgcggcuggaucuucgggacgacccucgacagcaagacccagucccugcugaucgugaacaacgccaccaacguggucaucaaggugugcgaguuccaguucugcaacgaccccuuccucggcguguacuaccacaagaacaacaagagcuggauggaguccgaguuccgggucuacagcuccgccaacaacugcacguucgaguacgugagccagcccuuccugauggaccuggagggcaagcaggggaacuucaagaaccuccgcgaguucguguucaagaacaucgacggcuacuucaagaucuacuccaagcacaccccgaucaaccugguccgggaccugccccagggguucagcguccucgagccccugguggaccugcccaucggcaucaacaucacccgcuuccagacccuccuggcccugcaccgguccuaccucacgccgggggacagcagcuccggcuggaccgcgggcgccgccgccuacuacgugggguaccugcagccccgcaccuuccugcucaaguacaacgagaacggcaccaucacggacgcggucgacugcgcccuggacccccugagcgagaccaagugcacccucaaguccuucaccguggagaaggggaucuaccagacgagcaacuuccgggugcagcccaccgaguccaucguccgcuucccgaacaucaccaaccugugccccuucggcgagguguucaacgccacccgguucgccagcgucuacgccuggaaccgcaagcggaucuccaacugcguggcggacuacagcgugcuguacaacuccgccagcuucuccacguucaagugcuacggcgucagccccaccaagcucaacgaccugugcuucaccaacguguacgccgacuccuucgugauccgcggggacgagguccggcagaucgcccccggccagaccgggaagaucgccgacuacaacuacaagcugccggacgacuucacgggcugcgugaucgcguggaacagcaacaaccucgacuccaaggucgggggcaacuacaacuaccuguuccgccuguuccgcaagagcaaccucaagcccuucgagcgggacaucuccaccgagaucuaccaggccggcaacacccccugcaacgggguggagggcuucaacugcuacuucccccugcaguccuacggguuccagccgaccaacggcgugggguaccagcccuaccggguggucgugcugagcuucgagcuccugcacgcccccgccacggugugcggccccaagaaguccaccaaccuggucaagaacaagugcgugaacuucaacuucaacggccucaccgggaccggcgugcugaccgagagcaacaagaaguuccugccguuccagcaguucgggcgcgacaucgccgacacgaccgacgcgguccgcgacccccagacccuggagauccucgacaucacccccugcagcuucggcgggguguccgugaucacgccgggcaccaacaccagcaaccaggucgccgugcuguaccagggcgugaacugcaccgagguccccguggccauccacgccgaccagcugacgcccaccuggcggguguacuccaccggcagcaacgucuuccagacccgcgccgggugccucaucggcgcggagcacgugaacaacuccuacgagugcgacauccccaucggggccggcaucugcgccagcuaccagacgcagaccaacuccccgcggcgcgcccggagcguggcgucccagagcgucaucgccuacaccaugucccugggcgccgagaacagcgucgccuacuccaacaacagcaucgccauccccaccaacuucacgaucuccgugaccaccgagauccugcccgugagcaugaccaagacgagcgucgacugcaccauguacaucugcggggacuccaccgagugcagcaaccuccugcugcaguacggcuccuucugcacccagcucaaccgcgcgcugacggggaucgccguggagcaggacaagaacacccaggagguguucgcccaggucaagcagaucuacaagacgcccccgaucaaggacuucggcggguucaacuucagccagauccugcccgaccccuccaagcccagcaagcgguccuucaucgaggaccuccuguucaacaaggugacccuggccgacgccggcuucaucaagcaguacggcgacugccucggggacaucgcggcccgcgaccugaucugcgcccagaaguucaacggccugaccgugcucccgccccugcugaccgacgagaugaucgcccaguacaccagcgcccuccuggcggggaccaucacguccggcuggaccuucggggccggcgccgcccugcagauccccuucgcgaugcagauggccuaccgguucaacggcaucggggucacccagaacgugcucuacgagaaccagaagcugaucgccaaccaguucaacagcgccaucggcaagauccaggacucccugagcuccaccgccagcgcgcucgggaagcugcaggacguggucaaccagaacgcccaggcccugaacacgcucgugaagcagcuguccagcaacuucggcgccaucuccagcgugcugaacgacauccucucccgccuggacccgcccgaggccgaggugcagaucgaccggcugaucaccgggcgccuccagagccugcagaccuacgugacccagcagcugauccgggcggccgagauccgcgccagcgccaaccucgccgcgaccaagauguccgagugcguccugggccagagcaagcggguggacuucugcggcaagggguaccaccugauguccuucccccagagcgccccgcacggcguggucuuccuccacgugacguacguccccgcccaggagaagaacuucaccaccgcccccgcgaucugccacgacgggaaggcccacuucccccgcgagggcguguucguguccaacgggacccacugguucgucacgcagcggaacuucuacgagccgcagaucaucaccaccgacaacaccuucgugagcggcaacugcgacguggucaucggcaucgugaacaacacgguguacgacccccugcagcccgagcuggacuccuucaaggaggagcucgacaaguacuucaagaaccacaccagccccgacgucgaccugggggacaucuccggcaucaacgccagcguggugaacauccagaaggagaucgaccgccugaacgaggucgccaagaaccucaacgagucccugaucgaccugcaggagcucgggaaguacgagcaguacaucaaguggccgugguacaucuggcugggcuucaucgccggccugaucgcgaucgugauggugaccaucaugcucugcugcaugaccagcugcugcuccugccugaaggggugcugcagcugcggcuccugcugcaaguucgacgaggacgacagcgagcccguccugaagggggugaagcuccacuacacgugaggacuaguguccaccugucccuccugggcugcuggauugucucguuuuccugccaaauaaacaggaucagcgcuuuacagaucuaaaaaaaaaaaaaaaaaaaaaaaaaaaaaaaaaaaaaaaaaaaaaaaaaaaaaaaaaaaaaaaaaaaaaaaaaaaaaaaaaaaaaaaaaaaaaaaaaaaa

SEQ ID NO: 25288 - RNA, 4099 nt, Artificial Sequence
  SARS-CoV-2/Wuhan/WIV05/2019__EPI_ISL_402128 spike protein mRNA gc (1-1273)(K986P_V987P_H69del_V70del_Y453F_D614G_I692V_M1229I)
aggagacccgugacccggaaguuguacggcuacgcgacuuucccucccacaaacccucgcgcccuuccuuuccuacuugggcccggcagaaagcuuaccauguucguguuccugguccuccugccccuggugagcucccagugcgugaaccucaccacccgcacgcagcugccgcccgccuacaccaacagcuucacccggggcgucuacuaccccgacaagguguuccgcuccagcgugcugcacuccacccaggaccucuuccugcccuucuucagcaacgucacgugguuccacgccaucuccgggaccaacggcaccaagcgguucgacaacccggugcugcccuucaacgacggggucuacuucgcgagcaccgagaaguccaacaucauccgcggcuggaucuucgggacgacccucgacagcaagacccagucccugcugaucgugaacaacgccaccaacguggucaucaaggugugcgaguuccaguucugcaacgaccccuuccucggcguguacuaccacaagaacaacaagagcuggauggaguccgaguuccgggucuacagcuccgccaacaacugcacguucgaguacgugagccagcccuuccugauggaccuggagggcaagcaggggaacuucaagaaccuccgcgaguucguguucaagaacaucgacggcuacuucaagaucuacuccaagcacaccccgaucaaccugguccgggaccugccccagggguucagcgcccucgagccccugguggaccugcccaucggcaucaacaucacccgcuuccagacccuccuggcccugcaccgguccuaccucacgccgggggacagcagcuccggcuggaccgcgggcgccgccgccuacuacgugggguaccugcagccccgcaccuuccugcucaaguacaacgagaacggcaccaucacggacgcggucgacugcgcccuggacccccugagcgagaccaagugcacccucaaguccuucaccguggagaaggggaucuaccagacgagcaacuuccgggugcagcccaccgaguccaucguccgcuucccgaacaucaccaaccugugccccuucggcgagguguucaacgccacccgguucgccagcgucuacgccuggaaccgcaagcggaucuccaacugcguggcggacuacagcgugcuguacaacuccgccagcuucuccacguucaagugcuacggcgucagccccaccaagcucaacgaccugugcuucaccaacguguacgccgacuccuucgugauccgcggggacgagguccggcagaucgcccccggccagaccgggaagaucgccgacuacaacuacaagcugccggacgacuucacgggcugcgugaucgcguggaacagcaacaaccucgacuccaaggucgggggcaacuacaacuaccuguuccgccuguuccgcaagagcaaccucaagcccuucgagcgggacaucuccaccgagaucuaccaggccggcagcacccccugcaacgggguggagggcuucaacugcuacuucccccugcaguccuacggguuccagccgaccaacggcgugggguaccagcccuaccggguggucgugcugagcuucgagcuccugcacgcccccgccacggugugcggccccaagaaguccaccaaccuggucaagaacaagugcgugaacuucaacuucaacggccucaccgggaccggcgugcugaccgagagcaacaagaaguuccugccguuccagcaguucgggcgcgacaucgccgacacgaccgacgcgguccgcgacccccagacccuggagauccucgacaucacccccugcagcuucggcgggguguccgugaucacgccgggcaccaacaccagcaaccaggucgccgugcuguaccagggcgugaacugcaccgagguccccguggccauccacgccgaccagcugacgcccaccuggcggguguacuccaccggcagcaacgucuuccagacccgcgccgggugccucaucggcgcggagcacgugaacaacuccuacgagugcgacauccccaucggggccggcaucugcgccagcuaccagacgcagaccaacuccccgcggcgcgcccggagcguggcgucccagagcgugaucgccuacaccaugucccugggcgccgagaacagcgucgccuacuccaacaacagcaucgccauccccaccaacuucacgaucuccgugaccaccgagauccugcccgugagcaugaccaagacgagcgucgacugcaccauguacaucugcggggacuccaccgagugcagcaaccuccugcugcaguacggcuccuucugcacccagcucaaccgcgcgcugacggggaucgccguggagcaggacaagaacacccaggagguguucgcccaggucaagcagaucuacaagacgcccccgaucaaggacuucggcggguucaacuucagccagauccugcccgaccccuccaagcccagcaagcgguccuucaucgaggaccuccuguucaacaaggugacccuggccgacgccggcuucaucaagcaguacggcgacugccucggggacaucgcggcccgcgaccugaucugcgcccagaaguucaacggccugaccgugcucccgccccugcugaccgacgagaugaucgcccaguacaccagcgcccuccuggcggggaccaucacguccggcuggaccuucggggccggcgccgcccugcagauccccuucgcgaugcagauggccuaccgguucaacggcaucggggucacccagaacgugcucuacgagaaccagaagcugaucgccaaccaguucaacagcgccaucggcaagauccaggacucccugagcuccaccgccagcgcgcucgggaagcugcaggacguggucaaccagaacgcccaggcccugaacacgcucgugaagcagcuguccagcaacuucggcgccaucuccagcgugcugaacgacauccucucccgccuggacccgcccgaggccgaggugcagaucgaccggcugaucaccgggcgccuccagagccugcagaccuacgugacccagcagcugauccgggcggccgagauccgcgccagcgccaaccucgccgcgaccaagauguccgagugcguccugggccagagcaagcggguggacuucugcggcaagggguaccaccugauguccuucccccagagcgccccgcacggcguggucuuccuccacgugacguacguccccgcccaggagaagaacuucaccaccgcccccgcgaucugccacgacgggaaggcccacuucccccgcgagggcguguucguguccaacgggacccacugguucgucacgcagcggaacuucuacgagccgcagaucaucaccaccgacaacaccuucgugagcggcaacugcgacguggucaucggcaucgugaacaacacgguguacgacccccugcagcccgagcuggacuccuucaaggaggagcucgacaaguacuucaagaaccacaccagccccgacgucgaccugggggacaucuccggcaucaacgccagcguggugaacauccagaaggagaucgaccgccugaacgaggucgccaagaaccucaacgagucccugaucgaccugcaggagcucgggaaguacgagcaguacaucaaguggccgugguacaucuggcugggcuucaucgccggccugaucgcgaucgugaucgugaccaucaugcucugcugcaugaccagcugcugcuccugccugaaggggugcugcagcugcggcuccugcugcaaguucgacgaggacgacagcgagcccguccugaagggggugaagcuccacuacacgugaggacuaguguccaccugucccuccugggcugcuggauugucucguuuuccugccaaauaaacaggaucagcgcuuuacagaucuaaaaaaaaaaaaaaaaaaaaaaaaaaaaaaaaaaaaaaaaaaaaaaaaaaaaaaaaaaaaaaaaaaaaaaaaaaaaaaaaaaaaaaaaaaaaaaaaaaaa

SEQ ID NO: 25289 - RNA, 4096 nt, Artificial Sequence
  SARS-CoV-2/Wuhan/WIV05/2019__EPI_ISL_402128 spike protein mRNA gc (1-1273)(K986P_V987P_K986P_V987P_H69del_V70del_Y144del_N501Y_A570 D_D614G_P681H_T716I_S982A_D1118H)
aggagacccgugacccggaaguuguacggcuacgcgacuuucccucccacaaacccucgcgcccuuccuuuccuacuugggcccggcagaaagcuuaccauguucguguuccugguccuccugccccuggugagcucccagugcgugaaccucaccacccgcacgcagcugccgcccgccuacaccaacagcuucacccggggcgucuacuaccccgacaagguguuccgcuccagcgugcugcacuccacccaggaccucuuccugcccuucuucagcaacgucacgugguuccacgccaucuccgggaccaacggcaccaagcgguucgacaacccggugcugcccuucaacgacggggucuacuucgcgagcaccgagaaguccaacaucauccgcggcuggaucuucgggacgacccucgacagcaagacccagucccugcugaucgugaacaacgccaccaacguggucaucaaggugugcgaguuccaguucugcaacgaccccuuccucggcguguaccacaagaacaacaagagcuggauggaguccgaguuccgggucuacagcuccgccaacaacugcacguucgaguacgugagccagcccuuccugauggaccuggagggcaagcaggggaacuucaagaaccuccgcgaguucguguucaagaacaucgacggcuacuucaagaucuacuccaagcacaccccgaucaaccugguccgggaccugccccagggguucagcgcccucgagccccugguggaccugcccaucggcaucaacaucacccgcuuccagacccuccuggcccugcaccgguccuaccucacgccgggggacagcagcuccggcuggaccgcgggcgccgccgccuacuacgugggguaccugcagccccgcaccuuccugcucaaguacaacgagaacggcaccaucacggacgcggucgacugcgcccuggacccccugagcgagaccaagugcacccucaaguccuucaccguggagaaggggaucuaccagacgagcaacuuccgggugcagcccaccgaguccaucguccgcuucccgaacaucaccaaccugugccccuucggcgagguguucaacgccacccgguucgccagcgucuacgccuggaaccgcaagcggaucuccaacugcguggcggacuacagcgugcuguacaacuccgccagcuucuccacguucaagugcuacggcgucagccccaccaagcucaacgaccugugcuucaccaacguguacgccgacuccuucgugauccgcggggacgagguccggcagaucgcccccggccagaccgggaagaucgccgacuacaacuacaagcugccggacgacuucacgggcugcgugaucgcguggaacagcaacaaccucgacuccaaggucgggggcaacuacaacuaccuguaccgccuguuccgcaagagcaaccucaagcccuucgagcgggacaucuccaccgagaucuaccaggccggcagcacccccugcaacgggguggagggcuucaacugcuacuucccccugcaguccuacggguuccagccgaccuacggcgugggguaccagcccuaccggguggucgugcugagcuucgagcuccugcacgcccccgccacggugugcggccccaagaaguccaccaaccuggucaagaacaagugcgugaacuucaacuucaacggccucaccgggaccggcgugcugaccgagagcaacaagaaguuccugccguuccagcaguucgggcgcgacaucgacgacacgaccgacgcgguccgcgacccccagacccuggagauccucgacaucacccccugcagcuucggcgggguguccgugaucacgccgggcaccaacaccagcaaccaggucgccgugcuguaccagggcgugaacugcaccgagguccccguggccauccacgccgaccagcugacgcccaccuggcggguguacuccaccggcagcaacgucuuccagacccgcgccgggugccucaucggcgcggagcacgugaacaacuccuacgagugcgacauccccaucggggccggcaucugcgccagcuaccagacgcagaccaacucccaccggcgcgcccggagcguggcgucccagagcaucaucgccuacaccaugucccugggcgccgagaacagcgucgccuacuccaacaacagcaucgccauccccaucaacuucacgaucuccgugaccaccgagauccugcccgugagcaugaccaagacgagcgucgacugcaccauguacaucugcggggacuccaccgagugcagcaaccuccugcugcaguacggcuccuucugcacccagcucaaccgcgcgcugacggggaucgccguggagcaggacaagaacacccaggagguguucgcccaggucaagcagaucuacaagacgcccccgaucaaggacuucggcggguucaacuucagccagauccugcccgaccccuccaagcccagcaagcgguccuucaucgaggaccuccuguucaacaaggugacccuggccgacgccggcuucaucaagcaguacggcgacugccucggggacaucgcggcccgcgaccugaucugcgcccagaaguucaacggccugaccgugcucccgccccugcugaccgacgagaugaucgcccaguacaccagcgcccuccuggcggggaccaucacguccggcuggaccuucggggccggcgccgcccugcagauccccuucgcgaugcagauggccuaccgguucaacggcaucggggucacccagaacgugcucuacgagaaccagaagcugaucgccaaccaguucaacagcgccaucggcaagauccaggacucccugagcuccaccgccagcgcgcucgggaagcugcaggacguggucaaccagaacgcccaggcccugaacacgcucgugaagcagcuguccagcaacuucggcgccaucuccagcgugcugaacgacauccucgcccgccuggacccgcccgaggccgaggugcagaucgaccggcugaucaccgggcgccuccagagccugcagaccuacgugacccagcagcugauccgggcggccgagauccgcgccagcgccaaccucgccgcgaccaagauguccgagugcguccugggccagagcaagcggguggacuucugcggcaagggguaccaccugauguccuucccccagagcgccccgcacggcguggucuuccuccacgugacguacguccccgcccaggagaagaacuucaccaccgcccccgcgaucugccacgacgggaaggcccacuucccccgcgagggcguguucguguccaacgggacccacugguucgucacgcagcggaacuucuacgagccgcagaucaucaccacccacaacaccuucgugagcggcaacugcgacguggucaucggcaucgugaacaacacgguguacgacccccugcagcccgagcuggacuccuucaaggaggagcucgacaaguacuucaagaaccacaccagccccgacgucgaccugggggacaucuccggcaucaacgccagcguggugaacauccagaaggagaucgaccgccugaacgaggucgccaagaaccucaacgagucccugaucgaccugcaggagcucgggaaguacgagcaguacaucaaguggccgugguacaucuggcugggcuucaucgccggccugaucgcgaucgugauggugaccaucaugcucugcugcaugaccagcugcugcuccugccugaaggggugcugcagcugcggcuccugcugcaaguucgacgaggacgacagcgagcccguccugaagggggugaagcuccacuacacgugaggacuaguguccaccugucccuccugggcugcuggauugucucguuuuccugccaaauaaacaggaucagcgcuuuacagaucuaaaaaaaaaaaaaaaaaaaaaaaaaaaaaaaaaaaaaaaaaaaaaaaaaaaaaaaaaaaaaaaaaaaaaaaaaaaaaaaaaaaaaaaaaaaaaaaaaaaa

SEQ ID NO: 25290 - RNA, 4105 nt, Artificial Sequence
  SARS-CoV-2/Wuhan/WIV05/2019__EPI_ISL_402128 spike protein mRNA gc (1-1273)(K986P_V987P_K986P_V987P_K417N_E484K_N501Y_D614G)
aggagacccgugacccggaaguuguacggcuacgcgacuuucccucccacaaacccucgcgcccuuccuuuccuacuugggcccggcagaaagcuuaccauguucguguuccugguccuccugccccuggugagcucccagugcgugaaccucaccacccgcacgcagcugccgcccgccuacaccaacagcuucacccggggcgucuacuaccccgacaagguguuccgcuccagcgugcugcacuccacccaggaccucuuccugcccuucuucagcaacgucacgugguuccacgccauccacguguccgggaccaacggcaccaagcgguucgacaacccggugcugcccuucaacgacggggucuacuucgcgagcaccgagaaguccaacaucauccgcggcuggaucuucgggacgacccucgacagcaagacccagucccugcugaucgugaacaacgccaccaacguggucaucaaggugugcgaguuccaguucugcaacgaccccuuccucggcguguacuaccacaagaacaacaagagcuggauggaguccgaguuccgggucuacagcuccgccaacaacugcacguucgaguacgugagccagcccuuccugauggaccuggagggcaagcaggggaacuucaagaaccuccgcgaguucguguucaagaacaucgacggcuacuucaagaucuacuccaagcacaccccgaucaaccugguccgggaccugccccagggguucagcgcccucgagccccugguggaccugcccaucggcaucaacaucacccgcuuccagacccuccuggcccugcaccgguccuaccucacgccgggggacagcagcuccggcuggaccgcgggcgccgccgccuacuacgugggguaccugcagccccgcaccuuccugcucaaguacaacgagaacggcaccaucacggacgcggucgacugcgcccuggacccccugagcgagaccaagugcacccucaaguccuucaccguggagaaggggaucuaccagacgagcaacuuccgggugcagcccaccgaguccaucguccgcuucccgaacaucaccaaccugugccccuucggcgagguguucaacgccacccgguucgccagcgucuacgccuggaaccgcaagcggaucuccaacugcguggcggacuacagcgugcuguacaacuccgccagcuucuccacguucaagugcuacggcgucagccccaccaagcucaacgaccugugcuucaccaacguguacgccgacuccuucgugauccgcggggacgagguccggcagaucgcccccggccagaccgggaacaucgccgacuacaacuacaagcugccggacgacuucacgggcugcgugaucgcguggaacagcaacaaccucgacuccaaggucgggggcaacuacaacuaccuguaccgccuguuccgcaagagcaaccucaagcccuucgagcgggacaucuccaccgagaucuaccaggccggcagcacccccugcaacggggugaagggcuucaacugcuacuucccccugcaguccuacggguuccagccgaccuacggcgugggguaccagcccuaccggguggucgugcugagcuucgagcuccugcacgcccccgccacggugugcggccccaagaaguccaccaaccuggucaagaacaagugcgugaacuucaacuucaacggccucaccgggaccggcgugcugaccgagagcaacaagaaguuccugccguuccagcaguucgggcgcgacaucgccgacacgaccgacgcgguccgcgacccccagacccuggagauccucgacaucacccccugcagcuucggcgggguguccgugaucacgccgggcaccaacaccagcaaccaggucgccgugcuguaccagggcgugaacugcaccgagguccccguggccauccacgccgaccagcugacgcccaccuggcggguguacuccaccggcagcaacgucuuccagacccgcgccgggugccucaucggcgcggagcacgugaacaacuccuacgagugcgacauccccaucggggccggcaucugcgccagcuaccagacgcagaccaacuccccgcggcgcgcccggagcguggcgucccagagcaucaucgccuacaccaugucccugggcgccgagaacagcgucgccuacuccaacaacagcaucgccauccccaccaacuucacgaucuccgugaccaccgagauccugcccgugagcaugaccaagacgagcgucgacugcaccauguacaucugcggggacuccaccgagugcagcaaccuccugcugcaguacggcuccuucugcacccagcucaaccgcgcgcugacggggaucgccguggagcaggacaagaacacccaggagguguucgcccaggucaagcagaucuacaagacgcccccgaucaaggacuucggcggguucaacuucagccagauccugcccgaccccuccaagcccagcaagcgguccuucaucgaggaccuccuguucaacaaggugacccuggccgacgccggcuucaucaagcaguacggcgacugccucggggacaucgcggcccgcgaccugaucugcgcccagaaguucaacggccugaccgugcucccgccccugcugaccgacgagaugaucgcccaguacaccagcgcccuccuggcggggaccaucacguccggcuggaccuucggggccggcgccgcccugcagauccccuucgcgaugcagauggccuaccgguucaacggcaucggggucacccagaacgugcucuacgagaaccagaagcugaucgccaaccaguucaacagcgccaucggcaagauccaggacucccugagcuccaccgccagcgcgcucgggaagcugcaggacguggucaaccagaacgcccaggcccugaacacgcucgugaagcagcuguccagcaacuucggcgccaucuccagcgugcugaacgacauccucucccgccuggacccgcccgaggccgaggugcagaucgaccggcugaucaccgggcgccuccagagccugcagaccuacgugacccagcagcugauccgggcggccgagauccgcgccagcgccaaccucgccgcgaccaagauguccgagugcguccugggccagagcaagcggguggacuucugcggcaagggguaccaccugauguccuucccccagagcgccccgcacggcguggucuuccuccacgugacguacguccccgcccaggagaagaacuucaccaccgcccccgcgaucugccacgacgggaaggcccacuucccccgcgagggcguguucguguccaacgggacccacugguucgucacgcagcggaacuucuacgagccgcagaucaucaccaccgacaacaccuucgugagcggcaacugcgacguggucaucggcaucgugaacaacacgguguacgacccccugcagcccgagcuggacuccuucaaggaggagcucgacaaguacuucaagaaccacaccagccccgacgucgaccugggggacaucuccggcaucaacgccagcguggugaacauccagaaggagaucgaccgccugaacgaggucgccaagaaccucaacgagucccugaucgaccugcaggagcucgggaaguacgagcaguacaucaaguggccgugguacaucuggcugggcuucaucgccggccugaucgcgaucgugauggugaccaucaugcucugcugcaugaccagcugcugcuccugccugaaggggugcugcagcugcggcuccugcugcaaguucgacgaggacgacagcgagcccguccugaagggggugaagcuccacuacacgugaggacuaguguccaccugucccuccugggcugcuggauugucucguuuuccugccaaauaaacaggaucagcgcuuuacagaucuaaaaaaaaaaaaaaaaaaaaaaaaaaaaaaaaaaaaaaaaaaaaaaaaaaaaaaaaaaaaaaaaaaaaaaaaaaaaaaaaaaaaaaaaaaaaaaaaaaaa

SEQ ID NO: 25291 - RNA, 4096 nt, Artificial Sequence
  SARS-CoV-2/Wuhan/WIV05/2019__EPI_ISL_402128 spike protein mRNA gc (1-1273)(K986P_V987P_K986P_V987P_L18F_D80A_D215G_L242del_A243del_ L244del_R246I_K417N_E484K_N501Y_D614G_A701V)
aggagacccgugacccggaaguuguacggcuacgcgacuuucccucccacaaacccucgcgcccuuccuuuccuacuugggcccggcagaaagcuuaccauguucguguuccugguccuccugccccuggugagcucccagugcgugaacuucaccacccgcacgcagcugccgcccgccuacaccaacagcuucacccggggcgucuacuaccccgacaagguguuccgcuccagcgugcugcacuccacccaggaccucuuccugcccuucuucagcaacgucacgugguuccacgccauccacguguccgggaccaacggcaccaagcgguucgccaacccggugcugcccuucaacgacggggucuacuucgcgagcaccgagaaguccaacaucauccgcggcuggaucuucgggacgacccucgacagcaagacccagucccugcugaucgugaacaacgccaccaacguggucaucaaggugugcgaguuccaguucugcaacgaccccuuccucggcguguacuaccacaagaacaacaagagcuggauggaguccgaguuccgggucuacagcuccgccaacaacugcacguucgaguacgugagccagcccuuccugauggaccuggagggcaagcaggggaacuucaagaaccuccgcgaguucguguucaagaacaucgacggcuacuucaagaucuacuccaagcacaccccgaucaaccugguccggggccugccccagggguucagcgcccucgagccccugguggaccugcccaucggcaucaacaucacccgcuuccagacccuccacaucuccuaccucacgccgggggacagcagcuccggcuggaccgcgggcgccgccgccuacuacgugggguaccugcagccccgcaccuuccugcucaaguacaacgagaacggcaccaucacggacgcggucgacugcgcccuggacccccugagcgagaccaagugcacccucaaguccuucaccguggagaaggggaucuaccagacgagcaacuuccgggugcagcccaccgaguccaucguccgcuucccgaacaucaccaaccugugccccuucggcgagguguucaacgccacccgguucgccagcgucuacgccuggaaccgcaagcggaucuccaacugcguggcggacuacagcgugcuguacaacuccgccagcuucuccacguucaagugcuacggcgucagccccaccaagcucaacgaccugugcuucaccaacguguacgccgacuccuucgugauccgcggggacgagguccggcagaucgcccccggccagaccgggaacaucgccgacuacaacuacaagcugccggacgacuucacgggcugcgugaucgcguggaacagcaacaaccucgacuccaaggucgggggcaacuacaacuaccuguaccgccuguuccgcaagagcaaccucaagcccuucgagcgggacaucuccaccgagaucuaccaggccggcagcacccccugcaacggggugaagggcuucaacugcuacuucccccugcaguccuacggguuccagccgaccuacggcgugggguaccagcccuaccggguggucgugcugagcuucgagcuccugcacgcccccgccacggugugcggccccaagaaguccaccaaccuggucaagaacaagugcgugaacuucaacuucaacggccucaccgggaccggcgugcugaccgagagcaacaagaaguuccugccguuccagcaguucgggcgcgacaucgccgacacgaccgacgcgguccgcgacccccagacccuggagauccucgacaucacccccugcagcuucggcgggguguccgugaucacgccgggcaccaacaccagcaaccaggucgccgugcuguaccagggcgugaacugcaccgagguccccguggccauccacgccgaccagcugacgcccaccuggcggguguacuccaccggcagcaacgucuuccagacccgcgccgggugccucaucggcgcggagcacgugaacaacuccuacgagugcgacauccccaucggggccggcaucugcgccagcuaccagacgcagaccaacuccccgcggcgcgcccggagcguggcgucccagagcaucaucgccuacaccaugucccugggcguggagaacagcgucgccuacuccaacaacagcaucgccauccccaccaacuucacgaucuccgugaccaccgagauccugcccgugagcaugaccaagacgagcgucgacugcaccauguacaucugcggggacuccaccgagugcagcaaccuccugcugcaguacggcuccuucugcacccagcucaaccgcgcgcugacggggaucgccguggagcaggacaagaacacccaggagguguucgcccaggucaagcagaucuacaagacgcccccgaucaaggacuucggcggguucaacuucagccagauccugcccgaccccuccaagcccagcaagcgguccuucaucgaggaccuccuguucaacaaggugacccuggccgacgccggcuucaucaagcaguacggcgacugccucggggacaucgcggcccgcgaccugaucugcgcccagaaguucaacggccugaccgugcucccgccccugcugaccgacgagaugaucgcccaguacaccagcgcccuccuggcggggaccaucacguccggcuggaccuucggggccggcgccgcccugcagauccccuucgcgaugcagauggccuaccgguucaacggcaucggggucacccagaacgugcucuacgagaaccagaagcugaucgccaaccaguucaacagcgccaucggcaagauccaggacucccugagcuccaccgccagcgcgcucgggaagcugcaggacguggucaaccagaacgcccaggcccugaacacgcucgugaagcagcuguccagcaacuucggcgccaucuccagcgugcugaacgacauccucucccgccuggacccgcccgaggccgaggugcagaucgaccggcugaucaccgggcgccuccagagccugcagaccuacgugacccagcagcugauccgggcggccgagauccgcgccagcgccaaccucgccgcgaccaagauguccgagugcguccugggccagagcaagcggguggacuucugcggcaagggguaccaccugauguccuucccccagagcgccccgcacggcguggucuuccuccacgugacguacguccccgcccaggagaagaacuucaccaccgcccccgcgaucugccacgacgggaaggcccacuucccccgcgagggcguguucguguccaacgggacccacugguucgucacgcagcggaacuucuacgagccgcagaucaucaccaccgacaacaccuucgugagcggcaacugcgacguggucaucggcaucgugaacaacacgguguacgacccccugcagcccgagcuggacuccuucaaggaggagcucgacaaguacuucaagaaccacaccagccccgacgucgaccugggggacaucuccggcaucaacgccagcguggugaacauccagaaggagaucgaccgccugaacgaggucgccaagaaccucaacgagucccugaucgaccugcaggagcucgggaaguacgagcaguacaucaaguggccgugguacaucuggcugggcuucaucgccggccugaucgcgaucgugauggugaccaucaugcucugcugcaugaccagcugcugcuccugccugaaggggugcugcagcugcggcuccugcugcaaguucgacgaggacgacagcgagcccguccugaagggggugaagcuccacuacacgugaggacuaguguccaccugucccuccugggcugcuggauugucucguuuuccugccaaauaaacaggaucagcgcuuuacagaucuaaaaaaaaaaaaaaaaaaaaaaaaaaaaaaaaaaaaaaaaaaaaaaaaaaaaaaaaaaaaaaaaaaaaaaaaaaaaaaaaaaaaaaaaaaaaaaaaaaaa

SEQ ID NO: 25292 - RNA, 4105 nt, Artificial Sequence
  SARS-CoV-2/Wuhan/WIV05/2019__EPI_ISL_402128 spike protein mRNA gc (1-1273)(K986P_V987P_K986P_V987P_E484K_D614G)
aggagacccgugacccggaaguuguacggcuacgcgacuuucccucccacaaacccucgcgcccuuccuuuccuacuugggcccggcagaaagcuuaccauguucguguuccugguccuccugccccuggugagcucccagugcgugaaccucaccacccgcacgcagcugccgcccgccuacaccaacagcuucacccggggcgucuacuaccccgacaagguguuccgcuccagcgugcugcacuccacccaggaccucuuccugcccuucuucagcaacgucacgugguuccacgccauccacguguccgggaccaacggcaccaagcgguucgacaacccggugcugcccuucaacgacggggucuacuucgcgagcaccgagaaguccaacaucauccgcggcuggaucuucgggacgacccucgacagcaagacccagucccugcugaucgugaacaacgccaccaacguggucaucaaggugugcgaguuccaguucugcaacgaccccuuccucggcguguacuaccacaagaacaacaagagcuggauggaguccgaguuccgggucuacagcuccgccaacaacugcacguucgaguacgugagccagcccuuccugauggaccuggagggcaagcaggggaacuucaagaaccuccgcgaguucguguucaagaacaucgacggcuacuucaagaucuacuccaagcacaccccgaucaaccugguccgggaccugccccagggguucagcgcccucgagccccugguggaccugcccaucggcaucaacaucacccgcuuccagacccuccuggcccugcaccgguccuaccucacgccgggggacagcagcuccggcuggaccgcgggcgccgccgccuacuacgugggguaccugcagccccgcaccuuccugcucaaguacaacgagaacggcaccaucacggacgcggucgacugcgcccuggacccccugagcgagaccaagugcacccucaaguccuucaccguggagaaggggaucuaccagacgagcaacuuccgggugcagcccaccgaguccaucguccgcuucccgaacaucaccaaccugugccccuucggcgagguguucaacgccacccgguucgccagcgucuacgccuggaaccgcaagcggaucuccaacugcguggcggacuacagcgugcuguacaacuccgccagcuucuccacguucaagugcuacggcgucagccccaccaagcucaacgaccugugcuucaccaacguguacgccgacuccuucgugauccgcggggacgagguccggcagaucgcccccggccagaccgggaagaucgccgacuacaacuacaagcugccggacgacuucacgggcugcgugaucgcguggaacagcaacaaccucgacuccaaggucgggggcaacuacaacuaccuguaccgccuguuccgcaagagcaaccucaagcccuucgagcgggacaucuccaccgagaucuaccaggccggcagcacccccugcaacggggugaagggcuucaacugcuacuucccccugcaguccuacggguuccagccgaccaacggcgugggguaccagcccuaccggguggucgugcugagcuucgagcuccugcacgcccccgccacggugugcggccccaagaaguccaccaaccuggucaagaacaagugcgugaacuucaacuucaacggccucaccgggaccggcgugcugaccgagagcaacaagaaguuccugccguuccagcaguucgggcgcgacaucgccgacacgaccgacgcgguccgcgacccccagacccuggagauccucgacaucacccccugcagcuucggcgggguguccgugaucacgccgggcaccaacaccagcaaccaggucgccgugcuguaccagggcgugaacugcaccgagguccccguggccauccacgccgaccagcugacgcccaccuggcggguguacuccaccggcagcaacgucuuccagacccgcgccgggugccucaucggcgcggagcacgugaacaacuccuacgagugcgacauccccaucggggccggcaucugcgccagcuaccagacgcagaccaacuccccgcggcgcgcccggagcguggcgucccagagcaucaucgccuacaccaugucccugggcgccgagaacagcgucgccuacuccaacaacagcaucgccauccccaccaacuucacgaucuccgugaccaccgagauccugcccgugagcaugaccaagacgagcgucgacugcaccauguacaucugcggggacuccaccgagugcagcaaccuccugcugcaguacggcuccuucugcacccagcucaaccgcgcgcugacggggaucgccguggagcaggacaagaacacccaggagguguucgcccaggucaagcagaucuacaagacgcccccgaucaaggacuucggcggguucaacuucagccagauccugcccgaccccuccaagcccagcaagcgguccuucaucgaggaccuccuguucaacaaggugacccuggccgacgccggcuucaucaagcaguacggcgacugccucggggacaucgcggcccgcgaccugaucugcgcccagaaguucaacggccugaccgugcucccgccccugcugaccgacgagaugaucgcccaguacaccagcgcccuccuggcggggaccaucacguccggcuggaccuucggggccggcgccgcccugcagauccccuucgcgaugcagauggccuaccgguucaacggcaucggggucacccagaacgugcucuacgagaaccagaagcugaucgccaaccaguucaacagcgccaucggcaagauccaggacucccugagcuccaccgccagcgcgcucgggaagcugcaggacguggucaaccagaacgcccaggcccugaacacgcucgugaagcagcuguccagcaacuucggcgccaucuccagcgugcugaacgacauccucucccgccuggacccgcccgaggccgaggugcagaucgaccggcugaucaccgggcgccuccagagccugcagaccuacgugacccagcagcugauccgggcggccgagauccgcgccagcgccaaccucgccgcgaccaagauguccgagugcguccugggccagagcaagcggguggacuucugcggcaagggguaccaccugauguccuucccccagagcgccccgcacggcguggucuuccuccacgugacguacguccccgcccaggagaagaacuucaccaccgcccccgcgaucugccacgacgggaaggcccacuucccccgcgagggcguguucguguccaacgggacccacugguucgucacgcagcggaacuucuacgagccgcagaucaucaccaccgacaacaccuucgugagcggcaacugcgacguggucaucggcaucgugaacaacacgguguacgacccccugcagcccgagcuggacuccuucaaggaggagcucgacaaguacuucaagaaccacaccagccccgacgucgaccugggggacaucuccggcaucaacgccagcguggugaacauccagaaggagaucgaccgccugaacgaggucgccaagaaccucaacgagucccugaucgaccugcaggagcucgggaaguacgagcaguacaucaaguggccgugguacaucuggcugggcuucaucgccggccugaucgcgaucgugauggugaccaucaugcucugcugcaugaccagcugcugcuccugccugaaggggugcugcagcugcggcuccugcugcaaguucgacgaggacgacagcgagcccguccugaagggggugaagcuccacuacacgugaggacuaguguccaccugucccuccugggcugcuggauugucucguuuuccugccaaauaaacaggaucagcgcuuuacagaucuaaaaaaaaaaaaaaaaaaaaaaaaaaaaaaaaaaaaaaaaaaaaaaaaaaaaaaaaaaaaaaaaaaaaaaaaaaaaaaaaaaaaaaaaaaaaaaaaaaaa

SEQ ID NO: 25293 - RNA, 4105 nt, Artificial Sequence
  SARS-CoV-2/Wuhan/WIV05/2019__EPI_ISL_402128 spike protein mRNA gc (1-1273)(K986P_V987P_K986P_V987P_L18F_T20N_P26S_D138Y_R190S_K417T _E484K_N501Y_D614G_H655Y_T1027I)
aggagacccgugacccggaaguuguacggcuacgcgacuuucccucccacaaacccucgcgcccuuccuuuccuacuugggcccggcagaaagcuuaccauguucguguuccugguccuccugccccuggugagcucccagugcgugaacuucaccaaccgcacgcagcugccgagcgccuacaccaacagcuucacccggggcgucuacuaccccgacaagguguuccgcuccagcgugcugcacuccacccaggaccucuuccugcccuucuucagcaacgucacgugguuccacgccauccacguguccgggaccaacggcaccaagcgguucgacaacccggugcugcccuucaacgacggggucuacuucgcgagcaccgagaaguccaacaucauccgcggcuggaucuucgggacgacccucgacagcaagacccagucccugcugaucgugaacaacgccaccaacguggucaucaaggugugcgaguuccaguucugcaacuaccccuuccucggcguguacuaccacaagaacaacaagagcuggauggaguccgaguuccgggucuacagcuccgccaacaacugcacguucgaguacgugagccagcccuuccugauggaccuggagggcaagcaggggaacuucaagaaccucagcgaguucguguucaagaacaucgacggcuacuucaagaucuacuccaagcacaccccgaucaaccugguccgggaccugccccagggguucagcgcccucgagccccugguggaccugcccaucggcaucaacaucacccgcuuccagacccuccuggcccugcaccgguccuaccucacgccgggggacagcagcuccggcuggaccgcgggcgccgccgccuacuacgugggguaccugcagccccgcaccuuccugcucaaguacaacgagaacggcaccaucacggacgcggucgacugcgcccuggacccccugagcgagaccaagugcacccucaaguccuucaccguggagaaggggaucuaccagacgagcaacuuccgggugcagcccaccgaguccaucguccgcuucccgaacaucaccaaccugugccccuucggcgagguguucaacgccacccgguucgccagcgucuacgccuggaaccgcaagcggaucuccaacugcguggcggacuacagcgugcuguacaacuccgccagcuucuccacguucaagugcuacggcgucagccccaccaagcucaacgaccugugcuucaccaacguguacgccgacuccuucgugauccgcggggacgagguccggcagaucgcccccggccagaccgggaccaucgccgacuacaacuacaagcugccggacgacuucacgggcugcgugaucgcguggaacagcaacaaccucgacuccaaggucgggggcaacuacaacuaccuguaccgccuguuccgcaagagcaaccucaagcccuucgagcgggacaucuccaccgagaucuaccaggccggcagcacccccugcaacggggugaagggcuucaacugcuacuucccccugcaguccuacggguuccagccgaccuacggcgugggguaccagcccuaccggguggucgugcugagcuucgagcuccugcacgcccccgccacggugugcggccccaagaaguccaccaaccuggucaagaacaagugcgugaacuucaacuucaacggccucaccgggaccggcgugcugaccgagagcaacaagaaguuccugccguuccagcaguucgggcgcgacaucgccgacacgaccgacgcgguccgcgacccccagacccuggagauccucgacaucacccccugcagcuucggcgggguguccgugaucacgccgggcaccaacaccagcaaccaggucgccgugcuguaccagggcgugaacugcaccgagguccccguggccauccacgccgaccagcugacgcccaccuggcggguguacuccaccggcagcaacgucuuccagacccgcgccgggugccucaucggcgcggaguacgugaacaacuccuacgagugcgacauccccaucggggccggcaucugcgccagcuaccagacgcagaccaacuccccgcggcgcgcccggagcguggcgucccagagcaucaucgccuacaccaugucccugggcgccgagaacagcgucgccuacuccaacaacagcaucgccauccccaccaacuucacgaucuccgugaccaccgagauccugcccgugagcaugaccaagacgagcgucgacugcaccauguacaucugcggggacuccaccgagugcagcaaccuccugcugcaguacggcuccuucugcacccagcucaaccgcgcgcugacggggaucgccguggagcaggacaagaacacccaggagguguucgcccaggucaagcagaucuacaagacgcccccgaucaaggacuucggcggguucaacuucagccagauccugcccgaccccuccaagcccagcaagcgguccuucaucgaggaccuccuguucaacaaggugacccuggccgacgccggcuucaucaagcaguacggcgacugccucggggacaucgcggcccgcgaccugaucugcgcccagaaguucaacggccugaccgugcucccgccccugcugaccgacgagaugaucgcccaguacaccagcgcccuccuggcggggaccaucacguccggcuggaccuucggggccggcgccgcccugcagauccccuucgcgaugcagauggccuaccgguucaacggcaucggggucacccagaacgugcucuacgagaaccagaagcugaucgccaaccaguucaacagcgccaucggcaagauccaggacucccugagcuccaccgccagcgcgcucgggaagcugcaggacguggucaaccagaacgcccaggcccugaacacgcucgugaagcagcuguccagcaacuucggcgccaucuccagcgugcugaacgacauccucucccgccuggacccgcccgaggccgaggugcagaucgaccggcugaucaccgggcgccuccagagccugcagaccuacgugacccagcagcugauccgggcggccgagauccgcgccagcgccaaccucgccgcgaucaagauguccgagugcguccugggccagagcaagcggguggacuucugcggcaagggguaccaccugauguccuucccccagagcgccccgcacggcguggucuuccuccacgugacguacguccccgcccaggagaagaacuucaccaccgcccccgcgaucugccacgacgggaaggcccacuucccccgcgagggcguguucguguccaacgggacccacugguucgucacgcagcggaacuucuacgagccgcagaucaucaccaccgacaacaccuucgugagcggcaacugcgacguggucaucggcaucgugaacaacacgguguacgacccccugcagcccgagcuggacuccuucaaggaggagcucgacaaguacuucaagaaccacaccagccccgacgucgaccugggggacaucuccggcaucaacgccagcguggugaacauccagaaggagaucgaccgccugaacgaggucgccaagaaccucaacgagucccugaucgaccugcaggagcucgggaaguacgagcaguacaucaaguggccgugguacaucuggcugggcuucaucgccggccugaucgcgaucgugauggugaccaucaugcucugcugcaugaccagcugcugcuccugccugaaggggugcugcagcugcggcuccugcugcaaguucgacgaggacgacagcgagcccguccugaagggggugaagcuccacuacacgugaggacuaguguccaccugucccuccugggcugcuggauugucucguuuuccugccaaauaaacaggaucagcgcuuuacagaucuaaaaaaaaaaaaaaaaaaaaaaaaaaaaaaaaaaaaaaaaaaaaaaaaaaaaaaaaaaaaaaaaaaaaaaaaaaaaaaaaaaaaaaaaaaaaaaaaaaaa

SEQ ID NO: 25294 - RNA, 4105 nt, Artificial Sequence
  SARS-CoV-2/Wuhan/WIV05/2019__EPI_ISL_402128 spike protein mRNA gc (1-1273)(K986P_V987P_K986P_V987P_S13I_W152C_L452R_D614G)
aggagacccgugacccggaaguuguacggcuacgcgacuuucccucccacaaacccucgcgcccuuccuuuccuacuugggcccggcagaaagcuuaccauguucguguuccugguccuccugccccuggugagcauccagugcgugaaccucaccacccgcacgcagcugccgcccgccuacaccaacagcuucacccggggcgucuacuaccccgacaagguguuccgcuccagcgugcugcacuccacccaggaccucuuccugcccuucuucagcaacgucacgugguuccacgccauccacguguccgggaccaacggcaccaagcgguucgacaacccggugcugcccuucaacgacggggucuacuucgcgagcaccgagaaguccaacaucauccgcggcuggaucuucgggacgacccucgacagcaagacccagucccugcugaucgugaacaacgccaccaacguggucaucaaggugugcgaguuccaguucugcaacgaccccuuccucggcguguacuaccacaagaacaacaagagcugcauggaguccgaguuccgggucuacagcuccgccaacaacugcacguucgaguacgugagccagcccuuccugauggaccuggagggcaagcaggggaacuucaagaaccuccgcgaguucguguucaagaacaucgacggcuacuucaagaucuacuccaagcacaccccgaucaaccugguccgggaccugccccagggguucagcgcccucgagccccugguggaccugcccaucggcaucaacaucacccgcuuccagacccuccuggcccugcaccgguccuaccucacgccgggggacagcagcuccggcuggaccgcgggcgccgccgccuacuacgugggguaccugcagccccgcaccuuccugcucaaguacaacgagaacggcaccaucacggacgcggucgacugcgcccuggacccccugagcgagaccaagugcacccucaaguccuucaccguggagaaggggaucuaccagacgagcaacuuccgggugcagcccaccgaguccaucguccgcuucccgaacaucaccaaccugugccccuucggcgagguguucaacgccacccgguucgccagcgucuacgccuggaaccgcaagcggaucuccaacugcguggcggacuacagcgugcuguacaacuccgccagcuucuccacguucaagugcuacggcgucagccccaccaagcucaacgaccugugcuucaccaacguguacgccgacuccuucgugauccgcggggacgagguccggcagaucgcccccggccagaccgggaagaucgccgacuacaacuacaagcugccggacgacuucacgggcugcgugaucgcguggaacagcaacaaccucgacuccaaggucgggggcaacuacaacuaccgcuaccgccuguuccgcaagagcaaccucaagcccuucgagcgggacaucuccaccgagaucuaccaggccggcagcacccccugcaacgggguggagggcuucaacugcuacuucccccugcaguccuacggguuccagccgaccaacggcgugggguaccagcccuaccggguggucgugcugagcuucgagcuccugcacgcccccgccacggugugcggccccaagaaguccaccaaccuggucaagaacaagugcgugaacuucaacuucaacggccucaccgggaccggcgugcugaccgagagcaacaagaaguuccugccguuccagcaguucgggcgcgacaucgccgacacgaccgacgcgguccgcgacccccagacccuggagauccucgacaucacccccugcagcuucggcgggguguccgugaucacgccgggcaccaacaccagcaaccaggucgccgugcuguaccagggcgugaacugcaccgagguccccguggccauccacgccgaccagcugacgcccaccuggcggguguacuccaccggcagcaacgucuuccagacccgcgccgggugccucaucggcgcggagcacgugaacaacuccuacgagugcgacauccccaucggggccggcaucugcgccagcuaccagacgcagaccaacuccccgcggcgcgcccggagcguggcgucccagagcaucaucgccuacaccaugucccugggcgccgagaacagcgucgccuacuccaacaacagcaucgccauccccaccaacuucacgaucuccgugaccaccgagauccugcccgugagcaugaccaagacgagcgucgacugcaccauguacaucugcggggacuccaccgagugcagcaaccuccugcugcaguacggcuccuucugcacccagcucaaccgcgcgcugacggggaucgccguggagcaggacaagaacacccaggagguguucgcccaggucaagcagaucuacaagacgcccccgaucaaggacuucggcggguucaacuucagccagauccugcccgaccccuccaagcccagcaagcgguccuucaucgaggaccuccuguucaacaaggugacccuggccgacgccggcuucaucaagcaguacggcgacugccucggggacaucgcggcccgcgaccugaucugcgcccagaaguucaacggccugaccgugcucccgccccugcugaccgacgagaugaucgcccaguacaccagcgcccuccuggcggggaccaucacguccggcuggaccuucggggccggcgccgcccugcagauccccuucgcgaugcagauggccuaccgguucaacggcaucggggucacccagaacgugcucuacgagaaccagaagcugaucgccaaccaguucaacagcgccaucggcaagauccaggacucccugagcuccaccgccagcgcgcucgggaagcugcaggacguggucaaccagaacgcccaggcccugaacacgcucgugaagcagcuguccagcaacuucggcgccaucuccagcgugcugaacgacauccucucccgccuggacccgcccgaggccgaggugcagaucgaccggcugaucaccgggcgccuccagagccugcagaccuacgugacccagcagcugauccgggcggccgagauccgcgccagcgccaaccucgccgcgaccaagauguccgagugcguccugggccagagcaagcggguggacuucugcggcaagggguaccaccugauguccuucccccagagcgccccgcacggcguggucuuccuccacgugacguacguccccgcccaggagaagaacuucaccaccgcccccgcgaucugccacgacgggaaggcccacuucccccgcgagggcguguucguguccaacgggacccacugguucgucacgcagcggaacuucuacgagccgcagaucaucaccaccgacaacaccuucgugagcggcaacugcgacguggucaucggcaucgugaacaacacgguguacgacccccugcagcccgagcuggacuccuucaaggaggagcucgacaaguacuucaagaaccacaccagccccgacgucgaccugggggacaucuccggcaucaacgccagcguggugaacauccagaaggagaucgaccgccugaacgaggucgccaagaaccucaacgagucccugaucgaccugcaggagcucgggaaguacgagcaguacaucaaguggccgugguacaucuggcugggcuucaucgccggccugaucgcgaucgugauggugaccaucaugcucugcugcaugaccagcugcugcuccugccugaaggggugcugcagcugcggcuccugcugcaaguucgacgaggacgacagcgagcccguccugaagggggugaagcuccacuacacgugaggacuaguguccaccugucccuccugggcugcuggauugucucguuuuccugccaaauaaacaggaucagcgcuuuacagaucuaaaaaaaaaaaaaaaaaaaaaaaaaaaaaaaaaaaaaaaaaaaaaaaaaaaaaaaaaaaaaaaaaaaaaaaaaaaaaaaaaaaaaaaaaaaaaaaaaaaa

SEQ ID NO: 25295 - RNA, 4105 nt, Artificial Sequence
  SARS-CoV-2/Wuhan/WIV05/2019__EPI_ISL_402128 spike protein mRNA gc (1-1273)(K986P_V987P)
aggagacccgugacccggaaguuguacggcuacgcgacuuucccucccacaaacccucgcgcccuuccuuuccuacuugggcccggcagaaagcuuaccauguucguguuccugguccuccugccccuggugagcucccagugcgugaaccucaccacccgcacgcagcugccgcccgccuacaccaacagcuucacccggggcgucuacuaccccgacaagguguuccgcuccagcgugcugcacuccacccaggaccucuuccugcccuucuucagcaacgucacgugguuccacgccauccacguguccgggaccaacggcaccaagcgguucgacaacccggugcugcccuucaacgacggggucuacuucgcgagcaccgagaaguccaacaucauccgcggcuggaucuucgggacgacccucgacagcaagacccagucccugcugaucgugaacaacgccaccaacguggucaucaaggugugcgaguuccaguucugcaacgaccccuuccucggcguguacuaccacaagaacaacaagagcuggauggaguccgaguuccgggucuacagcuccgccaacaacugcacguucgaguacgugagccagcccuuccugauggaccuggagggcaagcaggggaacuucaagaaccuccgcgaguucguguucaagaacaucgacggcuacuucaagaucuacuccaagcacaccccgaucaaccugguccgggaccugccccagggguucagcgcccucgagccccugguggaccugcccaucggcaucaacaucacccgcuuccagacccuccuggcccugcaccgguccuaccucacgccgggggacagcagcuccggcuggaccgcgggcgccgccgccuacuacgugggguaccugcagccccgcaccuuccugcucaaguacaacgagaacggcaccaucacggacgcggucgacugcgcccuggacccccugagcgagaccaagugcacccucaaguccuucaccguggagaaggggaucuaccagacgagcaacuuccgggugcagcccaccgaguccaucguccgcuucccgaacaucaccaaccugugccccuucggcgagguguucaacgccacccgguucgccagcgucuacgccuggaaccgcaagcggaucuccaacugcguggcggacuacagcgugcuguacaacuccgccagcuucuccacguucaagugcuacggcgucagccccaccaagcucaacgaccugugcuucaccaacguguacgccgacuccuucgugauccgcggggacgagguccggcagaucgcccccggccagaccgggaagaucgccgacuacaacuacaagcugccggacgacuucacgggcugcgugaucgcguggaacagcaacaaccucgacuccaaggucgggggcaacuacaacuaccuguaccgccuguuccgcaagagcaaccucaagcccuucgagcgggacaucuccaccgagaucuaccaggccggcagcacccccugcaacgggguggagggcuucaacugcuacuucccccugcaguccuacggguuccagccgaccaacggcgugggguaccagcccuaccggguggucgugcugagcuucgagcuccugcacgcccccgccacggugugcggccccaagaaguccaccaaccuggucaagaacaagugcgugaacuucaacuucaacggccucaccgggaccggcgugcugaccgagagcaacaagaaguuccugccguuccagcaguucgggcgcgacaucgccgacacgaccgacgcgguccgcgacccccagacccuggagauccucgacaucacccccugcagcuucggcgggguguccgugaucacgccgggcaccaacaccagcaaccaggucgccgugcuguaccaggacgugaacugcaccgagguccccguggccauccacgccgaccagcugacgcccaccuggcggguguacuccaccggcagcaacgucuuccagacccgcgccgggugccucaucggcgcggagcacgugaacaacuccuacgagugcgacauccccaucggggccggcaucugcgccagcuaccagacgcagaccaacuccccgcggcgcgcccggagcguggcgucccagagcaucaucgccuacaccaugucccugggcgccgagaacagcgucgccuacuccaacaacagcaucgccauccccaccaacuucacgaucuccgugaccaccgagauccugcccgugagcaugaccaagacgagcgucgacugcaccauguacaucugcggggacuccaccgagugcagcaaccuccugcugcaguacggcuccuucugcacccagcucaaccgcgcgcugacggggaucgccguggagcaggacaagaacacccaggagguguucgcccaggucaagcagaucuacaagacgcccccgaucaaggacuucggcggguucaacuucagccagauccugcccgaccccuccaagcccagcaagcgguccuucaucgaggaccuccuguucaacaaggugacccuggccgacgccggcuucaucaagcaguacggcgacugccucggggacaucgcggcccgcgaccugaucugcgcccagaaguucaacggccugaccgugcucccgccccugcugaccgacgagaugaucgcccaguacaccagcgcccuccuggcggggaccaucacguccggcuggaccuucggggccggcgccgcccugcagauccccuucgcgaugcagauggccuaccgguucaacggcaucggggucacccagaacgugcucuacgagaaccagaagcugaucgccaaccaguucaacagcgccaucggcaagauccaggacucccugagcuccaccgccagcgcgcucgggaagcugcaggacguggucaaccagaacgcccaggcccugaacacgcucgugaagcagcuguccagcaacuucggcgccaucuccagcgugcugaacgacauccucucccgccuggacccgcccgaggccgagguccagaucgaccggcugaucaccgggcgccuccagagccugcagaccuacgugacccagcagcugauccgggcggccgagauccgcgccagcgccaaccucgccgcgaccaagauguccgagugcgugcugggccagagcaagcgggucgacuucugcggcaagggguaccaccugauguccuucccccagagcgcgccccacggcgugguguuccuccacgucacguacgugcccgcccaggagaagaacuucaccaccgccccggccaucugccacgacgggaaggcccacuucccccgcgagggcgucuucguguccaacgggacccacugguucgugacgcagcggaacuucuacgagccccagaucaucaccaccgacaacaccuucgucagcggcaacugcgacguggugaucggcaucgucaacaacacgguguacgacccccugcagccggagcuggacuccuucaaggaggagcucgacaaguacuucaagaaccacaccagccccgacguggaccugggggacaucuccggcaucaacgccagcgucgugaacauccagaaggagaucgaccgccugaacgagguggccaagaaccucaacgagucccugaucgaccugcaggagcucgggaaguacgagcaguacaucaaguggcccugguacaucuggcugggcuucaucgccggccugaucgcgaucgucauggugaccaucaugcucugcugcaugaccagcugcugcuccugccugaaggggugcugcagcugcggcuccugcugcaaguucgacgaggacgacagcgagccggugcugaagggggucaagcuccacuacacgugaggacuaguguccaccugucccuccugggcugcuggauugucucguuuuccugccaaauaaacaggaucagcgcuuuacagaucuaaaaaaaaaaaaaaaaaaaaaaaaaaaaaaaaaaaaaaaaaaaaaaaaaaaaaaaaaaaaaaaaaaaaaaaaaaaaaaaaaaaaaaaaaaaaaaaaaaaa

SEQ ID NO: 25296 - RNA, 4105 nt, Artificial Sequence
  SARS-CoV-2/Wuhan/WIV05/2019__EPI_ISL_402128 spike protein mRNA gc (1-1273)(K986P_V987P_ D614G)
aggagacccgugacccggaaguuguacggcuacgcgacuuucccucccacaaacccucgcgcccuuccuuuccuacuugggcccggcagaaagcuuaccauguucguguuccugguccuccugccccuggugagcucccagugcgugaaccucaccacccgcacgcagcugccgcccgccuacaccaacagcuucacccggggcgucuacuaccccgacaagguguuccgcuccagcgugcugcacuccacccaggaccucuuccugcccuucuucagcaacgucacgugguuccacgccauccacguguccgggaccaacggcaccaagcgguucgacaacccggugcugcccuucaacgacggggucuacuucgcgagcaccgagaaguccaacaucauccgcggcuggaucuucgggacgacccucgacagcaagacccagucccugcugaucgugaacaacgccaccaacguggucaucaaggugugcgaguuccaguucugcaacgaccccuuccucggcguguacuaccacaagaacaacaagagcuggauggaguccgaguuccgggucuacagcuccgccaacaacugcacguucgaguacgugagccagcccuuccugauggaccuggagggcaagcaggggaacuucaagaaccuccgcgaguucguguucaagaacaucgacggcuacuucaagaucuacuccaagcacaccccgaucaaccugguccgggaccugccccagggguucagcgcccucgagccccugguggaccugcccaucggcaucaacaucacccgcuuccagacccuccuggcccugcaccgguccuaccucacgccgggggacagcagcuccggcuggaccgcgggcgccgccgccuacuacgugggguaccugcagccccgcaccuuccugcucaaguacaacgagaacggcaccaucacggacgcggucgacugcgcccuggacccccugagcgagaccaagugcacccucaaguccuucaccguggagaaggggaucuaccagacgagcaacuuccgggugcagcccaccgaguccaucguccgcuucccgaacaucaccaaccugugccccuucggcgagguguucaacgccacccgguucgccagcgucuacgccuggaaccgcaagcggaucuccaacugcguggcggacuacagcgugcuguacaacuccgccagcuucuccacguucaagugcuacggcgucagccccaccaagcucaacgaccugugcuucaccaacguguacgccgacuccuucgugauccgcggggacgagguccggcagaucgcccccggccagaccgggaagaucgccgacuacaacuacaagcugccggacgacuucacgggcugcgugaucgcguggaacagcaacaaccucgacuccaaggucgggggcaacuacaacuaccuguaccgccuguuccgcaagagcaaccucaagcccuucgagcgggacaucuccaccgagaucuaccaggccggcagcacccccugcaacgggguggagggcuucaacugcuacuucccccugcaguccuacggguuccagccgaccaacggcgugggguaccagcccuaccggguggucgugcugagcuucgagcuccugcacgcccccgccacggugugcggccccaagaaguccaccaaccuggucaagaacaagugcgugaacuucaacuucaacggccucaccgggaccggcgugcugaccgagagcaacaagaaguuccugccguuccagcaguucgggcgcgacaucgccgacacgaccgacgcgguccgcgacccccagacccuggagauccucgacaucacccccugcagcuucggcgggguguccgugaucacgccgggcaccaacaccagcaaccaggucgccgugcuguaccagggcgugaacugcaccgagguccccguggccauccacgccgaccagcugacgcccaccuggcggguguacuccaccgggagcaacgucuuccagacccgcgccggcugccucaucggggcggagcacgugaacaacuccuacgagugcgacauccccaucggcgccggcaucugcgccagcuaccagacgcagaccaacuccccgcggcgcgcccggagcguggcgucccagagcaucaucgccuacaccaugucccugggggccgagaacagcgucgccuacuccaacaacagcaucgccauccccaccaacuucacgaucuccgugaccaccgagauccugcccgugagcaugaccaagacgagcgucgacugcaccauguacaucugcggcgacuccaccgagugcagcaaccuccugcugcaguacggguccuucugcacccagcucaaccgcgcgcugacgggcaucgccguggagcaggacaagaacacccaggagguguucgcccaggucaagcagaucuacaagacgcccccgaucaaggacuucgggggcuucaacuucagccagauccugcccgaccccuccaagcccagcaagcgguccuucaucgaggaccuccuguucaacaaggugacccuggccgacgccggcuucaucaagcaguacggggacugccucggcgacaucgcggcccgcgaccugaucugcgcccagaaguucaacgggcugaccgugcucccgccccugcugaccgacgagaugaucgcccaguacaccagcgcccuccuggcgggcaccaucacguccggguggaccuucggcgccggcgccgcccugcagauccccuucgcgaugcagauggccuaccgguucaacgggaucggcgucacccagaacgugcucuacgagaaccagaagcugaucgccaaccaguucaacagcgccaucgggaagauccaggacucccugagcuccaccgccagcgcgcucggcaagcugcaggacguggucaaccagaacgcccaggcccugaacacgcucgugaagcagcuguccagcaacuucggggccaucuccagcgugcugaacgacauccucucccgccuggacccgcccgaggccgagguccagaucgaccggcugaucaccggccgccuccagagccugcagaccuacgugacccagcagcugauccgggcggccgagauccgcgccagcgccaaccucgccgcgaccaagauguccgagugcgugcugggccagagcaagcgggucgacuucugcgggaagggcuaccaccugauguccuucccccagagcgcgccccacggggugguguuccuccacgucacguacgugcccgcccaggagaagaacuucaccaccgccccggccaucugccacgacggcaaggcccacuucccccgcgagggggucuucguguccaacggcacccacugguucgugacgcagcggaacuucuacgagccccagaucaucaccaccgacaacaccuucgucagcggcaacugcgacguggugaucgggaucgucaacaacacgguguacgacccccugcagccggagcuggacuccuucaaggaggagcucgacaaguacuucaagaaccacaccagccccgacguggaccugggcgacaucuccgggaucaacgccagcgucgugaacauccagaaggagaucgaccgccugaacgagguggccaagaaccucaacgagucccugaucgaccugcaggagcucggcaaguacgagcaguacaucaaguggcccugguacaucuggcugggcuucaucgccgggcugaucgcgaucgucauggugaccaucaugcucugcugcaugaccagcugcugcuccugccugaagggcugcugcagcugcggguccugcugcaaguucgacgaggacgacagcgagccggugcugaagggcgucaagcuccacuacacgugaggacuaguguccaccugucccuccugggcugcuggauugucucguuuuccugccaaauaaacaggaucagcgcuuuacagaucuaaaaaaaaaaaaaaaaaaaaaaaaaaaaaaaaaaaaaaaaaaaaaaaaaaaaaaaaaaaaaaaaaaaaaaaaaaaaaaaaaaaaaaaaaaaaaaaaaaaa

SEQ ID NO: 25297 - RNA, 4105 nt, Artificial Sequence
  SARS-CoV-2/Wuhan/WIV05/2019__EPI_ISL_402128 spike protein mRNA gc (1-1273)(K986P_V987P_A222V_D614G)
aggagacccgugacccggaaguuguacggcuacgcgacuuucccucccacaaacccucgcgcccuuccuuuccuacuugggcccggcagaaagcuuaccauguucguguuccugguccuccugccccuggugagcucccagugcgugaaccucaccacccgcacgcagcugccgcccgccuacaccaacagcuucacccggggcgucuacuaccccgacaagguguuccgcuccagcgugcugcacuccacccaggaccucuuccugcccuucuucagcaacgucacgugguuccacgccauccacguguccgggaccaacggcaccaagcgguucgacaacccggugcugcccuucaacgacggggucuacuucgcgagcaccgagaaguccaacaucauccgcggcuggaucuucgggacgacccucgacagcaagacccagucccugcugaucgugaacaacgccaccaacguggucaucaaggugugcgaguuccaguucugcaacgaccccuuccucggcguguacuaccacaagaacaacaagagcuggauggaguccgaguuccgggucuacagcuccgccaacaacugcacguucgaguacgugagccagcccuuccugauggaccuggagggcaagcaggggaacuucaagaaccuccgcgaguucguguucaagaacaucgacggcuacuucaagaucuacuccaagcacaccccgaucaaccugguccgggaccugccccagggguucagcgugcucgagccccugguggaccugcccaucggcaucaacaucacccgcuuccagacccuccuggcccugcaccgguccuaccucacgccgggggacagcagcuccggcuggaccgccggcgcggccgccuacuacgucggguaccugcagccccgcaccuuccugcucaaguacaacgagaacggcaccaucacggacgccguggacugcgcgcuggacccccugagcgagaccaagugcacccucaaguccuucaccguggagaaggggaucuaccagacgagcaacuuccggguccagcccaccgaguccaucgugcgcuucccgaacaucaccaaccugugccccuucggcgaggucuucaacgccacccgguucgccagcguguacgccuggaaccgcaagcggaucuccaacugcguggccgacuacagcguccuguacaacuccgcgagcuucuccacguucaagugcuacggcgugagccccaccaagcucaacgaccugugcuucaccaacguguacgccgacuccuucgucauccgcggggacgaggugcggcagaucgcccccggccagaccgggaagaucgccgacuacaacuacaagcugccggacgacuucacgggcugcgugaucgccuggaacagcaacaaccucgacuccaaggucgggggcaacuacaacuaccuguaccgccuguuccgcaagagcaaccucaagcccuucgagcgggacaucuccaccgagaucuaccaggcgggcagcacccccugcaacgggguggagggcuucaacugcuacuucccccugcaguccuacggguuccagccgaccaacggcgugggguaccagcccuaccgggucguggugcugagcuucgagcuccugcacgcccccgccacggucugcggccccaagaaguccaccaaccuggugaagaacaagugcgugaacuucaacuucaacggccucaccgggaccggcguccugaccgagagcaacaagaaguuccugccguuccagcaguucgggcgcgacaucgccgacacgaccgacgccgugcgcgacccccagacccuggagauccucgacaucacccccugcagcuucggcgggguguccgucaucacgccgggcaccaacaccagcaaccagguggcggugcuguaccagggcgucaacugcaccgaggugcccguggccauccacgccgaccagcugacgcccaccuggcgggucuacuccaccgggagcaacguguuccagacccgcgccggcugccucaucggggccgagcacgugaacaacuccuacgagugcgacauccccaucggcgcgggcaucugcgccagcuaccagacgcagaccaacuccccgcggcgcgcccggagcgucgccucccagagcaucaucgcguacaccaugucccugggggccgagaacagcguggccuacuccaacaacagcaucgccauccccaccaacuucacgaucuccgugaccaccgagauccugcccgucagcaugaccaagacgagcguggacugcaccauguacaucugcggcgacuccaccgagugcagcaaccuccugcugcaguacggguccuucugcacccagcucaaccgcgcccugacgggcaucgcgguggagcaggacaagaacacccaggaggucuucgcccaggugaagcagaucuacaagacgcccccgaucaaggacuucgggggcuucaacuucagccagauccugcccgaccccuccaagcccagcaagcgguccuucaucgaggaccuccuguucaacaaggugacccuggccgacgccggcuucaucaagcaguacggggacugccucggcgacaucgccgcgcgcgaccugaucugcgcccagaaguucaacgggcugaccguccucccgccccugcugaccgacgagaugaucgcccaguacaccagcgcccuccuggccggcaccaucacguccggguggaccuucggcgcgggcgccgcccugcagauccccuucgccaugcagauggcguaccgguucaacgggaucggcgugacccagaacgugcucuacgagaaccagaagcugaucgccaaccaguucaacagcgccaucgggaagauccaggacucccugagcuccaccgccagcgcccucggcaagcugcaggacgucgugaaccagaacgcgcaggcccugaacacgcucgugaagcagcuguccagcaacuucggggccaucuccagcguccugaacgacauccucucccgccuggacccgcccgaggccgaggugcagaucgaccggcugaucaccggccgccuccagagccugcagaccuacgugacccagcagcugauccgggccgcggagauccgcgccagcgccaaccucgccgccaccaagauguccgagugcguccugggccagagcaagcggguggacuucugcgggaagggcuaccaccugauguccuucccccagagcgcgccccacgggguggucuuccuccacgugacguacguccccgcccaggagaagaacuucaccaccgccccggccaucugccacgacggcaaggcgcacuucccccgcgaggggguguucguguccaacggcacccacugguucgucacgcagcggaacuucuacgagccccagaucaucaccaccgacaacaccuucgugagcggcaacugcgacguggucaucgggaucgugaacaacacgguguacgacccccugcagccggagcuggacuccuucaaggaggagcucgacaaguacuucaagaaccacaccagccccgacgucgaccugggcgacaucuccgggaucaacgccagcguggugaacauccagaaggagaucgaccgccugaacgaggucgccaagaaccucaacgagucccugaucgaccugcaggagcucggcaaguacgagcaguacaucaaguggcccugguacaucuggcugggcuucaucgccgggcugaucgccaucgugauggugaccaucaugcucugcugcaugaccagcugcugcuccugccugaagggcugcugcagcugcggguccugcugcaaguucgacgaggacgacagcgagccgguccugaagggcgugaagcuccacuacacgugaggacuaguguccaccugucccuccugggcugcuggauugucucguuuuccugccaaauaaacaggaucagcgcuuuacagaucuaaaaaaaaaaaaaaaaaaaaaaaaaaaaaaaaaaaaaaaaaaaaaaaaaaaaaaaaaaaaaaaaaaaaaaaaaaaaaaaaaaaaaaaaaaaaaaaaaaaa

SEQ ID NO: 25298 - RNA, 4105 nt, Artificial Sequence
  SARS-CoV-2/Wuhan/WIV05/2019__EPI_ISL_402128 spike protein mRNA gc (1-1273)(K986P_V987P_N439K_D614G)
aggagacccgugacccggaaguuguacggcuacgcgacuuucccucccacaaacccucgcgcccuuccuuuccuacuugggcccggcagaaagcuuaccauguucguguuccugguccuccugccccuggugagcucccagugcgugaaccucaccacccgcacgcagcugccgcccgccuacaccaacagcuucacccggggcgucuacuaccccgacaagguguuccgcuccagcgugcugcacuccacccaggaccucuuccugcccuucuucagcaacgucacgugguuccacgccauccacguguccgggaccaacggcaccaagcgguucgacaacccggugcugcccuucaacgacggggucuacuucgcgagcaccgagaaguccaacaucauccgcggcuggaucuucgggacgacccucgacagcaagacccagucccugcugaucgugaacaacgccaccaacguggucaucaaggugugcgaguuccaguucugcaacgaccccuuccucggcguguacuaccacaagaacaacaagagcuggauggaguccgaguuccgggucuacagcuccgccaacaacugcacguucgaguacgugagccagcccuuccugauggaccuggagggcaagcaggggaacuucaagaaccuccgcgaguucguguucaagaacaucgacggcuacuucaagaucuacuccaagcacaccccgaucaaccugguccgggaccugccccagggguucagcgcccucgagccccugguggaccugcccaucggcaucaacaucacccgcuuccagacccuccuggcccugcaccgguccuaccucacgccgggggacagcagcuccggcuggaccgcgggcgccgccgccuacuacgugggguaccugcagccccgcaccuuccugcucaaguacaacgagaacggcaccaucacggacgcggucgacugcgcccuggacccccugagcgagaccaagugcacccucaaguccuucaccguggagaaggggaucuaccagacgagcaacuuccgggugcagcccaccgaguccaucguccgcuucccgaacaucaccaaccugugccccuucggcgagguguucaacgccacccgguucgccagcgucuacgccuggaaccgcaagcggaucuccaacugcguggcggacuacagcgugcuguacaacuccgccagcuucuccacguucaagugcuacggcgucagccccaccaagcucaacgaccugugcuucaccaacguguacgccgacuccuucgugauccgcggggacgagguccggcagaucgcccccggccagaccgggaagaucgccgacuacaacuacaagcugccggacgacuucacgggcugcgugaucgcguggaacagcaagaaccucgacuccaaggucgggggcaacuacaacuaccuguaccgccuguuccgcaagagcaaccucaagcccuucgagcgggacaucuccaccgagaucuaccaggccggcagcacccccugcaacgggguggagggcuucaacugcuacuucccccugcaguccuacggguuccagccgaccaacggcgugggguaccagcccuaccggguggucgugcugagcuucgagcuccugcacgcccccgccacggugugcggccccaagaaguccaccaaccuggucaagaacaagugcgugaacuucaacuucaacggccucaccgggaccggcgugcugaccgagagcaacaagaaguuccugccguuccagcaguucgggcgcgacaucgccgacacgaccgacgcgguccgcgacccccagacccuggagauccucgacaucacccccugcagcuucggcgggguguccgugaucacgccgggcaccaacaccagcaaccaggucgccgugcuguaccagggcgugaacugcaccgagguccccguggccauccacgccgaccagcugacgcccaccuggcggguguacuccaccgggagcaacgucuuccagacccgcgccggcugccucaucggggcggagcacgugaacaacuccuacgagugcgacauccccaucggcgccggcaucugcgccagcuaccagacgcagaccaacuccccgcggcgcgcccggagcguggcgucccagagcaucaucgccuacaccaugucccugggggccgagaacagcgucgccuacuccaacaacagcaucgccauccccaccaacuucacgaucuccgugaccaccgagauccugcccgugagcaugaccaagacgagcgucgacugcaccauguacaucugcggcgacuccaccgagugcagcaaccuccugcugcaguacggguccuucugcacccagcucaaccgcgcgcugacgggcaucgccguggagcaggacaagaacacccaggagguguucgcccaggucaagcagaucuacaagacgcccccgaucaaggacuucgggggcuucaacuucagccagauccugcccgaccccuccaagcccagcaagcgguccuucaucgaggaccuccuguucaacaaggugacccuggccgacgccggcuucaucaagcaguacggggacugccucggcgacaucgcggcccgcgaccugaucugcgcccagaaguucaacgggcugaccgugcucccgccccugcugaccgacgagaugaucgcccaguacaccagcgcccuccuggcgggcaccaucacguccggguggaccuucggcgccggcgccgcccugcagauccccuucgcgaugcagauggccuaccgguucaacgggaucggcgucacccagaacgugcucuacgagaaccagaagcugaucgccaaccaguucaacagcgccaucgggaagauccaggacucccugagcuccaccgccagcgcgcucggcaagcugcaggacguggucaaccagaacgcccaggcccugaacacgcucgugaagcagcuguccagcaacuucggggccaucuccagcgugcugaacgacauccucucccgccuggacccgcccgaggccgagguccagaucgaccggcugaucaccggccgccuccagagccugcagaccuacgugacccagcagcugauccgggcggccgagauccgcgccagcgccaaccucgccgcgaccaagauguccgagugcgugcugggccagagcaagcgggucgacuucugcgggaagggcuaccaccugauguccuucccccagagcgcgccccacggggugguguuccuccacgucacguacgugcccgcccaggagaagaacuucaccaccgccccggccaucugccacgacggcaaggcccacuucccccgcgagggggucuucguguccaacggcacccacugguucgugacgcagcggaacuucuacgagccccagaucaucaccaccgacaacaccuucgucagcggcaacugcgacguggugaucgggaucgucaacaacacgguguacgacccccugcagccggagcuggacuccuucaaggaggagcucgacaaguacuucaagaaccacaccagccccgacguggaccugggcgacaucuccgggaucaacgccagcgucgugaacauccagaaggagaucgaccgccugaacgagguggccaagaaccucaacgagucccugaucgaccugcaggagcucggcaaguacgagcaguacaucaaguggcccugguacaucuggcugggcuucaucgccgggcugaucgcgaucgucauggugaccaucaugcucugcugcaugaccagcugcugcuccugccugaagggcugcugcagcugcggguccugcugcaaguucgacgaggacgacagcgagccggugcugaagggcgucaagcuccacuacacgugaggacuaguguccaccugucccuccugggcugcuggauugucucguuuuccugccaaauaaacaggaucagcgcuuuacagaucuaaaaaaaaaaaaaaaaaaaaaaaaaaaaaaaaaaaaaaaaaaaaaaaaaaaaaaaaaaaaaaaaaaaaaaaaaaaaaaaaaaaaaaaaaaaaaaaaaaaa

SEQ ID NO: 25299 - RNA, 4105 nt, Artificial Sequence
  SARS-CoV-2/Wuhan/WIV05/2019__EPI_ISL_402128 spike protein mRNA gc (1-1273)(K986P_V987P_S477N_D614G)
aggagacccgugacccggaaguuguacggcuacgcgacuuucccucccacaaacccucgcgcccuuccuuuccuacuugggcccggcagaaagcuuaccauguucguguuccugguccuccugccccuggugagcucccagugcgugaaccucaccacccgcacgcagcugccgcccgccuacaccaacagcuucacccggggcgucuacuaccccgacaagguguuccgcuccagcgugcugcacuccacccaggaccucuuccugcccuucuucagcaacgucacgugguuccacgccauccacguguccgggaccaacggcaccaagcgguucgacaacccggugcugcccuucaacgacggggucuacuucgcgagcaccgagaaguccaacaucauccgcggcuggaucuucgggacgacccucgacagcaagacccagucccugcugaucgugaacaacgccaccaacguggucaucaaggugugcgaguuccaguucugcaacgaccccuuccucggcguguacuaccacaagaacaacaagagcuggauggaguccgaguuccgggucuacagcuccgccaacaacugcacguucgaguacgugagccagcccuuccugauggaccuggagggcaagcaggggaacuucaagaaccuccgcgaguucguguucaagaacaucgacggcuacuucaagaucuacuccaagcacaccccgaucaaccugguccgggaccugccccagggguucagcgcccucgagccccugguggaccugcccaucggcaucaacaucacccgcuuccagacccuccuggcccugcaccgguccuaccucacgccgggggacagcagcuccggcuggaccgcgggcgccgccgccuacuacgugggguaccugcagccccgcaccuuccugcucaaguacaacgagaacggcaccaucacggacgcggucgacugcgcccuggacccccugagcgagaccaagugcacccucaaguccuucaccguggagaaggggaucuaccagacgagcaacuuccgggugcagcccaccgaguccaucguccgcuucccgaacaucaccaaccugugccccuucggcgagguguucaacgccacccgguucgccagcgucuacgccuggaaccgcaagcggaucuccaacugcguggcggacuacagcgugcuguacaacuccgccagcuucuccacguucaagugcuacggcgucagccccaccaagcucaacgaccugugcuucaccaacguguacgccgacuccuucgugauccgcggggacgagguccggcagaucgcccccggccagaccgggaagaucgccgacuacaacuacaagcugccggacgacuucacgggcugcgugaucgcguggaacagcaacaaccucgacuccaaggucgggggcaacuacaacuaccuguaccgccuguuccgcaagagcaaccucaagcccuucgagcgggacaucuccaccgagaucuaccaggccggcaacacccccugcaacgggguggagggcuucaacugcuacuucccccugcagagcuacggguuccagccgaccaacggcgugggguaccagcccuaccggguggucgugcuguccuucgagcuccugcacgcccccgccacggugugcggccccaagaaguccaccaaccuggucaagaacaagugcgugaacuucaacuucaacggccucaccgggaccggcgugcugaccgagagcaacaagaaguuccugccguuccagcaguucgggcgcgacaucgccgacacgaccgacgcgguccgcgacccccagacccuggagauccucgacaucacccccugcagcuucggcggggugagcgugaucacgccgggcaccaacaccuccaaccaggucgccgugcuguaccagggcgugaacugcaccgagguccccguggccauccacgccgaccagcugacgcccaccuggcggguguacagcaccggguccaacgucuuccagacccgcgccggcugccucaucggggcggagcacgugaacaacagcuacgagugcgacauccccaucggcgccggcaucugcgccuccuaccagacgcagaccaacagcccgcggcgcgcccgguccguggcgagccaguccaucaucgccuacaccaugagccugggggccgagaacuccgucgccuacagcaacaacuccaucgccauccccaccaacuucacgaucagcgugaccaccgagauccugcccguguccaugaccaagacgagcgucgacugcaccauguacaucugcggcgacagcaccgagugcuccaaccuccugcugcaguacgggagcuucugcacccagcucaaccgcgcgcugacgggcaucgccguggagcaggacaagaacacccaggagguguucgcccaggucaagcagaucuacaagacgcccccgaucaaggacuucgggggcuucaacuucucccagauccugcccgaccccagcaagcccuccaagcggagcuucaucgaggaccuccuguucaacaaggugacccuggccgacgccggcuucaucaagcaguacggggacugccucggcgacaucgcggcccgcgaccugaucugcgcccagaaguucaacgggcugaccgugcucccgccccugcugaccgacgagaugaucgcccaguacaccuccgcccuccuggcgggcaccaucacgagcggguggaccuucggcgccggcgccgcccugcagauccccuucgcgaugcagauggccuaccgguucaacgggaucggcgucacccagaacgugcucuacgagaaccagaagcugaucgccaaccaguucaacuccgccaucgggaagauccaggacagccuguccagcaccgccuccgcgcucggcaagcugcaggacguggucaaccagaacgcccaggcccugaacacgcucgugaagcagcugagcuccaacuucggggccaucagcuccgugcugaacgacauccucagccgccuggacccgcccgaggccgagguccagaucgaccggcugaucaccggccgccuccagucccugcagaccuacgugacccagcagcugauccgggcggccgagauccgcgccagcgccaaccucgccgcgaccaagaugagcgagugcgugcugggccaguccaagcgggucgacuucugcgggaagggcuaccaccugaugagcuucccccaguccgcgccccacggggugguguuccuccacgucacguacgugcccgcccaggagaagaacuucaccaccgccccggccaucugccacgacggcaaggcccacuucccccgcgagggggucuucgugagcaacggcacccacugguucgugacgcagcggaacuucuacgagccccagaucaucaccaccgacaacaccuucgucuccggcaacugcgacguggugaucgggaucgucaacaacacgguguacgacccccugcagccggagcuggacagcuucaaggaggagcucgacaaguacuucaagaaccacaccucccccgacguggaccugggcgacaucagcgggaucaacgccuccgucgugaacauccagaaggagaucgaccgccugaacgagguggccaagaaccucaacgagagccugaucgaccugcaggagcucggcaaguacgagcaguacaucaaguggcccugguacaucuggcugggcuucaucgccgggcugaucgcgaucgucauggugaccaucaugcucugcugcaugaccuccugcugcagcugccugaagggcugcugcuccugcgggagcugcugcaaguucgacgaggacgacuccgagccggugcugaagggcgucaagcuccacuacacgugaggacuaguguccaccugucccuccugggcugcuggauugucucguuuuccugccaaauaaacaggaucagcgcuuuacagaucuaaaaaaaaaaaaaaaaaaaaaaaaaaaaaaaaaaaaaaaaaaaaaaaaaaaaaaaaaaaaaaaaaaaaaaaaaaaaaaaaaaaaaaaaaaaaaaaaaaaa

SEQ ID NO: 25300 - RNA, 4105 nt, Artificial Sequence
  SARS-CoV-2/Wuhan/WIV05/2019__EPI_ISL_402128 spike protein mRNA gc (1-1273)(K986P_V987P_N501Y_D614G)
aggagacccgugacccggaaguuguacggcuacgcgacuuucccucccacaaacccucgcgcccuuccuuuccuacuugggcccggcagaaagcuuaccauguucguguuccugguccuccugccccuggugagcucccagugcgugaaccucaccacccgcacgcagcugccgcccgccuacaccaacagcuucacccggggcgucuacuaccccgacaagguguuccgcuccagcgugcugcacuccacccaggaccucuuccugcccuucuucagcaacgucacgugguuccacgccauccacguguccgggaccaacggcaccaagcgguucgacaacccggugcugcccuucaacgacggggucuacuucgcgagcaccgagaaguccaacaucauccgcggcuggaucuucgggacgacccucgacagcaagacccagucccugcugaucgugaacaacgccaccaacguggucaucaaggugugcgaguuccaguucugcaacgaccccuuccucggcguguacuaccacaagaacaacaagagcuggauggaguccgaguuccgggucuacagcuccgccaacaacugcacguucgaguacgugagccagcccuuccugauggaccuggagggcaagcaggggaacuucaagaaccuccgcgaguucguguucaagaacaucgacggcuacuucaagaucuacuccaagcacaccccgaucaaccugguccgggaccugccccagggguucagcgcccucgagccccugguggaccugcccaucggcaucaacaucacccgcuuccagacccuccuggcccugcaccgguccuaccucacgccgggggacagcagcuccggcuggaccgcgggcgccgccgccuacuacgugggguaccugcagccccgcaccuuccugcucaaguacaacgagaacggcaccaucacggacgcggucgacugcgcccuggacccccugagcgagaccaagugcacccucaaguccuucaccguggagaaggggaucuaccagacgagcaacuuccgggugcagcccaccgaguccaucguccgcuucccgaacaucaccaaccugugccccuucggcgagguguucaacgccacccgguucgccagcgucuacgccuggaaccgcaagcggaucuccaacugcguggcggacuacagcgugcuguacaacuccgccagcuucuccacguucaagugcuacggcgucagccccaccaagcucaacgaccugugcuucaccaacguguacgccgacuccuucgugauccgcggggacgagguccggcagaucgcccccggccagaccgggaagaucgccgacuacaacuacaagcugccggacgacuucacgggcugcgugaucgcguggaacagcaacaaccucgacuccaaggucgggggcaacuacaacuaccuguaccgccuguuccgcaagagcaaccucaagcccuucgagcgggacaucuccaccgagaucuaccaggccggcagcacccccugcaacgggguggagggcuucaacugcuacuucccccugcaguccuacggguuccagccgaccuacggcgugggguaccagcccuaccggguggucgugcugagcuucgagcuccugcacgcccccgccacggugugcggccccaagaaguccaccaaccuggucaagaacaagugcgugaacuucaacuucaacggccucaccgggaccggcgugcugaccgagagcaacaagaaguuccugccguuccagcaguucgggcgcgacaucgccgacacgaccgacgcgguccgcgacccccagacccuggagauccucgacaucacccccugcagcuucggcgggguguccgugaucacgccgggcaccaacaccagcaaccaggucgccgugcuguaccagggcgugaacugcaccgagguccccguggccauccacgccgaccagcugacgcccaccuggcggguguacuccaccgggagcaacgucuuccagacccgcgccggcugccucaucggggcggagcacgugaacaacuccuacgagugcgacauccccaucggcgccggcaucugcgccagcuaccagacgcagaccaacuccccgcggcgcgcccggagcguggcgucccagagcaucaucgccuacaccaugucccugggggccgagaacagcgucgccuacuccaacaacagcaucgccauccccaccaacuucacgaucuccgugaccaccgagauccugcccgugagcaugaccaagacgagcgucgacugcaccauguacaucugcggcgacuccaccgagugcagcaaccuccugcugcaguacggguccuucugcacccagcucaaccgcgcgcugacgggcaucgccguggagcaggacaagaacacccaggagguguucgcccaggucaagcagaucuacaagacgcccccgaucaaggacuucgggggcuucaacuucagccagauccugcccgaccccuccaagcccagcaagcgguccuucaucgaggaccuccuguucaacaaggugacccuggccgacgccggcuucaucaagcaguacggggacugccucggcgacaucgcggcccgcgaccugaucugcgcccagaaguucaacgggcugaccgugcucccgccccugcugaccgacgagaugaucgcccaguacaccagcgcccuccuggcgggcaccaucacguccggguggaccuucggcgccggcgccgcccugcagauccccuucgcgaugcagauggccuaccgguucaacgggaucggcgucacccagaacgugcucuacgagaaccagaagcugaucgccaaccaguucaacagcgccaucgggaagauccaggacucccugagcuccaccgccagcgcgcucggcaagcugcaggacguggucaaccagaacgcccaggcccugaacacgcucgugaagcagcuguccagcaacuucggggccaucuccagcgugcugaacgacauccucucccgccuggacccgcccgaggccgagguccagaucgaccggcugaucaccggccgccuccagagccugcagaccuacgugacccagcagcugauccgggcggccgagauccgcgccagcgccaaccucgccgcgaccaagauguccgagugcgugcugggccagagcaagcgggucgacuucugcgggaagggcuaccaccugauguccuucccccagagcgcgccccacggggugguguuccuccacgucacguacgugcccgcccaggagaagaacuucaccaccgccccggccaucugccacgacggcaaggcccacuucccccgcgagggggucuucguguccaacggcacccacugguucgugacgcagcggaacuucuacgagccccagaucaucaccaccgacaacaccuucgucagcggcaacugcgacguggugaucgggaucgucaacaacacgguguacgacccccugcagccggagcuggacuccuucaaggaggagcucgacaaguacuucaagaaccacaccagccccgacguggaccugggcgacaucuccgggaucaacgccagcgucgugaacauccagaaggagaucgaccgccugaacgagguggccaagaaccucaacgagucccugaucgaccugcaggagcucggcaaguacgagcaguacaucaaguggcccugguacaucuggcugggcuucaucgccgggcugaucgcgaucgucauggugaccaucaugcucugcugcaugaccagcugcugcuccugccugaagggcugcugcagcugcggguccugcugcaaguucgacgaggacgacagcgagccggugcugaagggcgucaagcuccacuacacgugaggacuaguguccaccugucccuccugggcugcuggauugucucguuuuccugccaaauaaacaggaucagcgcuuuacagaucuaaaaaaaaaaaaaaaaaaaaaaaaaaaaaaaaaaaaaaaaaaaaaaaaaaaaaaaaaaaaaaaaaaaaaaaaaaaaaaaaaaaaaaaaaaaaaaaaaaaa

SEQ ID NO: 25301 - RNA, 4099 nt, Artificial Sequence
  SARS-CoV-2/Wuhan/WIV05/2019__EPI_ISL_402128 spike protein mRNA gc (1-1273)(K986P_V987P_H69del_V70del_D614G)
aggagacccgugacccggaaguuguacggcuacgcgacuuucccucccacaaacccucgcgcccuuccuuuccuacuugggcccggcagaaagcuuaccauguucguguuccugguccuccugccccuggugagcucccagugcgugaaccucaccacccgcacgcagcugccgcccgccuacaccaacagcuucacccggggcgucuacuaccccgacaagguguuccgcuccagcgugcugcacuccacccaggaccucuuccugcccuucuucagcaacgucacgugguuccacgccaucuccgggaccaacggcaccaagcgguucgacaacccggugcugcccuucaacgacgggguguacuucgcgagcaccgagaaguccaacaucauccgcggcuggaucuucgggacgacccucgacagcaagacccagucccugcugaucgucaacaacgccaccaacguggugaucaaggucugcgaguuccaguucugcaacgaccccuuccucggcguguacuaccacaagaacaacaagagcuggauggaguccgaguuccggguguacagcuccgccaacaacugcacguucgaguacgucagccagcccuuccugauggaccuggagggcaagcaggggaacuucaagaaccuccgcgaguucguguucaagaacaucgacggcuacuucaagaucuacuccaagcacaccccgaucaaccuggugcgggaccugccccagggguucagcgcccucgagccccuggucgaccugcccaucggcaucaacaucacccgcuuccagacccuccuggcccugcaccgguccuaccucacgccgggggacagcagcuccggcuggaccgcgggcgccgccgccuacuacgugggguaccugcagccccgcaccuuccugcucaaguacaacgagaacggcaccaucacggacgcgguggacugcgcccuggacccccugagcgagaccaagugcacccucaaguccuucaccgucgagaaggggaucuaccagacgagcaacuuccgggugcagcccaccgaguccaucgugcgcuucccgaacaucaccaaccugugccccuucggcgaggucuucaacgccacccgguucgccagcguguacgccuggaaccgcaagcggaucuccaacugcgucgcggacuacagcgugcuguacaacuccgccagcuucuccacguucaagugcuacggcgugagccccaccaagcucaacgaccugugcuucaccaacgucuacgccgacuccuucgugauccgcggggacgaggugcggcagaucgcccccggccagaccgggaagaucgccgacuacaacuacaagcugccggacgacuucacgggcugcgucaucgcguggaacagcaacaaccucgacuccaaggucgggggcaacuacaacuaccuguaccgccuguuccgcaagagcaaccucaagcccuucgagcgggacaucuccaccgagaucuaccaggccggcagcacccccugcaacgggguggagggcuucaacugcuacuucccccugcaguccuacggguuccagccgaccaacggcgugggguaccagcccuaccggguggugguccugagcuucgagcuccugcacgcccccgccacggugugcggccccaagaaguccaccaaccuggugaagaacaagugcgucaacuucaacuucaacggccucaccgggaccggcgugcugaccgagagcaacaagaaguuccugccguuccagcaguucgggcgcgacaucgccgacacgaccgacgcggugcgcgacccccagacccuggagauccucgacaucacccccugcagcuucggcggggucuccgugaucacgccgggcaccaacaccagcaaccagguggccguccuguaccagggcgugaacugcaccgaggugcccgucgccauccacgccgaccagcugacgcccaccuggcggguguacuccaccgggagcaacguguuccagacccgcgccggcugccucaucggggcggagcacgucaacaacuccuacgagugcgacauccccaucggcgccggcaucugcgccagcuaccagacgcagaccaacuccccgcggcgcgcccggagcguggcgucccagagcaucaucgccuacaccaugucccugggggccgagaacagcguggccuacuccaacaacagcaucgccauccccaccaacuucacgaucuccgucaccaccgagauccugcccgugagcaugaccaagacgagcguggacugcaccauguacaucugcggcgacuccaccgagugcagcaaccuccugcugcaguacggguccuucugcacccagcucaaccgcgcgcugacgggcaucgccgucgagcaggacaagaacacccaggagguguucgcccaggugaagcagaucuacaagacgcccccgaucaaggacuucgggggcuucaacuucagccagauccugcccgaccccuccaagcccagcaagcgguccuucaucgaggaccuccuguucaacaaggucacccuggccgacgccggcuucaucaagcaguacggggacugccucggcgacaucgcggcccgcgaccugaucugcgcccagaaguucaacgggcugaccgugcucccgccccugcugaccgacgagaugaucgcccaguacaccagcgcccuccuggcgggcaccaucacguccggguggaccuucggcgccggcgccgcccugcagauccccuucgcgaugcagauggccuaccgguucaacgggaucggcgugacccagaacguccucuacgagaaccagaagcugaucgccaaccaguucaacagcgccaucgggaagauccaggacucccugagcuccaccgccagcgcgcucggcaagcugcaggacguggugaaccagaacgcccaggcccugaacacgcucgucaagcagcuguccagcaacuucggggccaucuccagcgugcugaacgacauccucucccgccuggacccgcccgaggccgaggugcagaucgaccggcugaucaccggccgccuccagagccugcagaccuacgucacccagcagcugauccgggcggccgagauccgcgccagcgccaaccucgccgcgaccaagauguccgagugcgugcugggccagagcaagcggguggacuucugcgggaagggcuaccaccugauguccuucccccagagcgcgccccacggggucguguuccuccacgugacguacguccccgcccaggagaagaacuucaccaccgccccggccaucugccacgacggcaaggcccacuucccccgcgaggggguguucgucuccaacggcacccacugguucgugacgcagcggaacuucuacgagccccagaucaucaccaccgacaacaccuucgugagcggcaacugcgacgucgugaucgggaucgugaacaacacggucuacgacccccugcagccggagcuggacuccuucaaggaggagcucgacaaguacuucaagaaccacaccagccccgacguggaccugggcgacaucuccgggaucaacgccagcguggucaacauccagaaggagaucgaccgccugaacgagguggccaagaaccucaacgagucccugaucgaccugcaggagcucggcaaguacgagcaguacaucaaguggcccugguacaucuggcugggcuucaucgccgggcugaucgcgaucgugauggucaccaucaugcucugcugcaugaccagcugcugcuccugccugaagggcugcugcagcugcggguccugcugcaaguucgacgaggacgacagcgagccggugcugaagggcgugaagcuccacuacacgugaggacuaguguccaccugucccuccugggcugcuggauugucucguuuuccugccaaauaaacaggaucagcgcuuuacagaucuaaaaaaaaaaaaaaaaaaaaaaaaaaaaaaaaaaaaaaaaaaaaaaaaaaaaaaaaaaaaaaaaaaaaaaaaaaaaaaaaaaaaaaaaaaaaaaaaaaaa

SEQ ID NO: 25302 - RNA, 4105 nt, Artificial Sequence
  SARS-CoV-2/Wuhan/WIV05/2019__EPI_ISL_402128 spike protein mRNA gc (1-1273)(K986P_V987P_Y453F_D614G)
aggagacccgugacccggaaguuguacggcuacgcgacuuucccucccacaaacccucgcgcccuuccuuuccuacuugggcccggcagaaagcuuaccauguucguguuccugguccuccugccccuggugagcucccagugcgugaaccucaccacccgcacgcagcugccgcccgccuacaccaacagcuucacccggggcgucuacuaccccgacaagguguuccgcuccagcgugcugcacuccacccaggaccucuuccugcccuucuucagcaacgucacgugguuccacgccauccacguguccgggaccaacggcaccaagcgguucgacaacccggugcugcccuucaacgacggggucuacuucgcgagcaccgagaaguccaacaucauccgcggcuggaucuucgggacgacccucgacagcaagacccagucccugcugaucgugaacaacgccaccaacguggucaucaaggugugcgaguuccaguucugcaacgaccccuuccucggcguguacuaccacaagaacaacaagagcuggauggaguccgaguuccgggucuacagcuccgccaacaacugcacguucgaguacgugagccagcccuuccugauggaccuggagggcaagcaggggaacuucaagaaccuccgcgaguucguguucaagaacaucgacggcuacuucaagaucuacuccaagcacaccccgaucaaccugguccgggaccugccccagggguucagcgcccucgagccccugguggaccugcccaucggcaucaacaucacccgcuuccagacccuccuggcccugcaccgguccuaccucacgccgggggacagcagcuccggcuggaccgcgggcgccgccgccuacuacgugggguaccugcagccccgcaccuuccugcucaaguacaacgagaacggcaccaucacggacgcggucgacugcgcccuggacccccugagcgagaccaagugcacccucaaguccuucaccguggagaaggggaucuaccagacgagcaacuuccgggugcagcccaccgaguccaucguccgcuucccgaacaucaccaaccugugccccuucggcgagguguucaacgccacccgguucgccagcgucuacgccuggaaccgcaagcggaucuccaacugcguggcggacuacagcgugcuguacaacuccgccagcuucuccacguucaagugcuacggcgucagccccaccaagcucaacgaccugugcuucaccaacguguacgccgacuccuucgugauccgcggggacgagguccggcagaucgcccccggccagaccgggaagaucgccgacuacaacuacaagcugccggacgacuucacgggcugcgugaucgcguggaacagcaacaaccucgacuccaaggucgggggcaacuacaacuaccuguuccgccuguuccgcaagagcaaccucaagcccuucgagcgggacaucuccaccgagaucuaccaggccggcagcacccccugcaacgggguggagggcuucaacugcuacuucccccugcaguccuacggguuccagccgaccaacggcgugggguaccagcccuaccggguggucgugcugagcuucgagcuccugcacgcccccgccacggugugcggccccaagaaguccaccaaccuggucaagaacaagugcgugaacuucaacuucaacggccucaccgggaccggcgugcugaccgagagcaacaagaaguuccugccguuccagcaguucgggcgcgacaucgccgacacgaccgacgcgguccgcgacccccagacccuggagauccucgacaucacccccugcagcuucggcgggguguccgugaucacgccgggcaccaacaccagcaaccaggucgccgugcuguaccagggcgugaacugcaccgagguccccguggccauccacgccgaccagcugacgcccaccuggcggguguacuccaccgggagcaacgucuuccagacccgcgccggcugccucaucggggcggagcacgugaacaacuccuacgagugcgacauccccaucggcgccggcaucugcgccagcuaccagacgcagaccaacuccccgcggcgcgcccggagcguggcgucccagagcaucaucgccuacaccaugucccugggggccgagaacagcgucgccuacuccaacaacagcaucgccauccccaccaacuucacgaucuccgugaccaccgagauccugcccgugagcaugaccaagacgagcgucgacugcaccauguacaucugcggcgacuccaccgagugcagcaaccuccugcugcaguacggguccuucugcacccagcucaaccgcgcgcugacgggcaucgccguggagcaggacaagaacacccaggagguguucgcccaggucaagcagaucuacaagacgcccccgaucaaggacuucgggggcuucaacuucagccagauccugcccgaccccuccaagcccagcaagcgguccuucaucgaggaccuccuguucaacaaggugacccuggccgacgccggcuucaucaagcaguacggggacugccucggcgacaucgcggcccgcgaccugaucugcgcccagaaguucaacgggcugaccgugcucccgccccugcugaccgacgagaugaucgcccaguacaccagcgcccuccuggcgggcaccaucacguccggguggaccuucggcgccggcgccgcccugcagauccccuucgcgaugcagauggccuaccgguucaacgggaucggcgucacccagaacgugcucuacgagaaccagaagcugaucgccaaccaguucaacagcgccaucgggaagauccaggacucccugagcuccaccgccagcgcgcucggcaagcugcaggacguggucaaccagaacgcccaggcccugaacacgcucgugaagcagcuguccagcaacuucggggccaucuccagcgugcugaacgacauccucucccgccuggacccgcccgaggccgagguccagaucgaccggcugaucaccggccgccuccagagccugcagaccuacgugacccagcagcugauccgggcggccgagauccgcgccagcgccaaccucgccgcgaccaagauguccgagugcgugcugggccagagcaagcgggucgacuucugcgggaagggcuaccaccugauguccuucccccagagcgcgccccacggggugguguuccuccacgucacguacgugcccgcccaggagaagaacuucaccaccgccccggccaucugccacgacggcaaggcccacuucccccgcgagggggucuucguguccaacggcacccacugguucgugacgcagcggaacuucuacgagccccagaucaucaccaccgacaacaccuucgucagcggcaacugcgacguggugaucgggaucgucaacaacacgguguacgacccccugcagccggagcuggacuccuucaaggaggagcucgacaaguacuucaagaaccacaccagccccgacguggaccugggcgacaucuccgggaucaacgccagcgucgugaacauccagaaggagaucgaccgccugaacgagguggccaagaaccucaacgagucccugaucgaccugcaggagcucggcaaguacgagcaguacaucaaguggcccugguacaucuggcugggcuucaucgccgggcugaucgcgaucgucauggugaccaucaugcucugcugcaugaccagcugcugcuccugccugaagggcugcugcagcugcggguccugcugcaaguucgacgaggacgacagcgagccggugcugaagggcgucaagcuccacuacacgugaggacuaguguccaccugucccuccugggcugcuggauugucucguuuuccugccaaauaaacaggaucagcgcuuuacagaucuaaaaaaaaaaaaaaaaaaaaaaaaaaaaaaaaaaaaaaaaaaaaaaaaaaaaaaaaaaaaaaaaaaaaaaaaaaaaaaaaaaaaaaaaaaaaaaaaaaaa

SEQ ID NO: 25303 - RNA, 4105 nt, Artificial Sequence
  SARS-CoV-2/Wuhan/WIV05/2019__EPI_ISL_402128 spike protein mRNA gc (1-1273)(K986P_V987P_D614G_I692V)
aggagacccgugacccggaaguuguacggcuacgcgacuuucccucccacaaacccucgcgcccuuccuuuccuacuugggcccggcagaaagcuuaccauguucguguuccugguccuccugccccuggugagcucccagugcgugaaccucaccacccgcacgcagcugccgcccgccuacaccaacagcuucacccggggcgucuacuaccccgacaagguguuccgcuccagcgugcugcacuccacccaggaccucuuccugcccuucuucagcaacgucacgugguuccacgccauccacguguccgggaccaacggcaccaagcgguucgacaacccggugcugcccuucaacgacggggucuacuucgcgagcaccgagaaguccaacaucauccgcggcuggaucuucgggacgacccucgacagcaagacccagucccugcugaucgugaacaacgccaccaacguggucaucaaggugugcgaguuccaguucugcaacgaccccuuccucggcguguacuaccacaagaacaacaagagcuggauggaguccgaguuccgggucuacagcuccgccaacaacugcacguucgaguacgugagccagcccuuccugauggaccuggagggcaagcaggggaacuucaagaaccuccgcgaguucguguucaagaacaucgacggcuacuucaagaucuacuccaagcacaccccgaucaaccugguccgggaccugccccagggguucagcgcccucgagccccugguggaccugcccaucggcaucaacaucacccgcuuccagacccuccuggcccugcaccgguccuaccucacgccgggggacagcagcuccggcuggaccgcgggcgccgccgccuacuacgugggguaccugcagccccgcaccuuccugcucaaguacaacgagaacggcaccaucacggacgcggucgacugcgcccuggacccccugagcgagaccaagugcacccucaaguccuucaccguggagaaggggaucuaccagacgagcaacuuccgggugcagcccaccgaguccaucguccgcuucccgaacaucaccaaccugugccccuucggcgagguguucaacgccacccgguucgccagcgucuacgccuggaaccgcaagcggaucuccaacugcguggcggacuacagcgugcuguacaacuccgccagcuucuccacguucaagugcuacggcgucagccccaccaagcucaacgaccugugcuucaccaacguguacgccgacuccuucgugauccgcggggacgagguccggcagaucgcccccggccagaccgggaagaucgccgacuacaacuacaagcugccggacgacuucacgggcugcgugaucgcguggaacagcaacaaccucgacuccaaggucgggggcaacuacaacuaccuguaccgccuguuccgcaagagcaaccucaagcccuucgagcgggacaucuccaccgagaucuaccaggccggcagcacccccugcaacgggguggagggcuucaacugcuacuucccccugcaguccuacggguuccagccgaccaacggcgugggguaccagcccuaccggguggucgugcugagcuucgagcuccugcacgcccccgccacggugugcggccccaagaaguccaccaaccuggucaagaacaagugcgugaacuucaacuucaacggccucaccgggaccggcgugcugaccgagagcaacaagaaguuccugccguuccagcaguucgggcgcgacaucgccgacacgaccgacgcgguccgcgacccccagacccuggagauccucgacaucacccccugcagcuucggcgggguguccgugaucacgccgggcaccaacaccagcaaccaggucgccgugcuguaccagggcgugaacugcaccgagguccccguggccauccacgccgaccagcugacgcccaccuggcggguguacuccaccgggagcaacgucuuccagacccgcgccggcugccucaucggggcggagcacgugaacaacuccuacgagugcgacauccccaucggcgccggcaucugcgccagcuaccagacgcagaccaacuccccgcggcgcgcccggagcguggcgucccagagcgucaucgccuacaccaugucccugggggccgagaacagcguggccuacuccaacaacagcaucgccauccccaccaacuucacgaucuccgugaccaccgagauccugcccgucagcaugaccaagacgagcguggacugcaccauguacaucugcggcgacuccaccgagugcagcaaccuccugcugcaguacggguccuucugcacccagcucaaccgcgcgcugacgggcaucgccguggagcaggacaagaacacccaggaggucuucgcccaggugaagcagaucuacaagacgcccccgaucaaggacuucgggggcuucaacuucagccagauccugcccgaccccuccaagcccagcaagcgguccuucaucgaggaccuccuguucaacaaggugacccuggccgacgccggcuucaucaagcaguacggggacugccucggcgacaucgcggcccgcgaccugaucugcgcccagaaguucaacgggcugaccguccucccgccccugcugaccgacgagaugaucgcccaguacaccagcgcccuccuggcgggcaccaucacguccggguggaccuucggcgccggcgccgcccugcagauccccuucgcgaugcagauggccuaccgguucaacgggaucggcgugacccagaacgugcucuacgagaaccagaagcugaucgccaaccaguucaacagcgccaucgggaagauccaggacucccugagcuccaccgccagcgcgcucggcaagcugcaggacgucgugaaccagaacgcccaggcccugaacacgcucgugaagcagcuguccagcaacuucggggccaucuccagcguccugaacgacauccucucccgccuggacccgcccgaggccgaggugcagaucgaccggcugaucaccggccgccuccagagccugcagaccuacgugacccagcagcugauccgggcggccgagauccgcgccagcgccaaccucgccgcgaccaagauguccgagugcguccugggccagagcaagcggguggacuucugcgggaagggcuaccaccugauguccuucccccagagcgcgccccacgggguggucuuccuccacgugacguacguccccgcccaggagaagaacuucaccaccgccccggccaucugccacgacggcaaggcccacuucccccgcgaggggguguucguguccaacggcacccacugguucgucacgcagcggaacuucuacgagccccagaucaucaccaccgacaacaccuucgugagcggcaacugcgacguggucaucgggaucgugaacaacacgguguacgacccccugcagccggagcuggacuccuucaaggaggagcucgacaaguacuucaagaaccacaccagccccgacgucgaccugggcgacaucuccgggaucaacgccagcguggugaacauccagaaggagaucgaccgccugaacgaggucgccaagaaccucaacgagucccugaucgaccugcaggagcucggcaaguacgagcaguacaucaaguggcccugguacaucuggcugggcuucaucgccgggcugaucgcgaucgugauggugaccaucaugcucugcugcaugaccagcugcugcuccugccugaagggcugcugcagcugcggguccugcugcaaguucgacgaggacgacagcgagccgguccugaagggcgugaagcuccacuacacgugaggacuaguguccaccugucccuccugggcugcuggauugucucguuuuccugccaaauaaacaggaucagcgcuuuacagaucuaaaaaaaaaaaaaaaaaaaaaaaaaaaaaaaaaaaaaaaaaaaaaaaaaaaaaaaaaaaaaaaaaaaaaaaaaaaaaaaaaaaaaaaaaaaaaaaaaaaa

SEQ ID NO: 25304 - RNA, 4105 nt, Artificial Sequence
  SARS-CoV-2/Wuhan/WIV05/2019__EPI_ISL_402128 spike protein mRNA gc (1-1273)(K986P_V987P_D614G_M1229I)
aggagacccgugacccggaaguuguacggcuacgcgacuuucccucccacaaacccucgcgcccuuccuuuccuacuugggcccggcagaaagcuuaccauguucguguuccugguccuccugccccuggugagcucccagugcgugaaccucaccacccgcacgcagcugccgcccgccuacaccaacagcuucacccggggcgucuacuaccccgacaagguguuccgcuccagcgugcugcacuccacccaggaccucuuccugcccuucuucagcaacgucacgugguuccacgccauccacguguccgggaccaacggcaccaagcgguucgacaacccggugcugcccuucaacgacggggucuacuucgcgagcaccgagaaguccaacaucauccgcggcuggaucuucgggacgacccucgacagcaagacccagucccugcugaucgugaacaacgccaccaacguggucaucaaggugugcgaguuccaguucugcaacgaccccuuccucggcguguacuaccacaagaacaacaagagcuggauggaguccgaguuccgggucuacagcuccgccaacaacugcacguucgaguacgugagccagcccuuccugauggaccuggagggcaagcaggggaacuucaagaaccuccgcgaguucguguucaagaacaucgacggcuacuucaagaucuacuccaagcacaccccgaucaaccugguccgggaccugccccagggguucagcgcccucgagccccugguggaccugcccaucggcaucaacaucacccgcuuccagacccuccuggcccugcaccgguccuaccucacgccgggggacagcagcuccggcuggaccgcgggcgccgccgccuacuacgugggguaccugcagccccgcaccuuccugcucaaguacaacgagaacggcaccaucacggacgcggucgacugcgcccuggacccccugagcgagaccaagugcacccucaaguccuucaccguggagaaggggaucuaccagacgagcaacuuccgggugcagcccaccgaguccaucguccgcuucccgaacaucaccaaccugugccccuucggcgagguguucaacgccacccgguucgccagcgucuacgccuggaaccgcaagcggaucuccaacugcguggcggacuacagcgugcuguacaacuccgccagcuucuccacguucaagugcuacggcgucagccccaccaagcucaacgaccugugcuucaccaacguguacgccgacuccuucgugauccgcggggacgagguccggcagaucgcccccggccagaccgggaagaucgccgacuacaacuacaagcugccggacgacuucacgggcugcgugaucgcguggaacagcaacaaccucgacuccaaggucgggggcaacuacaacuaccuguaccgccuguuccgcaagagcaaccucaagcccuucgagcgggacaucuccaccgagaucuaccaggccggcagcacccccugcaacgggguggagggcuucaacugcuacuucccccugcaguccuacggguuccagccgaccaacggcgugggguaccagcccuaccggguggucgugcugagcuucgagcuccugcacgcccccgccacggugugcggccccaagaaguccaccaaccuggucaagaacaagugcgugaacuucaacuucaacggccucaccgggaccggcgugcugaccgagagcaacaagaaguuccugccguuccagcaguucgggcgcgacaucgccgacacgaccgacgcgguccgcgacccccagacccuggagauccucgacaucacccccugcagcuucggcgggguguccgugaucacgccgggcaccaacaccagcaaccaggucgccgugcuguaccagggcgugaacugcaccgagguccccguggccauccacgccgaccagcugacgcccaccuggcggguguacuccaccgggagcaacgucuuccagacccgcgccggcugccucaucggggcggagcacgugaacaacuccuacgagugcgacauccccaucggcgccggcaucugcgccagcuaccagacgcagaccaacuccccgcggcgcgcccggagcguggcgucccagagcaucaucgccuacaccaugucccugggggccgagaacagcgucgccuacuccaacaacagcaucgccauccccaccaacuucacgaucuccgugaccaccgagauccugcccgugagcaugaccaagacgagcgucgacugcaccauguacaucugcggcgacuccaccgagugcagcaaccuccugcugcaguacggguccuucugcacccagcucaaccgcgcgcugacgggcaucgccguggagcaggacaagaacacccaggagguguucgcccaggucaagcagaucuacaagacgcccccgaucaaggacuucgggggcuucaacuucagccagauccugcccgaccccuccaagcccagcaagcgguccuucaucgaggaccuccuguucaacaaggugacccuggccgacgccggcuucaucaagcaguacggggacugccucggcgacaucgcggcccgcgaccugaucugcgcccagaaguucaacgggcugaccgugcucccgccccugcugaccgacgagaugaucgcccaguacaccagcgcccuccuggcgggcaccaucacguccggguggaccuucggcgccggcgccgcccugcagauccccuucgcgaugcagauggccuaccgguucaacgggaucggcgucacccagaacgugcucuacgagaaccagaagcugaucgccaaccaguucaacagcgccaucgggaagauccaggacucccugagcuccaccgccagcgcgcucggcaagcugcaggacguggucaaccagaacgcccaggcccugaacacgcucgugaagcagcuguccagcaacuucggggccaucuccagcgugcugaacgacauccucucccgccuggacccgcccgaggccgagguccagaucgaccggcugaucaccggccgccuccagagccugcagaccuacgugacccagcagcugauccgggcggccgagauccgcgccagcgccaaccucgccgcgaccaagauguccgagugcgugcugggccagagcaagcgggucgacuucugcgggaagggcuaccaccugauguccuucccccagagcgcgccccacggggugguguuccuccacgucacguacgugcccgcccaggagaagaacuucaccaccgccccggccaucugccacgacggcaaggcccacuucccccgcgagggggucuucguguccaacggcacccacugguucgugacgcagcggaacuucuacgagccccagaucaucaccaccgacaacaccuucgucagcggcaacugcgacguggugaucgggaucgucaacaacacgguguacgacccccugcagccggagcuggacuccuucaaggaggagcucgacaaguacuucaagaaccacaccagccccgacguggaccugggcgacaucuccgggaucaacgccagcgucgugaacauccagaaggagaucgaccgccugaacgagguggccaagaaccucaacgagucccugaucgaccugcaggagcucggcaaguacgagcaguacaucaaguggcccugguacaucuggcugggcuucaucgccgggcugaucgcgaucgucaucgugaccaucaugcucugcugcaugaccagcugcugcuccugccugaagggcugcugcagcugcggguccugcugcaaguucgacgaggacgacagcgagccggugcugaagggcgucaagcuccacuacacgugaggacuaguguccaccugucccuccugggcugcuggauugucucguuuuccugccaaauaaacaggaucagcgcuuuacagaucuaaaaaaaaaaaaaaaaaaaaaaaaaaaaaaaaaaaaaaaaaaaaaaaaaaaaaaaaaaaaaaaaaaaaaaaaaaaaaaaaaaaaaaaaaaaaaaaaaaaa

SEQ ID NO: 25305 - RNA, 4099 nt, Artificial Sequence
  SARS-CoV-2/Wuhan/WIV05/2019__EPI_ISL_402128 spike protein mRNA gc (1-1273)(K986P_V987P_H69del_V70del_A222V_Y453F_S477N_D614G_I692V)
aggagacccgugacccggaaguuguacggcuacgcgacuuucccucccacaaacccucgcgcccuuccuuuccuacuugggcccggcagaaagcuuaccauguucguguuccugguccuccugccccuggugagcucccagugcgugaaccucaccacccgcacgcagcugccgcccgccuacaccaacagcuucacccggggcgucuacuaccccgacaagguguuccgcuccagcgugcugcacuccacccaggaccucuuccugcccuucuucagcaacgucacgugguuccacgccaucuccgggaccaacggcaccaagcgguucgacaacccggugcugcccuucaacgacgggguguacuucgcgagcaccgagaaguccaacaucauccgcggcuggaucuucgggacgacccucgacagcaagacccagucccugcugaucgucaacaacgccaccaacguggugaucaaggucugcgaguuccaguucugcaacgaccccuuccucggcguguacuaccacaagaacaacaagagcuggauggaguccgaguuccggguguacagcuccgccaacaacugcacguucgaguacgucagccagcccuuccugauggaccuggagggcaagcaggggaacuucaagaaccuccgcgaguucguguucaagaacaucgacggcuacuucaagaucuacuccaagcacaccccgaucaaccuggugcgggaccugccccagggguucagcguccucgagccccugguggaccugcccaucggcaucaacaucacccgcuuccagacccuccuggcccugcaccgguccuaccucacgccgggggacagcagcuccggcuggaccgccggcgcggccgccuacuacgugggguaccugcagccccgcaccuuccugcucaaguacaacgagaacggcaccaucacggacgccgucgacugcgcgcuggacccccugagcgagaccaagugcacccucaaguccuucaccguggagaaggggaucuaccagacgagcaacuuccgggugcagcccaccgaguccaucguccgcuucccgaacaucaccaaccugugccccuucggcgagguguucaacgccacccgguucgccagcgucuacgccuggaaccgcaagcggaucuccaacugcguggccgacuacagcgugcuguacaacuccgcgagcuucuccacguucaagugcuacggcgucagccccaccaagcucaacgaccugugcuucaccaacguguacgccgacuccuucgugauccgcggggacgagguccggcagaucgcccccggccagaccgggaagaucgccgacuacaacuacaagcugccggacgacuucacgggcugcgugaucgccuggaacagcaacaaccucgacuccaaggucgggggcaacuacaacuaccuguuccgccuguuccgcaagagcaaccucaagcccuucgagcgggacaucuccaccgagaucuaccaggcgggcaacacccccugcaacgggguggagggcuucaacugcuacuucccccugcagagcuacggguuccagccgaccaacggcgugggguaccagcccuaccggguggucgugcuguccuucgagcuccugcacgcccccgccacggugugcggccccaagaaguccaccaaccuggucaagaacaagugcgugaacuucaacuucaacggccucaccgggaccggcgugcugaccgagagcaacaagaaguuccugccguuccagcaguucgggcgcgacaucgccgacacgaccgacgccguccgcgacccccagacccuggagauccucgacaucacccccugcagcuucggcggggugagcgugaucacgccgggcaccaacaccuccaaccaggucgcggugcuguaccagggcgugaacugcaccgagguccccguggccauccacgccgaccagcugacgcccaccuggcggguguacagcaccggguccaacgucuuccagacccgcgccggcugccucaucggggccgagcacgugaacaacagcuacgagugcgacauccccaucggcgcgggcaucugcgccuccuaccagacgcagaccaacagcccgcggcgcgcccgguccguggccagccaguccgucaucgcguacaccaugagccugggggccgagaacuccguggccuacagcaacaacuccaucgccauccccaccaacuucacgaucagcgugaccaccgagauccugcccgucuccaugaccaagacgagcguggacugcaccauguacaucugcggcgacagcaccgagugcuccaaccuccugcugcaguacgggagcuucugcacccagcucaaccgcgcccugacgggcaucgcgguggagcaggacaagaacacccaggaggucuucgcccaggugaagcagaucuacaagacgcccccgaucaaggacuucgggggcuucaacuucucccagauccugcccgaccccagcaagcccuccaagcggagcuucaucgaggaccuccuguucaacaaggugacccuggccgacgccggcuucaucaagcaguacggggacugccucggcgacaucgccgcgcgcgaccugaucugcgcccagaaguucaacgggcugaccguccucccgccccugcugaccgacgagaugaucgcccaguacaccuccgcccuccuggccggcaccaucacgagcggguggaccuucggcgcgggcgccgcccugcagauccccuucgccaugcagauggcguaccgguucaacgggaucggcgugacccagaacgugcucuacgagaaccagaagcugaucgccaaccaguucaacuccgccaucgggaagauccaggacagccuguccagcaccgccuccgcccucggcaagcugcaggacgucgugaaccagaacgcgcaggcccugaacacgcucgugaagcagcugagcuccaacuucggggccaucagcuccguccugaacgacauccucagccgccuggacccgcccgaggccgaggugcagaucgaccggcugaucaccggccgccuccagucccugcagaccuacgugacccagcagcugauccgggccgcggagauccgcgccagcgccaaccucgccgccaccaagaugagcgagugcguccugggccaguccaagcggguggacuucugcgggaagggcuaccaccugaugagcuucccccaguccgcgccccacgggguggucuuccuccacgugacguacguccccgcccaggagaagaacuucaccaccgccccggccaucugccacgacggcaaggcgcacuucccccgcgaggggguguucgugagcaacggcacccacugguucgucacgcagcggaacuucuacgagccccagaucaucaccaccgacaacaccuucguguccggcaacugcgacguggucaucgggaucgugaacaacacgguguacgacccccugcagccggagcuggacagcuucaaggaggagcucgacaaguacuucaagaaccacaccucccccgacgucgaccugggcgacaucagcgggaucaacgccuccguggugaacauccagaaggagaucgaccgccugaacgaggucgccaagaaccucaacgagagccugaucgaccugcaggagcucggcaaguacgagcaguacaucaaguggcccugguacaucuggcugggcuucaucgccgggcugaucgccaucgugauggugaccaucaugcucugcugcaugaccuccugcugcagcugccugaagggcugcugcuccugcgggagcugcugcaaguucgacgaggacgacuccgagccgguccugaagggcgugaagcuccacuacacgugaggacuaguguccaccugucccuccugggcugcuggauugucucguuuuccugccaaauaaacaggaucagcgcuuuacagaucuaaaaaaaaaaaaaaaaaaaaaaaaaaaaaaaaaaaaaaaaaaaaaaaaaaaaaaaaaaaaaaaaaaaaaaaaaaaaaaaaaaaaaaaaaaaaaaaaaaaa

SEQ ID NO: 25306 - RNA, 4099 nt, Artificial Sequence
  SARS-CoV-2/Wuhan/WIV05/2019__EPI_ISL_402128 spike protein mRNA gc (1-1273)(K986P_V987P_H69del_V70del_Y453F_D614G_I692V_M1229I)
aggagacccgugacccggaaguuguacggcuacgcgacuuucccucccacaaacccucgcgcccuuccuuuccuacuugggcccggcagaaagcuuaccauguucguguuccugguccuccugccccuggugagcucccagugcgugaaccucaccacccgcacgcagcugccgcccgccuacaccaacagcuucacccggggcgucuacuaccccgacaagguguuccgcuccagcgugcugcacuccacccaggaccucuuccugcccuucuucagcaacgucacgugguuccacgccaucuccgggaccaacggcaccaagcgguucgacaacccggugcugcccuucaacgacgggguguacuucgcgagcaccgagaaguccaacaucauccgcggcuggaucuucgggacgacccucgacagcaagacccagucccugcugaucgucaacaacgccaccaacguggugaucaaggucugcgaguuccaguucugcaacgaccccuuccucggcguguacuaccacaagaacaacaagagcuggauggaguccgaguuccggguguacagcuccgccaacaacugcacguucgaguacgucagccagcccuuccugauggaccuggagggcaagcaggggaacuucaagaaccuccgcgaguucguguucaagaacaucgacggcuacuucaagaucuacuccaagcacaccccgaucaaccuggugcgggaccugccccagggguucagcgcccucgagccccuggucgaccugcccaucggcaucaacaucacccgcuuccagacccuccuggcccugcaccgguccuaccucacgccgggggacagcagcuccggcuggaccgcgggcgccgccgccuacuacgugggguaccugcagccccgcaccuuccugcucaaguacaacgagaacggcaccaucacggacgcgguggacugcgcccuggacccccugagcgagaccaagugcacccucaaguccuucaccgucgagaaggggaucuaccagacgagcaacuuccgggugcagcccaccgaguccaucgugcgcuucccgaacaucaccaaccugugccccuucggcgaggucuucaacgccacccgguucgccagcguguacgccuggaaccgcaagcggaucuccaacugcgucgcggacuacagcgugcuguacaacuccgccagcuucuccacguucaagugcuacggcgugagccccaccaagcucaacgaccugugcuucaccaacgucuacgccgacuccuucgugauccgcggggacgaggugcggcagaucgcccccggccagaccgggaagaucgccgacuacaacuacaagcugccggacgacuucacgggcugcgucaucgcguggaacagcaacaaccucgacuccaaggucgggggcaacuacaacuaccuguuccgccuguuccgcaagagcaaccucaagcccuucgagcgggacaucuccaccgagaucuaccaggccggcagcacccccugcaacgggguggagggcuucaacugcuacuucccccugcaguccuacggguuccagccgaccaacggcgugggguaccagcccuaccggguggugguccugagcuucgagcuccugcacgcccccgccacggugugcggccccaagaaguccaccaaccuggugaagaacaagugcgucaacuucaacuucaacggccucaccgggaccggcgugcugaccgagagcaacaagaaguuccugccguuccagcaguucgggcgcgacaucgccgacacgaccgacgcggugcgcgacccccagacccuggagauccucgacaucacccccugcagcuucggcggggucuccgugaucacgccgggcaccaacaccagcaaccagguggccguccuguaccagggcgugaacugcaccgaggugcccgucgccauccacgccgaccagcugacgcccaccuggcggguguacuccaccgggagcaacguguuccagacccgcgccggcugccucaucggggcggagcacgucaacaacuccuacgagugcgacauccccaucggcgccggcaucugcgccagcuaccagacgcagaccaacuccccgcggcgcgcccggagcguggcgucccagagcgugaucgccuacaccaugucccugggggccgagaacagcgucgccuacuccaacaacagcaucgccauccccaccaacuucacgaucuccgugaccaccgagauccugcccgugagcaugaccaagacgagcgucgacugcaccauguacaucugcggcgacuccaccgagugcagcaaccuccugcugcaguacggguccuucugcacccagcucaaccgcgcgcugacgggcaucgccguggagcaggacaagaacacccaggagguguucgcccaggucaagcagaucuacaagacgcccccgaucaaggacuucgggggcuucaacuucagccagauccugcccgaccccuccaagcccagcaagcgguccuucaucgaggaccuccuguucaacaaggugacccuggccgacgccggcuucaucaagcaguacggggacugccucggcgacaucgcggcccgcgaccugaucugcgcccagaaguucaacgggcugaccgugcucccgccccugcugaccgacgagaugaucgcccaguacaccagcgcccuccuggcgggcaccaucacguccggguggaccuucggcgccggcgccgcccugcagauccccuucgcgaugcagauggccuaccgguucaacgggaucggcgucacccagaacgugcucuacgagaaccagaagcugaucgccaaccaguucaacagcgccaucgggaagauccaggacucccugagcuccaccgccagcgcgcucggcaagcugcaggacguggucaaccagaacgcccaggcccugaacacgcucgugaagcagcuguccagcaacuucggggccaucuccagcgugcugaacgacauccucucccgccuggacccgcccgaggccgagguccagaucgaccggcugaucaccggccgccuccagagccugcagaccuacgugacccagcagcugauccgggcggccgagauccgcgccagcgccaaccucgccgcgaccaagauguccgagugcgugcugggccagagcaagcgggucgacuucugcgggaagggcuaccaccugauguccuucccccagagcgcgccccacggggugguguuccuccacgucacguacgugcccgcccaggagaagaacuucaccaccgccccggccaucugccacgacggcaaggcccacuucccccgcgagggggucuucguguccaacggcacccacugguucgugacgcagcggaacuucuacgagccccagaucaucaccaccgacaacaccuucgucagcggcaacugcgacguggugaucgggaucgucaacaacacgguguacgacccccugcagccggagcuggacuccuucaaggaggagcucgacaaguacuucaagaaccacaccagccccgacguggaccugggcgacaucuccgggaucaacgccagcgucgugaacauccagaaggagaucgaccgccugaacgagguggccaagaaccucaacgagucccugaucgaccugcaggagcucggcaaguacgagcaguacaucaaguggcccugguacaucuggcugggcuucaucgccgggcugaucgcgaucgucaucgugaccaucaugcucugcugcaugaccagcugcugcuccugccugaagggcugcugcagcugcggguccugcugcaaguucgacgaggacgacagcgagccggugcugaagggcgucaagcuccacuacacgugaggacuaguguccaccugucccuccugggcugcuggauugucucguuuuccugccaaauaaacaggaucagcgcuuuacagaucuaaaaaaaaaaaaaaaaaaaaaaaaaaaaaaaaaaaaaaaaaaaaaaaaaaaaaaaaaaaaaaaaaaaaaaaaaaaaaaaaaaaaaaaaaaaaaaaaaaaa

SEQ ID NO: 25307 - RNA, 4096 nt, Artificial Sequence
  SARS-CoV-2/Wuhan/WIV05/2019__EPI_ISL_402128 spike protein mRNA gc (1-1273)(K986P_V987P_K986P_V987P_H69del_V70del_Y144del_N501Y_A570 D_D614G_P681H_T716I_S982A_D1118H)
aggagacccgugacccggaaguuguacggcuacgcgacuuucccucccacaaacccucgcgcccuuccuuuccuacuugggcccggcagaaagcuuaccauguucguguuccugguccuccugccccuggugagcucccagugcgugaaccucaccacccgcacgcagcugccgcccgccuacaccaacagcuucacccggggcgucuacuaccccgacaagguguuccgcuccagcgugcugcacuccacccaggaccucuuccugcccuucuucagcaacgucacgugguuccacgccaucuccgggaccaacggcaccaagcgguucgacaacccggugcugcccuucaacgacgggguguacuucgcgagcaccgagaaguccaacaucauccgcggcuggaucuucgggacgacccucgacagcaagacccagucccugcugaucgucaacaacgccaccaacguggugaucaaggucugcgaguuccaguucugcaacgaccccuuccucggcguguaccacaagaacaacaagagcuggauggaguccgaguuccggguguacagcuccgccaacaacugcacguucgaguacgucagccagcccuuccugauggaccuggagggcaagcaggggaacuucaagaaccuccgcgaguucguguucaagaacaucgacggcuacuucaagaucuacuccaagcacaccccgaucaaccuggugcgggaccugccccagggguucagcgcccucgagccccuggucgaccugcccaucggcaucaacaucacccgcuuccagacccuccuggcccugcaccgguccuaccucacgccgggggacagcagcuccggcuggaccgcgggcgccgccgccuacuacgugggguaccugcagccccgcaccuuccugcucaaguacaacgagaacggcaccaucacggacgcgguggacugcgcccuggacccccugagcgagaccaagugcacccucaaguccuucaccgucgagaaggggaucuaccagacgagcaacuuccgggugcagcccaccgaguccaucgugcgcuucccgaacaucaccaaccugugccccuucggcgaggucuucaacgccacccgguucgccagcguguacgccuggaaccgcaagcggaucuccaacugcgucgcggacuacagcgugcuguacaacuccgccagcuucuccacguucaagugcuacggcgugagccccaccaagcucaacgaccugugcuucaccaacgucuacgccgacuccuucgugauccgcggggacgaggugcggcagaucgcccccggccagaccgggaagaucgccgacuacaacuacaagcugccggacgacuucacgggcugcgucaucgcguggaacagcaacaaccucgacuccaaggucgggggcaacuacaacuaccuguaccgccuguuccgcaagagcaaccucaagcccuucgagcgggacaucuccaccgagaucuaccaggccggcagcacccccugcaacgggguggagggcuucaacugcuacuucccccugcaguccuacggguuccagccgaccuacggcgugggguaccagcccuaccggguggugguccugagcuucgagcuccugcacgcccccgccacggugugcggccccaagaaguccaccaaccuggugaagaacaagugcgucaacuucaacuucaacggccucaccgggaccggcgugcugaccgagagcaacaagaaguuccugccguuccagcaguucgggcgcgacaucgacgacacgaccgacgccgugcgcgacccccagacccuggagauccucgacaucacccccugcagcuucggcggggucuccgugaucacgccgggcaccaacaccagcaaccagguggcgguccuguaccagggcgugaacugcaccgaggugcccgucgccauccacgccgaccagcugacgcccaccuggcggguguacuccaccgggagcaacguguuccagacccgcgccggcugccucaucggggccgagcacgucaacaacuccuacgagugcgacauccccaucggcgcgggcaucugcgccagcuaccagacgcagaccaacucccaccggcgcgcccggagcguggccucccagagcaucaucgcguacaccaugucccugggggccgagaacagcguggccuacuccaacaacagcaucgccaucccgaucaacuucaccaucuccgucacgaccgagauccugcccgugagcaugaccaagaccagcguggacugcacgauguacaucugcggcgacuccaccgagugcagcaaccuccugcugcaguacggguccuucugcacccagcucaaccgcgcccugaccggcaucgcggucgagcaggacaagaacacgcaggagguguucgcccaggugaagcagaucuacaagaccccgcccaucaaggacuucgggggcuucaacuucagccagauccugcccgaccccuccaagcccagcaagcgguccuucaucgaggaccuccuguucaacaaggucacccuggccgacgccggcuucaucaagcaguacggggacugccucggcgacaucgccgcgcgcgaccugaucugcgcccagaaguucaacgggcugaccgugcugcccccgcuccugacggacgagaugaucgcccaguacaccagcgcccuccuggccggcaccaucaccuccggguggacguucggcgcgggcgccgcccugcagauccccuucgccaugcagauggcguaccgguucaacgggaucggcgugacccagaacguccucuacgagaaccagaagcugaucgccaaccaguucaacagcgccaucgggaagauccaggacucccugagcuccaccgccagcgcccucggcaagcugcaggacguggugaaccagaacgcgcaggcccugaacacccucgucaagcagcuguccagcaacuucggggccaucuccagcgugcugaacgacauccucgcccgccuggacccgcccgaggccgaggugcagaucgaccggcugaucacgggccgccuccagucccugcagaccuacgucacccagcagcugauccgggcggccgagauccgcgccagcgccaaccucgccgcgaccaagaugagcgagugcgugcugggccaguccaagcggguggacuucugcgggaagggcuaccaccugaugagcuucccccaguccgcgccccacggggucguguuccuccacgugaccuacguccccgcccaggagaagaacuucacgaccgcccccgccaucugccacgacggcaaggcccacuucccgcgcgaggggguguucgucagcaacggcacccacugguucgugacccagcggaacuucuacgagccccagaucaucacgacccacaacaccuucguguccggcaacugcgacgucgugaucgggaucgugaacaacaccgucuacgacccccugcagcccgagcuggacagcuucaaggaggagcucgacaaguacuucaagaaccacacguccccggacguggaccugggcgacaucagcgggaucaacgccuccguggucaacauccagaaggagaucgaccgccugaacgagguggccaagaaccucaacgagagccugaucgaccugcaggagcucggcaaguacgagcaguacaucaaguggcccugguacaucuggcugggcuucaucgccgggcugaucgcgaucgugauggucaccaucaugcucugcugcaugaccuccugcugcagcugccugaagggcugcugcuccugcgggagcugcugcaaguucgacgaggacgacuccgagcccgugcugaagggcgugaagcuccacuacaccugaggacuaguguccaccugucccuccugggcugcuggauugucucguuuuccugccaaauaaacaggaucagcgcuuuacagaucuaaaaaaaaaaaaaaaaaaaaaaaaaaaaaaaaaaaaaaaaaaaaaaaaaaaaaaaaaaaaaaaaaaaaaaaaaaaaaaaaaaaaaaaaaaaaaaaaaaaa

SEQ ID NO: 25308 - RNA, 4105 nt, Artificial Sequence
  SARS-CoV-2/Wuhan/WIV05/2019__EPI_ISL_402128 spike protein mRNA gc (1-1273)(K986P_V987P_K986P_V987P_K417N_E484K_N501Y_D614G)
aggagacccgugacccggaaguuguacggcuacgcgacuuucccucccacaaacccucgcgcccuuccuuuccuacuugggcccggcagaaagcuuaccauguucguguuccugguccuccugccccuggugagcucccagugcgugaaccucaccacccgcacgcagcugccgcccgccuacaccaacagcuucacccggggcgucuacuaccccgacaagguguuccgcuccagcgugcugcacuccacccaggaccucuuccugcccuucuucagcaacgucacgugguuccacgccauccacguguccgggaccaacggcaccaagcgguucgacaacccggugcugcccuucaacgacggggucuacuucgcgagcaccgagaaguccaacaucauccgcggcuggaucuucgggacgacccucgacagcaagacccagucccugcugaucgugaacaacgccaccaacguggucaucaaggugugcgaguuccaguucugcaacgaccccuuccucggcguguacuaccacaagaacaacaagagcuggauggaguccgaguuccgggucuacagcuccgccaacaacugcacguucgaguacgugagccagcccuuccugauggaccuggagggcaagcaggggaacuucaagaaccuccgcgaguucguguucaagaacaucgacggcuacuucaagaucuacuccaagcacaccccgaucaaccugguccgggaccugccccagggguucagcgcccucgagccccugguggaccugcccaucggcaucaacaucacccgcuuccagacccuccuggcccugcaccgguccuaccucacgccgggggacagcagcuccggcuggaccgcgggcgccgccgccuacuacgugggguaccugcagccccgcaccuuccugcucaaguacaacgagaacggcaccaucacggacgcggucgacugcgcccuggacccccugagcgagaccaagugcacccucaaguccuucaccguggagaaggggaucuaccagacgagcaacuuccgggugcagcccaccgaguccaucguccgcuucccgaacaucaccaaccugugccccuucggcgagguguucaacgccacccgguucgccagcgucuacgccuggaaccgcaagcggaucuccaacugcguggcggacuacagcgugcuguacaacuccgccagcuucuccacguucaagugcuacggcgucagccccaccaagcucaacgaccugugcuucaccaacguguacgccgacuccuucgugauccgcggggacgagguccggcagaucgcccccggccagaccgggaacaucgccgacuacaacuacaagcugccggacgacuucacgggcugcgugaucgcguggaacagcaacaaccucgacuccaaggucgggggcaacuacaacuaccuguaccgccuguuccgcaagagcaaccucaagcccuucgagcgggacaucuccaccgagaucuaccaggccggcagcacccccugcaacggggugaagggcuucaacugcuacuucccccugcaguccuacggguuccagccgaccuacggcgugggguaccagcccuaccggguggucgugcugagcuucgagcuccugcacgcccccgccacggugugcggccccaagaaguccaccaaccuggucaagaacaagugcgugaacuucaacuucaacggccucaccgggaccggcgugcugaccgagagcaacaagaaguuccugccguuccagcaguucgggcgcgacaucgccgacacgaccgacgcgguccgcgacccccagacccuggagauccucgacaucacccccugcagcuucggcgggguguccgugaucacgccgggcaccaacaccagcaaccaggucgccgugcuguaccagggcgugaacugcaccgagguccccguggccauccacgccgaccagcugacgcccaccuggcggguguacuccaccgggagcaacgucuuccagacccgcgccggcugccucaucggggcggagcacgugaacaacuccuacgagugcgacauccccaucggcgccggcaucugcgccagcuaccagacgcagaccaacuccccgcggcgcgcccggagcguggcgucccagagcaucaucgccuacaccaugucccugggggccgagaacagcgucgccuacuccaacaacagcaucgccauccccaccaacuucacgaucuccgugaccaccgagauccugcccgugagcaugaccaagacgagcgucgacugcaccauguacaucugcggcgacuccaccgagugcagcaaccuccugcugcaguacggguccuucugcacccagcucaaccgcgcgcugacgggcaucgccguggagcaggacaagaacacccaggagguguucgcccaggucaagcagaucuacaagacgcccccgaucaaggacuucgggggcuucaacuucagccagauccugcccgaccccuccaagcccagcaagcgguccuucaucgaggaccuccuguucaacaaggugacccuggccgacgccggcuucaucaagcaguacggggacugccucggcgacaucgcggcccgcgaccugaucugcgcccagaaguucaacgggcugaccgugcucccgccccugcugaccgacgagaugaucgcccaguacaccagcgcccuccuggcgggcaccaucacguccggguggaccuucggcgccggcgccgcccugcagauccccuucgcgaugcagauggccuaccgguucaacgggaucggcgucacccagaacgugcucuacgagaaccagaagcugaucgccaaccaguucaacagcgccaucgggaagauccaggacucccugagcuccaccgccagcgcgcucggcaagcugcaggacguggucaaccagaacgcccaggcccugaacacgcucgugaagcagcuguccagcaacuucggggccaucuccagcgugcugaacgacauccucucccgccuggacccgcccgaggccgagguccagaucgaccggcugaucaccggccgccuccagagccugcagaccuacgugacccagcagcugauccgggcggccgagauccgcgccagcgccaaccucgccgcgaccaagauguccgagugcgugcugggccagagcaagcgggucgacuucugcgggaagggcuaccaccugauguccuucccccagagcgcgccccacggggugguguuccuccacgucacguacgugcccgcccaggagaagaacuucaccaccgccccggccaucugccacgacggcaaggcccacuucccccgcgagggggucuucguguccaacggcacccacugguucgugacgcagcggaacuucuacgagccccagaucaucaccaccgacaacaccuucgucagcggcaacugcgacguggugaucgggaucgucaacaacacgguguacgacccccugcagccggagcuggacuccuucaaggaggagcucgacaaguacuucaagaaccacaccagccccgacguggaccugggcgacaucuccgggaucaacgccagcgucgugaacauccagaaggagaucgaccgccugaacgagguggccaagaaccucaacgagucccugaucgaccugcaggagcucggcaaguacgagcaguacaucaaguggcccugguacaucuggcugggcuucaucgccgggcugaucgcgaucgucauggugaccaucaugcucugcugcaugaccagcugcugcuccugccugaagggcugcugcagcugcggguccugcugcaaguucgacgaggacgacagcgagccggugcugaagggcgucaagcuccacuacacgugaggacuaguguccaccugucccuccugggcugcuggauugucucguuuuccugccaaauaaacaggaucagcgcuuuacagaucuaaaaaaaaaaaaaaaaaaaaaaaaaaaaaaaaaaaaaaaaaaaaaaaaaaaaaaaaaaaaaaaaaaaaaaaaaaaaaaaaaaaaaaaaaaaaaaaaaaaa

SEQ ID NO: 25309 - RNA, 4096 nt, Artificial Sequence
  SARS-CoV-2/Wuhan/WIV05/2019__EPI_ISL_402128 spike protein mRNA gc (1-1273)(K986P_V987P_K986P_V987P_L18F_D80A_D215G_L242del_A243del_ L244del_R246I_K417N_E484K_N501Y_D614G_A701V)
aggagacccgugacccggaaguuguacggcuacgcgacuuucccucccacaaacccucgcgcccuuccuuuccuacuugggcccggcagaaagcuuaccauguucguguuccugguccuccugccccuggugagcucccagugcgugaacuucaccacccgcacgcagcucccgcccgccuacaccaacagcuucacccggggcgucuacuaccccgacaagguguuccgcuccagcgugcugcacuccacccaggaccuguuccuccccuucuucagcaacgucacgugguuccacgccauccacguguccgggaccaacggcaccaagcgguucgcgaacccggugcugcccuucaacgacggggucuacuucgccagcaccgagaaguccaacaucauccgcggcuggaucuucgggacgacccuggacagcaagacccagucccuccugaucgugaacaacgccaccaacguggucaucaaggugugcgaguuccaguucugcaacgaccccuuccugggcguguacuaccacaagaacaacaagagcuggauggaguccgaguuccgggucuacagcuccgccaacaacugcacguucgaguacgugagccagcccuuccucauggaccuggagggcaagcaggggaacuucaagaaccugcgcgaguucguguucaagaacaucgacggcuacuucaagaucuacuccaagcacaccccgaucaaccucguccgggggcugccccagggcuucagcgcccuggagccccucguggaccugcccaucgggaucaacaucacccgcuuccagacccugcacaucuccuaccucacgccgggcgacagcagcuccggcuggaccgcgggggccgccgccuacuacgugggcuaccugcagccccggaccuuccugcucaaguacaacgagaacgggaccaucacggacgcggucgacugcgcccuggacccccugagcgagaccaagugcacccucaaguccuucaccguggagaagggcaucuaccagacgagcaacuuccgcgugcagcccaccgaguccaucguccgguucccgaacaucaccaaccugugccccuucggcgagguguucaacgccacccgcuucgccagcgucuacgccuggaaccggaagcgcaucuccaacugcguggcggacuacagcgugcuguacaacuccgccagcuucuccacguucaagugcuacggggucagccccaccaagcucaacgaccugugcuucaccaacguguacgccgacuccuucgugauccggggcgacgagguccgccagaucgcccccgggcagaccggcaacaucgccgacuacaacuacaagcugccggacgacuucacggggugcgugaucgcguggaacagcaacaaccucgacuccaaggugggcggcaacuacaacuaccuguaccggcuguuccgcaagagcaaccucaagcccuucgagcgggacaucuccaccgagaucuaccaggccgggagcacccccugcaacggcgucaagggguucaacugcuacuucccccugcaguccuacggcuuccagccgaccuacggggugggcuaccagcccuaccgcguggucgugcugagcuucgagcuccugcacgcccccgccacggugugcggccccaagaaguccaccaaccuggucaagaacaagugcgugaacuucaacuucaacgggcucaccggcaccggggugcugaccgagagcaacaagaaguuccugccguuccagcaguucggccgggacaucgccgacacgaccgacgcgguccgcgacccccagacccucgagauccuggacaucacccccugcagcuucgggggcguguccgugaucacgccgggcaccaacaccagcaaccaggucgccgugcuguaccagggggugaacugcaccgagguccccguggccauccacgccgaccagcugacgcccaccuggcgcguguacuccaccggcagcaacgucuuccagacccgggccgggugccucaucggcgcggagcacgugaacaacuccuacgagugcgacauccccaucggcgccgggaucugcgccagcuaccagacgcagaccaacuccccgcgccgggcccgcagcguggcgucccagagcaucaucgccuacaccaugucccugggcgucgagaacagcguggccuacuccaacaacagcaucgccauccccaccaacuucacgaucuccgugaccaccgagauccugcccgucagcaugaccaagacgagcguggacugcaccauguacaucugcggggacuccaccgagugcagcaaccuccugcugcaguacggcuccuucugcacccagcucaaccgggcccugacggggaucgcgguggagcaggacaagaacacccaggaggucuucgcccaggugaagcagaucuacaagacgcccccgaucaaggacuucggcggcuucaacuucagccagauccugcccgaccccuccaagcccagcaagcgcuccuucaucgaggaccuccuguucaacaaggugacccuggccgacgccggguucaucaagcaguacggcgacugccucggggacaucgccgcgcgggaccugaucugcgcccagaaguucaacggccugaccguccucccgccccugcugaccgacgagaugaucgcccaguacaccagcgcccuccuggccgggaccaucacguccggcuggaccuucggcgcgggggccgcccugcagauccccuucgccaugcagauggcguaccgcuucaacggcaucggggugacccagaacgugcucuacgagaaccagaagcugaucgccaaccaguucaacagcgccaucggcaagauccaggacucccugagcuccaccgccagcgcccucgggaagcugcaggacgucgugaaccagaacgcgcaggcccugaacacgcucgugaagcagcuguccagcaacuucggcgccaucuccagcguccugaacgacauccucucccggcuggacccgcccgaggccgaggugcagaucgaccgccugaucaccggccggcuccagagccugcagaccuacgugacccagcagcugauccgcgccgcggagauccgggccagcgccaaccucgccgccaccaagauguccgagugcguccuggggcagagcaagcgcguggacuucugcggcaagggguaccaccugauguccuucccccagagcgcgccccacggcguggucuuccuccacgugacguacguccccgcccaggagaagaacuucaccaccgccccggccaucugccacgacgggaaggcgcacuucccccgggagggcguguucguguccaacggcacccacugguucgucacgcagcgcaacuucuacgagccccagaucaucaccaccgacaacaccuucgugagcgggaacugcgacguggucaucggcaucgugaacaacacgguguacgacccccugcagccggagcuggacuccuucaaggaggagcucgacaaguacuucaagaaccacaccagccccgacgucgaccugggggacaucuccggcaucaacgccagcguggugaacauccagaaggagaucgaccggcugaacgaggucgccaagaaccucaacgagucccugaucgaccugcaggagcucggcaaguacgagcaguacaucaaguggcccugguacaucuggcugggguucaucgccggccugaucgccaucgugauggugaccaucaugcucugcugcaugaccagcugcugcuccugccugaaggggugcugcagcugcggcuccugcugcaaguucgacgaggacgacagcgagccgguccugaagggggugaagcuccacuacacgugaggacuaguguccaccugucccuccugggcugcuggauugucucguuuuccugccaaauaaacaggaucagcgcuuuacagaucuaaaaaaaaaaaaaaaaaaaaaaaaaaaaaaaaaaaaaaaaaaaaaaaaaaaaaaaaaaaaaaaaaaaaaaaaaaaaaaaaaaaaaaaaaaaaaaaaaaaa

SEQ ID NO: 25310 - RNA, 4105 nt, Artificial Sequence
  SARS-CoV-2/Wuhan/WIV05/2019__EPI_ISL_402128 spike protein mRNA gc (1-1273)(K986P_V987P_K986P_V987P_E484K_D614G)
aggagacccgugacccggaaguuguacggcuacgcgacuuucccucccacaaacccucgcgcccuuccuuuccuacuugggcccggcagaaagcuuaccauguucguguuccugguccuccugccccuggugagcucccagugcgugaaccucaccacccgcacgcagcugccgcccgccuacaccaacagcuucacccggggcgucuacuaccccgacaagguguuccgcuccagcgugcugcacuccacccaggaccucuuccugcccuucuucagcaacgucacgugguuccacgccauccacguguccgggaccaacggcaccaagcgguucgacaacccggugcugcccuucaacgacggggucuacuucgcgagcaccgagaaguccaacaucauccgcggcuggaucuucgggacgacccucgacagcaagacccagucccugcugaucgugaacaacgccaccaacguggucaucaaggugugcgaguuccaguucugcaacgaccccuuccucggcguguacuaccacaagaacaacaagagcuggauggaguccgaguuccgggucuacagcuccgccaacaacugcacguucgaguacgugagccagcccuuccugauggaccuggagggcaagcaggggaacuucaagaaccuccgcgaguucguguucaagaacaucgacggcuacuucaagaucuacuccaagcacaccccgaucaaccugguccgggaccugccccagggguucagcgcccucgagccccugguggaccugcccaucggcaucaacaucacccgcuuccagacccuccuggcccugcaccgguccuaccucacgccgggggacagcagcuccggcuggaccgcgggcgccgccgccuacuacgugggguaccugcagccccgcaccuuccugcucaaguacaacgagaacggcaccaucacggacgcggucgacugcgcccuggacccccugagcgagaccaagugcacccucaaguccuucaccguggagaaggggaucuaccagacgagcaacuuccgggugcagcccaccgaguccaucguccgcuucccgaacaucaccaaccugugccccuucggcgagguguucaacgccacccgguucgccagcgucuacgccuggaaccgcaagcggaucuccaacugcguggcggacuacagcgugcuguacaacuccgccagcuucuccacguucaagugcuacggcgucagccccaccaagcucaacgaccugugcuucaccaacguguacgccgacuccuucgugauccgcggggacgagguccggcagaucgcccccggccagaccgggaagaucgccgacuacaacuacaagcugccggacgacuucacgggcugcgugaucgcguggaacagcaacaaccucgacuccaaggucgggggcaacuacaacuaccuguaccgccuguuccgcaagagcaaccucaagcccuucgagcgggacaucuccaccgagaucuaccaggccggcagcacccccugcaacggggugaagggcuucaacugcuacuucccccugcaguccuacggguuccagccgaccaacggcgugggguaccagcccuaccggguggucgugcugagcuucgagcuccugcacgcccccgccacggugugcggccccaagaaguccaccaaccuggucaagaacaagugcgugaacuucaacuucaacggccucaccgggaccggcgugcugaccgagagcaacaagaaguuccugccguuccagcaguucgggcgcgacaucgccgacacgaccgacgcgguccgcgacccccagacccuggagauccucgacaucacccccugcagcuucggcgggguguccgugaucacgccgggcaccaacaccagcaaccaggucgccgugcuguaccagggcgugaacugcaccgagguccccguggccauccacgccgaccagcugacgcccaccuggcggguguacuccaccgggagcaacgucuuccagacccgcgccggcugccucaucggggcggagcacgugaacaacuccuacgagugcgacauccccaucggcgccggcaucugcgccagcuaccagacgcagaccaacuccccgcggcgcgcccggagcguggcgucccagagcaucaucgccuacaccaugucccugggggccgagaacagcgucgccuacuccaacaacagcaucgccauccccaccaacuucacgaucuccgugaccaccgagauccugcccgugagcaugaccaagacgagcgucgacugcaccauguacaucugcggcgacuccaccgagugcagcaaccuccugcugcaguacggguccuucugcacccagcucaaccgcgcgcugacgggcaucgccguggagcaggacaagaacacccaggagguguucgcccaggucaagcagaucuacaagacgcccccgaucaaggacuucgggggcuucaacuucagccagauccugcccgaccccuccaagcccagcaagcgguccuucaucgaggaccuccuguucaacaaggugacccuggccgacgccggcuucaucaagcaguacggggacugccucggcgacaucgcggcccgcgaccugaucugcgcccagaaguucaacgggcugaccgugcucccgccccugcugaccgacgagaugaucgcccaguacaccagcgcccuccuggcgggcaccaucacguccggguggaccuucggcgccggcgccgcccugcagauccccuucgcgaugcagauggccuaccgguucaacgggaucggcgucacccagaacgugcucuacgagaaccagaagcugaucgccaaccaguucaacagcgccaucgggaagauccaggacucccugagcuccaccgccagcgcgcucggcaagcugcaggacguggucaaccagaacgcccaggcccugaacacgcucgugaagcagcuguccagcaacuucggggccaucuccagcgugcugaacgacauccucucccgccuggacccgcccgaggccgagguccagaucgaccggcugaucaccggccgccuccagagccugcagaccuacgugacccagcagcugauccgggcggccgagauccgcgccagcgccaaccucgccgcgaccaagauguccgagugcgugcugggccagagcaagcgggucgacuucugcgggaagggcuaccaccugauguccuucccccagagcgcgccccacggggugguguuccuccacgucacguacgugcccgcccaggagaagaacuucaccaccgccccggccaucugccacgacggcaaggcccacuucccccgcgagggggucuucguguccaacggcacccacugguucgugacgcagcggaacuucuacgagccccagaucaucaccaccgacaacaccuucgucagcggcaacugcgacguggugaucgggaucgucaacaacacgguguacgacccccugcagccggagcuggacuccuucaaggaggagcucgacaaguacuucaagaaccacaccagccccgacguggaccugggcgacaucuccgggaucaacgccagcgucgugaacauccagaaggagaucgaccgccugaacgagguggccaagaaccucaacgagucccugaucgaccugcaggagcucggcaaguacgagcaguacaucaaguggcccugguacaucuggcugggcuucaucgccgggcugaucgcgaucgucauggugaccaucaugcucugcugcaugaccagcugcugcuccugccugaagggcugcugcagcugcggguccugcugcaaguucgacgaggacgacagcgagccggugcugaagggcgucaagcuccacuacacgugaggacuaguguccaccugucccuccugggcugcuggauugucucguuuuccugccaaauaaacaggaucagcgcuuuacagaucuaaaaaaaaaaaaaaaaaaaaaaaaaaaaaaaaaaaaaaaaaaaaaaaaaaaaaaaaaaaaaaaaaaaaaaaaaaaaaaaaaaaaaaaaaaaaaaaaaaaa

SEQ ID NO: 25311 - RNA, 4105 nt, Artificial Sequence
  SARS-CoV-2/Wuhan/WIV05/2019__EPI_ISL_402128 spike protein mRNA gc (1-1273)(K986P_V987P_K986P_V987P_L18F_T20N_P26S_D138Y_R190S_K417T _E484K_N501Y_D614G_H655Y_T1027I)
aggagacccgugacccggaaguuguacggcuacgcgacuuucccucccacaaacccucgcgcccuuccuuuccuacuugggcccggcagaaagcuuaccauguucguguuccugguccuccugccccuggugagcucccagugcgugaacuucaccaaccgcacccagcucccgagcgccuacacgaacuccuucacccggggcgucuacuaccccgacaagguguuccgcagcuccgugcugcacagcacccaggaccuguuccuccccuucuucuccaacgucaccugguuccacgccauccacgugagcgggacgaacggcaccaagcgguucgacaaccccgugcugccguucaacgacggggucuacuucgcguccaccgagaaguccaacaucauccgcggcuggaucuucgggaccacgcuggacuccaagacccagagccuccugaucgugaacaacgccaccaacguggucaucaaggugugcgaguuccaguucugcaacuaccccuuccugggcguguacuaccacaagaacaacaaguccuggauggagagcgaguuccgggucuacuccagcgccaacaacugcaccuucgaguacgugucccagcccuuccucauggaccuggagggcaagcaggggaacuucaagaaccugagcgaguucguguucaagaacaucgacggcuacuucaagaucuacuccaagcacacgcccaucaaccucguccgcgaccugccgcagggguucagcgcccuggagccccucguggaccugcccaucggcaucaacaucacccgguuccagacccugcucgcccugcaccgcagcuaccugacccccggggacuccagcuccggcuggacggcgggcgccgccgccuacuacgugggguaccuccagccgcggaccuuccugcugaaguacaacgagaacggcaccaucaccgacgcggucgacugcgcccucgacccccugagcgagacgaagugcacccugaaguccuucaccguggagaaggggaucuaccagaccagcaacuuccgcgugcagcccacggaguccaucguccgguuccccaacaucaccaaccucugcccguucggcgagguguucaacgccacccgcuucgccagcgucuacgccuggaaccggaagcgcaucuccaacugcguggcggacuacagcgugcuguacaacuccgccagcuucuccaccuucaagugcuacggcgucagccccacgaagcugaacgaccucugcuucaccaacguguacgccgacuccuucgugauccgcggggacgagguccggcagaucgcccccggccagaccgggaccaucgccgacuacaacuacaagcugcccgacgacuucacgggcugcgugaucgcguggaacagcaacaaccuggacuccaaggucgggggcaacuacaacuaccucuaccggcuguuccgcaagagcaaccugaagccguucgagcgggacaucuccaccgagaucuaccaggccggcagcacccccugcaacggggugaagggcuucaacugcuacuucccccuccagagcuacggguuccagcccaccuacggcgugggguaccagccguaccgcguggucgugcuguccuucgagcugcuccacgcccccgccacggugugcggccccaagaaguccaccaaccuggucaagaacaagugcgugaacuucaacuucaacggccugaccgggaccggcgugcucaccgagagcaacaagaaguuccugcccuuccagcaguucgggcgggacaucgccgacacgaccgacgcgguccgcgacccgcagacccuggagauccuggacaucacccccugcagcuucggcgggguguccgugaucacgcccggcaccaacaccagcaaccaggucgccgugcucuaccagggcgugaacugcaccgaggucccgguggccauccacgccgaccagcugacgcccaccuggcgcguguacuccaccgggagcaacgucuuccagacccgggccggcugccugaucggggcggaguacgugaacaacuccuacgagugcgacauccccaucggcgccggcaucugcgccagcuaccagacgcagaccaacagcccccgccgggcccgcagcguggcgucccagagcaucaucgccuacaccaugucccucggggccgagaacagcgucgccuacuccaacaacagcaucgccaucccgaccaacuucacgaucagcgugaccaccgagauccugcccguguccaugaccaagacgagcgucgacugcaccauguacaucugcggcgacuccaccgagugcagcaaccugcuccugcaguacggguccuucugcacccagcugaaccgggcgcucacgggcaucgccguggagcaggacaagaacacccaggagguguucgcccaggucaagcagaucuacaagaccccgcccaucaaggacuucgggggcuucaacuucagccagauccugcccgaccccuccaagcccagcaagcgcuccuucaucgaggaccuccuguucaacaaggugacccuggccgacgccggcuucaucaagcaguacggggacugccugggcgacaucgcggcccgggaccucaucugcgcccagaaguucaacgggcugacggugcugcccccgcuccugaccgacgagaugaucgcccaguacaccagcgcccugcucgcgggcaccaucacguccggguggaccuucggcgccggcgccgcccugcagauccccuucgcgaugcagauggccuaccgcuucaacgggaucggcgucacccagaacgugcuguacgagaaccagaagcucaucgccaaccaguucaacagcgccaucgggaagauccaggacucccugagcuccaccgccagcgcgcugggcaagcuccaggacguggucaaccagaacgcccaggcccugaacacgcuggugaagcagcucuccagcaacuucggggccaucuccagcgugcugaacgacauccugagccggcucgacccgcccgaggccgagguccagaucgaccgccugaucaccggccggcugcagucccuccagaccuacgugacccagcagcugauccgcgcggccgagauccgggccagcgccaaccuggccgcgaucaagauguccgagugcgugcucggccagagcaagcgcgucgacuucugcgggaagggcuaccaccugauguccuucccccagagcgcgccccacggggugguguuccugcacgucaccuacgugcccgcccaggagaagaacuucacgaccgcccccgccaucugccacgacggcaaggcccacuucccgcgggagggggucuucguguccaacggcacccacugguucgugacccagcgcaacuucuacgagccccagaucaucacgaccgacaacaccuucgucagcggcaacugcgacguggugaucgggaucgucaacaacaccguguacgacccccuccagcccgagcuggacuccuucaaggaggagcuggacaaguacuucaagaaccacacgagcccggacguggaccucggcgacaucuccgggaucaacgccagcgucgugaacauccagaaggagaucgaccggcugaacgagguggccaagaaccugaacgagucccucaucgaccugcaggagcugggcaaguacgagcaguacaucaaguggcccugguacaucuggcucggcuucaucgccgggcugaucgcgaucgucauggugaccaucaugcugugcugcaugaccagcugcugcuccugccucaagggcugcugcagcugcggguccugcugcaaguucgacgaggacgacagcgagcccgugcugaagggcgucaagcugcacuacaccugaggacuaguguccaccugucccuccugggcugcuggauugucucguuuuccugccaaauaaacaggaucagcgcuuuacagaucuaaaaaaaaaaaaaaaaaaaaaaaaaaaaaaaaaaaaaaaaaaaaaaaaaaaaaaaaaaaaaaaaaaaaaaaaaaaaaaaaaaaaaaaaaaaaaaaaaaaa

SEQ ID NO: 25312 - RNA, 4105 nt, Artificial Sequence
  SARS-CoV-2/Wuhan/WIV05/2019__EPI_ISL_402128 spike protein mRNA gc (1-1273)(K986P_V987P_K986P_V987P_S13I_W152C_L452R_D614G)
aggagacccgugacccggaaguuguacggcuacgcgacuuucccucccacaaacccucgcgcccuuccuuuccuacuugggcccggcagaaagcuuaccauguucguguuccugguccuccugccccuggugagcauccagugcgugaaccucaccacccgcacgcagcugccgcccgccuacaccaacuccuucacccggggcgucuacuaccccgacaagguguuccgcagcuccgugcugcacagcacccaggaccucuuccugcccuucuucuccaacgucacgugguuccacgccauccacgugagcgggaccaacggcaccaagcgguucgacaacccggugcugcccuucaacgacggggucuacuucgcguccaccgagaaguccaacaucauccgcggcuggaucuucgggacgacccucgacagcaagacccagagccugcugaucgugaacaacgccaccaacguggucaucaaggugugcgaguuccaguucugcaacgaccccuuccucggcguguacuaccacaagaacaacaaguccugcauggagagcgaguuccgggucuacuccagcgccaacaacugcacguucgaguacgugucccagcccuuccugauggaccuggagggcaagcaggggaacuucaagaaccuccgcgaguucguguucaagaacaucgacggcuacuucaagaucuacagcaagcacaccccgaucaaccugguccgggaccugccccagggguucuccgcccucgagccccugguggaccugcccaucggcaucaacaucacccgcuuccagacccuccuggcccugcaccggagcuaccucacgccgggggacuccagcagcggcuggaccgcgggcgccgccgccuacuacgugggguaccugcagccccgcaccuuccugcucaaguacaacgagaacggcaccaucacggacgcggucgacugcgcccuggacccccuguccgagaccaagugcacccucaagagcuucaccguggagaaggggaucuaccagacguccaacuuccgggugcagcccaccgagagcaucguccgcuucccgaacaucaccaaccugugccccuucggcgagguguucaacgccacccgguucgccuccgucuacgccuggaaccgcaagcggaucagcaacugcguggcggacuacuccgugcuguacaacagcgccuccuucagcacguucaagugcuacggcgucucccccaccaagcucaacgaccugugcuucaccaacguguacgccgacagcuucgugauccgcggggacgagguccggcagaucgcccccggccagaccgggaagaucgccgacuacaacuacaagcugccggacgacuucacgggcugcgugaucgcguggaacuccaacaaccucgacagcaaggucgggggcaacuacaacuaccgcuaccggcuguuccgcaaguccaaccugaagcccuucgagcgggacaucagcaccgagaucuaccaggccggcuccacccccugcaacgggguggagggcuucaacugcuacuucccccuccagagcuacggguuccagccgaccaacggcgugggguaccagcccuaccgcguggucgugcuguccuucgagcugcuccacgcccccgccacggugugcggccccaagaaguccaccaaccuggucaagaacaagugcgugaacuucaacuucaacggccugaccgggaccggcgugcucaccgagagcaacaagaaguuccugccguuccagcaguucgggcgcgacaucgccgacacgaccgacgcgguccgggacccccagacccuggagauccuggacaucacccccugcagcuucggcggggugagcgugaucacgccgggcaccaacaccuccaaccaggucgccgugcucuaccagggcgugaacugcaccgagguccccguggccauccacgccgaccagcugacgcccaccuggcgcguguacagcaccggguccaacgucuuccagacccgggccggcugccugaucggggcggagcacgugaacaacagcuacgagugcgacauccccaucggcgccggcaucugcgccuccuaccagacgcagaccaacagcccgcgccgggcccgcuccguggcgagccaguccaucaucgccuacaccaugagccucggggccgagaacuccgucgccuacagcaacaacuccaucgccauccccaccaacuucacgaucagcgugaccaccgagauccugcccguguccaugaccaagacgagcgucgacugcaccauguacaucugcggcgacagcaccgagugcuccaaccugcuccugcaguacgggagcuucugcacccagcugaaccgggcgcucacgggcaucgccguggagcaggacaagaacacccaggagguguucgcccaggucaagcagaucuacaagacgcccccgaucaaggacuucgggggcuucaacuucucccagauccugcccgaccccagcaagcccuccaagcgcagcuucaucgaggaccuccuguucaacaaggugacccuggccgacgccggcuucaucaagcaguacggggacugccugggcgacaucgcggcccgggaccucaucugcgcccagaaguucaacgggcugaccgugcugccgccccuccugaccgacgagaugaucgcccaguacaccuccgcccugcucgcgggcaccaucacgagcggguggaccuucggcgccggcgccgcccugcagauccccuucgcgaugcagauggccuaccgcuucaacgggaucggcgucacccagaacgugcuguacgagaaccagaagcucaucgccaaccaguucaacuccgccaucgggaagauccaggacagccuguccagcaccgccuccgcgcugggcaagcuccaggacguggucaaccagaacgcccaggcccugaacacgcuggugaagcagcucagcuccaacuucggggccaucagcuccgugcugaacgacauccugagccggcucgacccgcccgaggccgagguccagaucgaccgccugaucaccggccggcugcagucccuccagaccuacgugacccagcagcugauccgcgcggccgagauccgggccagcgccaaccuggccgcgaccaagaugagcgagugcgugcucggccaguccaagcgcgucgacuucugcgggaagggcuaccaccugaugagcuucccccaguccgcgccccacggggugguguuccugcacgucacguacgugcccgcccaggagaagaacuucaccaccgccccggccaucugccacgacggcaaggcccacuucccccgggagggggucuucgugagcaacggcacccacugguucgugacgcagcgcaacuucuacgagccccagaucaucaccaccgacaacaccuucgucuccggcaacugcgacguggugaucgggaucgucaacaacacgguguacgacccccuccagccggagcuggacagcuucaaggaggagcuggacaaguacuucaagaaccacaccucccccgacguggaccucggcgacaucagcgggaucaacgccuccgucgugaacauccagaaggagaucgaccggcugaacgagguggccaagaaccugaacgagagccucaucgaccugcaggagcugggcaaguacgagcaguacaucaaguggcccugguacaucuggcucggcuucaucgccgggcugaucgcgaucgucauggugaccaucaugcugugcugcaugaccuccugcugcagcugccucaagggcugcugcuccugcgggagcugcugcaaguucgacgaggacgacuccgagccggugcugaagggcgucaagcugcacuacacgugaggacuaguguccaccugucccuccugggcugcuggauugucucguuuuccugccaaauaaacaggaucagcgcuuuacagaucuaaaaaaaaaaaaaaaaaaaaaaaaaaaaaaaaaaaaaaaaaaaaaaaaaaaaaaaaaaaaaaaaaaaaaaaaaaaaaaaaaaaaaaaaaaaaaaaaaaaa

SEQ ID NO: 25313 - RNA, 4105 nt, Artificial Sequence
  SARS-CoV-2/Wuhan/WIV05/2019__EPI_ISL_402128 spike protein mRNA gc (1-1273)(K986P_V987P)
aggagacccgugacccggaaguuguacggcuacgcgacuuucccucccacaaacccucgcgcccuuccuuuccuacuugggcccggcagaaagcuuaccauguucguguuccuggugcugcugccccuggugagcagccagugcgugaaccugaccacccggacccagcugccaccagccuacaccaacagcuucacccggggcgucuacuaccccgacaagguguuccggagcagcguccugcacagcacccaggaccuguuccugcccuucuucagcaacgugaccugguuccacgccauccacgugagcggcaccaacggcaccaagcgguucgacaaccccgugcugcccuucaacgacggcguguacuucgccagcaccgagaagagcaacaucauccggggcuggaucuucggcaccacccuggacagcaagacccagagccugcugaucgugaauaacgccaccaacguggugaucaaggugugcgaguuccaguucugcaacgaccccuuccugggcguguacuaccacaagaacaacaagagcuggauggagagcgaguuccggguguacagcagcgccaacaacugcaccuucgaguacgugagccagcccuuccugauggaccuggagggcaagcagggcaacuucaagaaccugcgggaguucguguucaagaacaucgacggcuacuucaagaucuacagcaagcacaccccaaucaaccuggugcgggaucugccccagggcuucucagcccuggagccccugguggaccugcccaucggcaucaacaucacccgguuccagacccugcuggcccugcaccggagcuaccugaccccaggcgacagcagcagcggguggacagcaggcgcggcugcuuacuacgugggcuaccugcagccccggaccuuccugcugaaguacaacgagaacggcaccaucaccgacgccguggacugcgcccuggacccucugagcgagaccaagugcacccugaagagcuucaccguggagaagggcaucuaccagaccagcaacuuccgggugcagcccaccgagagcaucgugcgguuccccaacaucaccaaccugugccccuucggcgagguguucaacgccacccgguucgccagcguguacgccuggaaccggaagcggaucagcaacugcguggccgacuacagcgugcuguacaacagcgccagcuucagcaccuucaagugcuacggcgugagccccaccaagcugaacgaccugugcuucaccaacguguacgccgacagcuucgugauccguggcgacgaggugcggcagaucgcacccggccagacaggcaagaucgccgacuacaacuacaagcugcccgacgacuucaccggcugcgugaucgccuggaacagcaacaaccucgacagcaaggugggcggcaacuacaacuaccuguaccggcuguuccggaagagcaaccugaagcccuucgagcgggacaucagcaccgagaucuaccaagccggcuccaccccuugcaacggcguggagggcuucaacugcuacuucccucugcagagcuacggcuuccagcccaccaacggcgugggcuaccagcccuaccgggugguggugcugagcuucgagcugcugcacgccccagccaccguguguggccccaagaagagcaccaaccuggugaagaacaagugcgugaacuucaacuucaacggccuuaccggcaccggcgugcugaccgagagcaacaagaaauuccugcccuuucagcaguucggccgggacaucgccgacaccaccgacgcugugcgggauccccagacccuggagauccuggacaucaccccuugcagcuucggcggcgugagcgugaucaccccaggcaccaacaccagcaaccagguggccgugcuguaccaggacgugaacugcaccgaggugcccguggccauccacgccgaccagcugacacccaccuggcgggucuacagcaccggcagcaacguguuccagacccgggccgguugccugaucggcgccgagcacgugaacaacagcuacgagugcgacauccccaucggcgccggcaucugugccagcuaccagacccagaccaauucaccccggagggcaaggagcguggccagccagagcaucaucgccuacaccaugagccugggcgccgagaacagcguggccuacagcaacaacagcaucgccauccccaccaacuucaccaucagcgugaccaccgagauucugcccgugagcaugaccaagaccagcguggacugcaccauguacaucugcggcgacagcaccgagugcagcaaccugcugcugcaguacggcagcuucugcacccagcugaaccgggcccugaccggcaucgccguggagcaggacaagaacacccaggagguguucgcccaggugaagcagaucuacaagaccccucccaucaaggacuucggcggcuucaacuucagccagauccugcccgaccccagcaagcccagcaagcggagcuucaucgaggaccugcuguucaacaaggugacccuagccgacgccggcuucaucaagcaguacggcgacugccucggcgacauagccgcccgggaccugaucugcgcccagaaguucaacggccugaccgugcugccuccccugcugaccgacgagaugaucgcccaguacaccagcgcccuguuagccggaaccaucaccagcggcuggacuuucggcgcuggagccgcucugcagauccccuucgccaugcagauggccuaccgguucaacggcaucggcgugacccagaacgugcuguacgagaaccagaagcugaucgccaaccaguucaacagcgccaucggcaagauccaggacagccugagcagcaccgcuagcgcccugggcaagcugcaggacguggugaaccagaacgcccaggcccugaacacccuggugaagcagcugagcagcaacuucggcgccaucagcagcgugcugaacgacauccugagccggcuggacccucccgaggccgaggugcagaucgaccggcugaucacuggccggcugcagagccugcagaccuacgugacccagcagcugauccgggccgccgagauucgggccagcgccaaccuggccgccaccaagaugagcgagugcgugcugggccagagcaagcggguggacuucugcggcaagggcuaccaccugaugagcuuuccccagagcgcaccccacggagugguguuccugcacgugaccuacgugcccgcccaggagaagaacuucaccaccgccccagccaucugccacgacggcaaggcccacuuuccccgggagggcguguucgugagcaacggcacccacugguucgugacccagcggaacuucuacgagccccagaucaucaccaccgacaacaccuucgugagcggcaacugcgacguggugaucggcaucgugaacaacaccguguacgauccccugcagcccgagcuggacagcuucaaggaggagcuggacaaguacuucaagaaucacaccagccccgacguggaccugggcgacaucagcggcaucaacgccagcguggugaacauccagaaggagaucgaucggcugaacgagguggccaagaaccugaacgagagccugaucgaccugcaggagcugggcaaguacgagcaguacaucaaguggcccugguacaucuggcugggcuucaucgccggccugaucgccaucgugauggugaccaucaugcugugcugcaugaccagcugcugcagcugccugaagggcuguugcagcugcggcagcugcugcaaguucgacgaggacgacagcgagcccgugcugaagggcgugaagcugcacuacaccugaggacuaguguccaccugucccuccugggcugcuggauugucucguuuuccugccaaauaaacaggaucagcgcuuuacagaucuaaaaaaaaaaaaaaaaaaaaaaaaaaaaaaaaaaaaaaaaaaaaaaaaaaaaaaaaaaaaaaaaaaaaaaaaaaaaaaaaaaaaaaaaaaaaaaaaaaaa

SEQ ID NO: 25314 - RNA, 4105 nt, Artificial Sequence
  SARS-CoV-2/Wuhan/WIV05/2019__EPI_ISL_402128 spike protein mRNA gc (1-1273)(K986P_V987P_ D614G)
aggagacccgugacccggaaguuguacggcuacgcgacuuucccucccacaaacccucgcgcccuuccuuuccuacuugggcccggcagaaagcuuaccauguucguguuccuggugcugcugccccuggugagcagccagugcgugaaccugaccacccggacccagcugccaccagccuacaccaacagcuucacccggggcgucuacuaccccgacaagguguuccggagcagcguccugcacagcacccaggaccuguuccugcccuucuucagcaacgugaccugguuccacgccauccacgugagcggcaccaacggcaccaagcgguucgacaaccccgugcugcccuucaacgacggcguguacuucgccagcaccgagaagagcaacaucauccggggcuggaucuucggcaccacccuggacagcaagacccagagccugcugaucgugaauaacgccaccaacguggugaucaaggugugcgaguuccaguucugcaacgaccccuuccugggcguguacuaccacaagaacaacaagagcuggauggagagcgaguuccggguguacagcagcgccaacaacugcaccuucgaguacgugagccagcccuuccugauggaccuggagggcaagcagggcaacuucaagaaccugcgggaguucguguucaagaacaucgacggcuacuucaagaucuacagcaagcacaccccaaucaaccuggugcgggaucugccccagggcuucucagcccuggagccccugguggaccugcccaucggcaucaacaucacccgguuccagacccugcuggcccugcaccggagcuaccugaccccaggcgacagcagcagcggguggacagcaggcgcggcugcuuacuacgugggcuaccugcagccccggaccuuccugcugaaguacaacgagaacggcaccaucaccgacgccguggacugcgcccuggacccucugagcgagaccaagugcacccugaagagcuucaccguggagaagggcaucuaccagaccagcaacuuccgggugcagcccaccgagagcaucgugcgguuccccaacaucaccaaccugugccccuucggcgagguguucaacgccacccgguucgccagcguguacgccuggaaccggaagcggaucagcaacugcguggccgacuacagcgugcuguacaacagcgccagcuucagcaccuucaagugcuacggcgugagccccaccaagcugaacgaccugugcuucaccaacguguacgccgacagcuucgugauccguggcgacgaggugcggcagaucgcacccggccagacaggcaagaucgccgacuacaacuacaagcugcccgacgacuucaccggcugcgugaucgccuggaacagcaacaaccucgacagcaaggugggcggcaacuacaacuaccuguaccggcuguuccggaagagcaaccugaagcccuucgagcgggacaucagcaccgagaucuaccaagccggcuccaccccuugcaacggcguggagggcuucaacugcuacuucccucugcagagcuacggcuuccagcccaccaacggcgugggcuaccagcccuaccgggugguggugcugagcuucgagcugcugcacgccccagccaccguguguggccccaagaagagcaccaaccuggugaagaacaagugcgugaacuucaacuucaacggccuuaccggcaccggcgugcugaccgagagcaacaagaaauuccugcccuuucagcaguucggccgggacaucgccgacaccaccgacgcugugcgggauccccagacccuggagauccuggacaucaccccuugcagcuucggcggcgugagcgugaucaccccaggcaccaacaccagcaaccagguggccgugcuguaccagggcgugaacugcaccgaggugcccguggccauccacgccgaccagcugacacccaccuggcgggucuacagcaccggcagcaacguguuccagacccgggccgguugccugaucggcgccgagcacgugaacaacagcuacgagugcgacauccccaucggcgccggcaucugugccagcuaccagacccagaccaauucaccccggagggcaaggagcguggccagccagagcaucaucgccuacaccaugagccugggcgccgagaacagcguggccuacagcaacaacagcaucgccauccccaccaacuucaccaucagcgugaccaccgagauucugcccgugagcaugaccaagaccagcguggacugcaccauguacaucugcggcgacagcaccgagugcagcaaccugcugcugcaguacggcagcuucugcacccagcugaaccgggcccugaccggcaucgccguggagcaggacaagaacacccaggagguguucgcccaggugaagcagaucuacaagaccccucccaucaaggacuucggcggcuucaacuucagccagauccugcccgaccccagcaagcccagcaagcggagcuucaucgaggaccugcuguucaacaaggugacccuagccgacgccggcuucaucaagcaguacggcgacugccucggcgacauagccgcccgggaccugaucugcgcccagaaguucaacggccugaccgugcugccuccccugcugaccgacgagaugaucgcccaguacaccagcgcccuguuagccggaaccaucaccagcggcuggacuuucggcgcuggagccgcucugcagauccccuucgccaugcagauggccuaccgguucaacggcaucggcgugacccagaacgugcuguacgagaaccagaagcugaucgccaaccaguucaacagcgccaucggcaagauccaggacagccugagcagcaccgcuagcgcccugggcaagcugcaggacguggugaaccagaacgcccaggcccugaacacccuggugaagcagcugagcagcaacuucggcgccaucagcagcgugcugaacgacauccugagccggcuggacccucccgaggccgaggugcagaucgaccggcugaucacuggccggcugcagagccugcagaccuacgugacccagcagcugauccgggccgccgagauucgggccagcgccaaccuggccgccaccaagaugagcgagugcgugcugggccagagcaagcggguggacuucugcggcaagggcuaccaccugaugagcuuuccccagagcgcaccccacggagugguguuccugcacgugaccuacgugcccgcccaggagaagaacuucaccaccgccccagccaucugccacgacggcaaggcccacuuuccccgggagggcguguucgugagcaacggcacccacugguucgugacccagcggaacuucuacgagccccagaucaucaccaccgacaacaccuucgugagcggcaacugcgacguggugaucggcaucgugaacaacaccguguacgauccccugcagcccgagcuggacagcuucaaggaggagcuggacaaguacuucaagaaucacaccagccccgacguggaccugggcgacaucagcggcaucaacgccagcguggugaacauccagaaggagaucgaucggcugaacgagguggccaagaaccugaacgagagccugaucgaccugcaggagcugggcaaguacgagcaguacaucaaguggcccugguacaucuggcugggcuucaucgccggccugaucgccaucgugauggugaccaucaugcugugcugcaugaccagcugcugcagcugccugaagggcuguugcagcugcggcagcugcugcaaguucgacgaggacgacagcgagcccgugcugaagggcgugaagcugcacuacaccugaggacuaguguccaccugucccuccugggcugcuggauugucucguuuuccugccaaauaaacaggaucagcgcuuuacagaucuaaaaaaaaaaaaaaaaaaaaaaaaaaaaaaaaaaaaaaaaaaaaaaaaaaaaaaaaaaaaaaaaaaaaaaaaaaaaaaaaaaaaaaaaaaaaaaaaaaaa

SEQ ID NO: 25315 - RNA, 4105 nt, Artificial Sequence
  SARS-CoV-2/Wuhan/WIV05/2019__EPI_ISL_402128 spike protein mRNA gc (1-1273)(K986P_V987P_A222V_D614G)
aggagacccgugacccggaaguuguacggcuacgcgacuuucccucccacaaacccucgcgcccuuccuuuccuacuugggcccggcagaaagcuuaccauguucguguuccuggugcugcugccccuggugagcagccagugcgugaaccugaccacccggacccagcugccaccagccuacaccaacagcuucacccggggcgucuacuaccccgacaagguguuccggagcagcguccugcacagcacccaggaccuguuccugcccuucuucagcaacgugaccugguuccacgccauccacgugagcggcaccaacggcaccaagcgguucgacaaccccgugcugcccuucaacgacggcguguacuucgccagcaccgagaagagcaacaucauccggggcuggaucuucggcaccacccuggacagcaagacccagagccugcugaucgugaauaacgccaccaacguggugaucaaggugugcgaguuccaguucugcaacgaccccuuccugggcguguacuaccacaagaacaacaagagcuggauggagagcgaguuccggguguacagcagcgccaacaacugcaccuucgaguacgugagccagcccuuccugauggaccuggagggcaagcagggcaacuucaagaaccugcgggaguucguguucaagaacaucgacggcuacuucaagaucuacagcaagcacaccccaaucaaccuggugcgggaucugccccagggcuucucagugcuggagccccugguggaccugcccaucggcaucaacaucacccgguuccagacccugcuggcccugcaccggagcuaccugaccccaggcgacagcagcagcggguggacagcaggcgcggcugcuuacuacgugggcuaccugcagccccggaccuuccugcugaaguacaacgagaacggcaccaucaccgacgccguggacugcgcccuggacccucugagcgagaccaagugcacccugaagagcuucaccguggagaagggcaucuaccagaccagcaacuuccgggugcagcccaccgagagcaucgugcgguuccccaacaucaccaaccugugccccuucggcgagguguucaacgccacccgguucgccagcguguacgccuggaaccggaagcggaucagcaacugcguggccgacuacagcgugcuguacaacagcgccagcuucagcaccuucaagugcuacggcgugagccccaccaagcugaacgaccugugcuucaccaacguguacgccgacagcuucgugauccguggcgacgaggugcggcagaucgcacccggccagacaggcaagaucgccgacuacaacuacaagcugcccgacgacuucaccggcugcgugaucgccuggaacagcaacaaccucgacagcaaggugggcggcaacuacaacuaccuguaccggcuguuccggaagagcaaccugaagcccuucgagcgggacaucagcaccgagaucuaccaagccggcuccaccccuugcaacggcguggagggcuucaacugcuacuucccucugcagagcuacggcuuccagcccaccaacggcgugggcuaccagcccuaccgggugguggugcugagcuucgagcugcugcacgccccagccaccguguguggccccaagaagagcaccaaccuggugaagaacaagugcgugaacuucaacuucaacggccuuaccggcaccggcgugcugaccgagagcaacaagaaauuccugcccuuucagcaguucggccgggacaucgccgacaccaccgacgcugugcgggauccccagacccuggagauccuggacaucaccccuugcagcuucggcggcgugagcgugaucaccccaggcaccaacaccagcaaccagguggccgugcuguaccagggcgugaacugcaccgaggugcccguggccauccacgccgaccagcugacacccaccuggcgggucuacagcaccggcagcaacguguuccagacccgggccgguugccugaucggcgccgagcacgugaacaacagcuacgagugcgacauccccaucggcgccggcaucugugccagcuaccagacccagaccaauucaccccggagggcaaggagcguggccagccagagcaucaucgccuacaccaugagccugggcgccgagaacagcguggccuacagcaacaacagcaucgccauccccaccaacuucaccaucagcgugaccaccgagauucugcccgugagcaugaccaagaccagcguggacugcaccauguacaucugcggcgacagcaccgagugcagcaaccugcugcugcaguacggcagcuucugcacccagcugaaccgggcccugaccggcaucgccguggagcaggacaagaacacccaggagguguucgcccaggugaagcagaucuacaagaccccucccaucaaggacuucggcggcuucaacuucagccagauccugcccgaccccagcaagcccagcaagcggagcuucaucgaggaccugcuguucaacaaggugacccuagccgacgccggcuucaucaagcaguacggcgacugccucggcgacauagccgcccgggaccugaucugcgcccagaaguucaacggccugaccgugcugccuccccugcugaccgacgagaugaucgcccaguacaccagcgcccuguuagccggaaccaucaccagcggcuggacuuucggcgcuggagccgcucugcagauccccuucgccaugcagauggccuaccgguucaacggcaucggcgugacccagaacgugcuguacgagaaccagaagcugaucgccaaccaguucaacagcgccaucggcaagauccaggacagccugagcagcaccgcuagcgcccugggcaagcugcaggacguggugaaccagaacgcccaggcccugaacacccuggugaagcagcugagcagcaacuucggcgccaucagcagcgugcugaacgacauccugagccggcuggacccucccgaggccgaggugcagaucgaccggcugaucacuggccggcugcagagccugcagaccuacgugacccagcagcugauccgggccgccgagauucgggccagcgccaaccuggccgccaccaagaugagcgagugcgugcugggccagagcaagcggguggacuucugcggcaagggcuaccaccugaugagcuuuccccagagcgcaccccacggagugguguuccugcacgugaccuacgugcccgcccaggagaagaacuucaccaccgccccagccaucugccacgacggcaaggcccacuuuccccgggagggcguguucgugagcaacggcacccacugguucgugacccagcggaacuucuacgagccccagaucaucaccaccgacaacaccuucgugagcggcaacugcgacguggugaucggcaucgugaacaacaccguguacgauccccugcagcccgagcuggacagcuucaaggaggagcuggacaaguacuucaagaaucacaccagccccgacguggaccugggcgacaucagcggcaucaacgccagcguggugaacauccagaaggagaucgaucggcugaacgagguggccaagaaccugaacgagagccugaucgaccugcaggagcugggcaaguacgagcaguacaucaaguggcccugguacaucuggcugggcuucaucgccggccugaucgccaucgugauggugaccaucaugcugugcugcaugaccagcugcugcagcugccugaagggcuguugcagcugcggcagcugcugcaaguucgacgaggacgacagcgagcccgugcugaagggcgugaagcugcacuacaccugaggacuaguguccaccugucccuccugggcugcuggauugucucguuuuccugccaaauaaacaggaucagcgcuuuacagaucuaaaaaaaaaaaaaaaaaaaaaaaaaaaaaaaaaaaaaaaaaaaaaaaaaaaaaaaaaaaaaaaaaaaaaaaaaaaaaaaaaaaaaaaaaaaaaaaaaaaa

SEQ ID NO: 25316 - RNA, 4105 nt, Artificial Sequence
  SARS-CoV-2/Wuhan/WIV05/2019__EPI_ISL_402128 spike protein mRNA gc (1-1273)(K986P_V987P_N439K_D614G)
aggagacccgugacccggaaguuguacggcuacgcgacuuucccucccacaaacccucgcgcccuuccuuuccuacuugggcccggcagaaagcuuaccauguucguguuccuggugcugcugccccuggugagcagccagugcgugaaccugaccacccggacccagcugccaccagccuacaccaacagcuucacccggggcgucuacuaccccgacaagguguuccggagcagcguccugcacagcacccaggaccuguuccugcccuucuucagcaacgugaccugguuccacgccauccacgugagcggcaccaacggcaccaagcgguucgacaaccccgugcugcccuucaacgacggcguguacuucgccagcaccgagaagagcaacaucauccggggcuggaucuucggcaccacccuggacagcaagacccagagccugcugaucgugaauaacgccaccaacguggugaucaaggugugcgaguuccaguucugcaacgaccccuuccugggcguguacuaccacaagaacaacaagagcuggauggagagcgaguuccggguguacagcagcgccaacaacugcaccuucgaguacgugagccagcccuuccugauggaccuggagggcaagcagggcaacuucaagaaccugcgggaguucguguucaagaacaucgacggcuacuucaagaucuacagcaagcacaccccaaucaaccuggugcgggaucugccccagggcuucucagcccuggagccccugguggaccugcccaucggcaucaacaucacccgguuccagacccugcuggcccugcaccggagcuaccugaccccaggcgacagcagcagcggguggacagcaggcgcggcugcuuacuacgugggcuaccugcagccccggaccuuccugcugaaguacaacgagaacggcaccaucaccgacgccguggacugcgcccuggacccucugagcgagaccaagugcacccugaagagcuucaccguggagaagggcaucuaccagaccagcaacuuccgggugcagcccaccgagagcaucgugcgguuccccaacaucaccaaccugugccccuucggcgagguguucaacgccacccgguucgccagcguguacgccuggaaccggaagcggaucagcaacugcguggccgacuacagcgugcuguacaacagcgccagcuucagcaccuucaagugcuacggcgugagccccaccaagcugaacgaccugugcuucaccaacguguacgccgacagcuucgugauccguggcgacgaggugcggcagaucgcacccggccagacaggcaagaucgccgacuacaacuacaagcugcccgacgacuucaccggcugcgugaucgccuggaacagcaagaaccucgacagcaaggugggcggcaacuacaacuaccuguaccggcuguuccggaagagcaaccugaagcccuucgagcgggacaucagcaccgagaucuaccaagccggcuccaccccuugcaacggcguggagggcuucaacugcuacuucccucugcagagcuacggcuuccagcccaccaacggcgugggcuaccagcccuaccgggugguggugcugagcuucgagcugcugcacgccccagccaccguguguggccccaagaagagcaccaaccuggugaagaacaagugcgugaacuucaacuucaacggccuuaccggcaccggcgugcugaccgagagcaacaagaaauuccugcccuuucagcaguucggccgggacaucgccgacaccaccgacgcugugcgggauccccagacccuggagauccuggacaucaccccuugcagcuucggcggcgugagcgugaucaccccaggcaccaacaccagcaaccagguggccgugcuguaccagggcgugaacugcaccgaggugcccguggccauccacgccgaccagcugacacccaccuggcgggucuacagcaccggcagcaacguguuccagacccgggccgguugccugaucggcgccgagcacgugaacaacagcuacgagugcgacauccccaucggcgccggcaucugugccagcuaccagacccagaccaauucaccccggagggcaaggagcguggccagccagagcaucaucgccuacaccaugagccugggcgccgagaacagcguggccuacagcaacaacagcaucgccauccccaccaacuucaccaucagcgugaccaccgagauucugcccgugagcaugaccaagaccagcguggacugcaccauguacaucugcggcgacagcaccgagugcagcaaccugcugcugcaguacggcagcuucugcacccagcugaaccgggcccugaccggcaucgccguggagcaggacaagaacacccaggagguguucgcccaggugaagcagaucuacaagaccccucccaucaaggacuucggcggcuucaacuucagccagauccugcccgaccccagcaagcccagcaagcggagcuucaucgaggaccugcuguucaacaaggugacccuagccgacgccggcuucaucaagcaguacggcgacugccucggcgacauagccgcccgggaccugaucugcgcccagaaguucaacggccugaccgugcugccuccccugcugaccgacgagaugaucgcccaguacaccagcgcccuguuagccggaaccaucaccagcggcuggacuuucggcgcuggagccgcucugcagauccccuucgccaugcagauggccuaccgguucaacggcaucggcgugacccagaacgugcuguacgagaaccagaagcugaucgccaaccaguucaacagcgccaucggcaagauccaggacagccugagcagcaccgcuagcgcccugggcaagcugcaggacguggugaaccagaacgcccaggcccugaacacccuggugaagcagcugagcagcaacuucggcgccaucagcagcgugcugaacgacauccugagccggcuggacccucccgaggccgaggugcagaucgaccggcugaucacuggccggcugcagagccugcagaccuacgugacccagcagcugauccgggccgccgagauucgggccagcgccaaccuggccgccaccaagaugagcgagugcgugcugggccagagcaagcggguggacuucugcggcaagggcuaccaccugaugagcuuuccccagagcgcaccccacggagugguguuccugcacgugaccuacgugcccgcccaggagaagaacuucaccaccgccccagccaucugccacgacggcaaggcccacuuuccccgggagggcguguucgugagcaacggcacccacugguucgugacccagcggaacuucuacgagccccagaucaucaccaccgacaacaccuucgugagcggcaacugcgacguggugaucggcaucgugaacaacaccguguacgauccccugcagcccgagcuggacagcuucaaggaggagcuggacaaguacuucaagaaucacaccagccccgacguggaccugggcgacaucagcggcaucaacgccagcguggugaacauccagaaggagaucgaucggcugaacgagguggccaagaaccugaacgagagccugaucgaccugcaggagcugggcaaguacgagcaguacaucaaguggcccugguacaucuggcugggcuucaucgccggccugaucgccaucgugauggugaccaucaugcugugcugcaugaccagcugcugcagcugccugaagggcuguugcagcugcggcagcugcugcaaguucgacgaggacgacagcgagcccgugcugaagggcgugaagcugcacuacaccugaggacuaguguccaccugucccuccugggcugcuggauugucucguuuuccugccaaauaaacaggaucagcgcuuuacagaucuaaaaaaaaaaaaaaaaaaaaaaaaaaaaaaaaaaaaaaaaaaaaaaaaaaaaaaaaaaaaaaaaaaaaaaaaaaaaaaaaaaaaaaaaaaaaaaaaaaaa

SEQ ID NO: 25317 - RNA, 4105 nt, Artificial Sequence
  SARS-CoV-2/Wuhan/WIV05/2019__EPI_ISL_402128 spike protein mRNA gc (1-1273)(K986P_V987P_S477N_D614G)
aggagacccgugacccggaaguuguacggcuacgcgacuuucccucccacaaacccucgcgcccuuccuuuccuacuugggcccggcagaaagcuuaccauguucguguuccuggugcugcugccccuggugagcagccagugcgugaaccugaccacccggacccagcugccaccagccuacaccaacagcuucacccggggcgucuacuaccccgacaagguguuccggagcagcguccugcacagcacccaggaccuguuccugcccuucuucagcaacgugaccugguuccacgccauccacgugagcggcaccaacggcaccaagcgguucgacaaccccgugcugcccuucaacgacggcguguacuucgccagcaccgagaagagcaacaucauccggggcuggaucuucggcaccacccuggacagcaagacccagagccugcugaucgugaauaacgccaccaacguggugaucaaggugugcgaguuccaguucugcaacgaccccuuccugggcguguacuaccacaagaacaacaagagcuggauggagagcgaguuccggguguacagcagcgccaacaacugcaccuucgaguacgugagccagcccuuccugauggaccuggagggcaagcagggcaacuucaagaaccugcgggaguucguguucaagaacaucgacggcuacuucaagaucuacagcaagcacaccccaaucaaccuggugcgggaucugccccagggcuucucagcccuggagccccugguggaccugcccaucggcaucaacaucacccgguuccagacccugcuggcccugcaccggagcuaccugaccccaggcgacagcagcagcggguggacagcaggcgcggcugcuuacuacgugggcuaccugcagccccggaccuuccugcugaaguacaacgagaacggcaccaucaccgacgccguggacugcgcccuggacccucugagcgagaccaagugcacccugaagagcuucaccguggagaagggcaucuaccagaccagcaacuuccgggugcagcccaccgagagcaucgugcgguuccccaacaucaccaaccugugccccuucggcgagguguucaacgccacccgguucgccagcguguacgccuggaaccggaagcggaucagcaacugcguggccgacuacagcgugcuguacaacagcgccagcuucagcaccuucaagugcuacggcgugagccccaccaagcugaacgaccugugcuucaccaacguguacgccgacagcuucgugauccguggcgacgaggugcggcagaucgcacccggccagacaggcaagaucgccgacuacaacuacaagcugcccgacgacuucaccggcugcgugaucgccuggaacagcaacaaccucgacagcaaggugggcggcaacuacaacuaccuguaccggcuguuccggaagagcaaccugaagcccuucgagcgggacaucagcaccgagaucuaccaagccggcaacaccccuugcaacggcguggagggcuucaacugcuacuucccucugcagagcuacggcuuccagcccaccaacggcgugggcuaccagcccuaccgggugguggugcugagcuucgagcugcugcacgccccagccaccguguguggccccaagaagagcaccaaccuggugaagaacaagugcgugaacuucaacuucaacggccuuaccggcaccggcgugcugaccgagagcaacaagaaauuccugcccuuucagcaguucggccgggacaucgccgacaccaccgacgcugugcgggauccccagacccuggagauccuggacaucaccccuugcagcuucggcggcgugagcgugaucaccccaggcaccaacaccagcaaccagguggccgugcuguaccagggcgugaacugcaccgaggugcccguggccauccacgccgaccagcugacacccaccuggcgggucuacagcaccggcagcaacguguuccagacccgggccgguugccugaucggcgccgagcacgugaacaacagcuacgagugcgacauccccaucggcgccggcaucugugccagcuaccagacccagaccaauucaccccggagggcaaggagcguggccagccagagcaucaucgccuacaccaugagccugggcgccgagaacagcguggccuacagcaacaacagcaucgccauccccaccaacuucaccaucagcgugaccaccgagauucugcccgugagcaugaccaagaccagcguggacugcaccauguacaucugcggcgacagcaccgagugcagcaaccugcugcugcaguacggcagcuucugcacccagcugaaccgggcccugaccggcaucgccguggagcaggacaagaacacccaggagguguucgcccaggugaagcagaucuacaagaccccucccaucaaggacuucggcggcuucaacuucagccagauccugcccgaccccagcaagcccagcaagcggagcuucaucgaggaccugcuguucaacaaggugacccuagccgacgccggcuucaucaagcaguacggcgacugccucggcgacauagccgcccgggaccugaucugcgcccagaaguucaacggccugaccgugcugccuccccugcugaccgacgagaugaucgcccaguacaccagcgcccuguuagccggaaccaucaccagcggcuggacuuucggcgcuggagccgcucugcagauccccuucgccaugcagauggccuaccgguucaacggcaucggcgugacccagaacgugcuguacgagaaccagaagcugaucgccaaccaguucaacagcgccaucggcaagauccaggacagccugagcagcaccgcuagcgcccugggcaagcugcaggacguggugaaccagaacgcccaggcccugaacacccuggugaagcagcugagcagcaacuucggcgccaucagcagcgugcugaacgacauccugagccggcuggacccucccgaggccgaggugcagaucgaccggcugaucacuggccggcugcagagccugcagaccuacgugacccagcagcugauccgggccgccgagauucgggccagcgccaaccuggccgccaccaagaugagcgagugcgugcugggccagagcaagcggguggacuucugcggcaagggcuaccaccugaugagcuuuccccagagcgcaccccacggagugguguuccugcacgugaccuacgugcccgcccaggagaagaacuucaccaccgccccagccaucugccacgacggcaaggcccacuuuccccgggagggcguguucgugagcaacggcacccacugguucgugacccagcggaacuucuacgagccccagaucaucaccaccgacaacaccuucgugagcggcaacugcgacguggugaucggcaucgugaacaacaccguguacgauccccugcagcccgagcuggacagcuucaaggaggagcuggacaaguacuucaagaaucacaccagccccgacguggaccugggcgacaucagcggcaucaacgccagcguggugaacauccagaaggagaucgaucggcugaacgagguggccaagaaccugaacgagagccugaucgaccugcaggagcugggcaaguacgagcaguacaucaaguggcccugguacaucuggcugggcuucaucgccggccugaucgccaucgugauggugaccaucaugcugugcugcaugaccagcugcugcagcugccugaagggcuguugcagcugcggcagcugcugcaaguucgacgaggacgacagcgagcccgugcugaagggcgugaagcugcacuacaccugaggacuaguguccaccugucccuccugggcugcuggauugucucguuuuccugccaaauaaacaggaucagcgcuuuacagaucuaaaaaaaaaaaaaaaaaaaaaaaaaaaaaaaaaaaaaaaaaaaaaaaaaaaaaaaaaaaaaaaaaaaaaaaaaaaaaaaaaaaaaaaaaaaaaaaaaaaa

SEQ ID NO: 25318 - RNA, 4105 nt, Artificial Sequence
  SARS-CoV-2/Wuhan/WIV05/2019__EPI_ISL_402128 spike protein mRNA gc (1-1273)(K986P_V987P_N501Y_D614G)
aggagacccgugacccggaaguuguacggcuacgcgacuuucccucccacaaacccucgcgcccuuccuuuccuacuugggcccggcagaaagcuuaccauguucguguuccuggugcugcugccccuggugagcagccagugcgugaaccugaccacccggacccagcugccaccagccuacaccaacagcuucacccggggcgucuacuaccccgacaagguguuccggagcagcguccugcacagcacccaggaccuguuccugcccuucuucagcaacgugaccugguuccacgccauccacgugagcggcaccaacggcaccaagcgguucgacaaccccgugcugcccuucaacgacggcguguacuucgccagcaccgagaagagcaacaucauccggggcuggaucuucggcaccacccuggacagcaagacccagagccugcugaucgugaauaacgccaccaacguggugaucaaggugugcgaguuccaguucugcaacgaccccuuccugggcguguacuaccacaagaacaacaagagcuggauggagagcgaguuccggguguacagcagcgccaacaacugcaccuucgaguacgugagccagcccuuccugauggaccuggagggcaagcagggcaacuucaagaaccugcgggaguucguguucaagaacaucgacggcuacuucaagaucuacagcaagcacaccccaaucaaccuggugcgggaucugccccagggcuucucagcccuggagccccugguggaccugcccaucggcaucaacaucacccgguuccagacccugcuggcccugcaccggagcuaccugaccccaggcgacagcagcagcggguggacagcaggcgcggcugcuuacuacgugggcuaccugcagccccggaccuuccugcugaaguacaacgagaacggcaccaucaccgacgccguggacugcgcccuggacccucugagcgagaccaagugcacccugaagagcuucaccguggagaagggcaucuaccagaccagcaacuuccgggugcagcccaccgagagcaucgugcgguuccccaacaucaccaaccugugccccuucggcgagguguucaacgccacccgguucgccagcguguacgccuggaaccggaagcggaucagcaacugcguggccgacuacagcgugcuguacaacagcgccagcuucagcaccuucaagugcuacggcgugagccccaccaagcugaacgaccugugcuucaccaacguguacgccgacagcuucgugauccguggcgacgaggugcggcagaucgcacccggccagacaggcaagaucgccgacuacaacuacaagcugcccgacgacuucaccggcugcgugaucgccuggaacagcaacaaccucgacagcaaggugggcggcaacuacaacuaccuguaccggcuguuccggaagagcaaccugaagcccuucgagcgggacaucagcaccgagaucuaccaagccggcuccaccccuugcaacggcguggagggcuucaacugcuacuucccucugcagagcuacggcuuccagcccaccuacggcgugggcuaccagcccuaccgggugguggugcugagcuucgagcugcugcacgccccagccaccguguguggccccaagaagagcaccaaccuggugaagaacaagugcgugaacuucaacuucaacggccuuaccggcaccggcgugcugaccgagagcaacaagaaauuccugcccuuucagcaguucggccgggacaucgccgacaccaccgacgcugugcgggauccccagacccuggagauccuggacaucaccccuugcagcuucggcggcgugagcgugaucaccccaggcaccaacaccagcaaccagguggccgugcuguaccagggcgugaacugcaccgaggugcccguggccauccacgccgaccagcugacacccaccuggcgggucuacagcaccggcagcaacguguuccagacccgggccgguugccugaucggcgccgagcacgugaacaacagcuacgagugcgacauccccaucggcgccggcaucugugccagcuaccagacccagaccaauucaccccggagggcaaggagcguggccagccagagcaucaucgccuacaccaugagccugggcgccgagaacagcguggccuacagcaacaacagcaucgccauccccaccaacuucaccaucagcgugaccaccgagauucugcccgugagcaugaccaagaccagcguggacugcaccauguacaucugcggcgacagcaccgagugcagcaaccugcugcugcaguacggcagcuucugcacccagcugaaccgggcccugaccggcaucgccguggagcaggacaagaacacccaggagguguucgcccaggugaagcagaucuacaagaccccucccaucaaggacuucggcggcuucaacuucagccagauccugcccgaccccagcaagcccagcaagcggagcuucaucgaggaccugcuguucaacaaggugacccuagccgacgccggcuucaucaagcaguacggcgacugccucggcgacauagccgcccgggaccugaucugcgcccagaaguucaacggccugaccgugcugccuccccugcugaccgacgagaugaucgcccaguacaccagcgcccuguuagccggaaccaucaccagcggcuggacuuucggcgcuggagccgcucugcagauccccuucgccaugcagauggccuaccgguucaacggcaucggcgugacccagaacgugcuguacgagaaccagaagcugaucgccaaccaguucaacagcgccaucggcaagauccaggacagccugagcagcaccgcuagcgcccugggcaagcugcaggacguggugaaccagaacgcccaggcccugaacacccuggugaagcagcugagcagcaacuucggcgccaucagcagcgugcugaacgacauccugagccggcuggacccucccgaggccgaggugcagaucgaccggcugaucacuggccggcugcagagccugcagaccuacgugacccagcagcugauccgggccgccgagauucgggccagcgccaaccuggccgccaccaagaugagcgagugcgugcugggccagagcaagcggguggacuucugcggcaagggcuaccaccugaugagcuuuccccagagcgcaccccacggagugguguuccugcacgugaccuacgugcccgcccaggagaagaacuucaccaccgccccagccaucugccacgacggcaaggcccacuuuccccgggagggcguguucgugagcaacggcacccacugguucgugacccagcggaacuucuacgagccccagaucaucaccaccgacaacaccuucgugagcggcaacugcgacguggugaucggcaucgugaacaacaccguguacgauccccugcagcccgagcuggacagcuucaaggaggagcuggacaaguacuucaagaaucacaccagccccgacguggaccugggcgacaucagcggcaucaacgccagcguggugaacauccagaaggagaucgaucggcugaacgagguggccaagaaccugaacgagagccugaucgaccugcaggagcugggcaaguacgagcaguacaucaaguggcccugguacaucuggcugggcuucaucgccggccugaucgccaucgugauggugaccaucaugcugugcugcaugaccagcugcugcagcugccugaagggcuguugcagcugcggcagcugcugcaaguucgacgaggacgacagcgagcccgugcugaagggcgugaagcugcacuacaccugaggacuaguguccaccugucccuccugggcugcuggauugucucguuuuccugccaaauaaacaggaucagcgcuuuacagaucuaaaaaaaaaaaaaaaaaaaaaaaaaaaaaaaaaaaaaaaaaaaaaaaaaaaaaaaaaaaaaaaaaaaaaaaaaaaaaaaaaaaaaaaaaaaaaaaaaaaa

SEQ ID NO: 25319 - RNA, 4099 nt, Artificial Sequence
  SARS-CoV-2/Wuhan/WIV05/2019__EPI_ISL_402128 spike protein mRNA gc (1-1273)(K986P_V987P_H69del_V70del_D614G)
aggagacccgugacccggaaguuguacggcuacgcgacuuucccucccacaaacccucgcgcccuuccuuuccuacuugggcccggcagaaagcuuaccauguucguguuccuggugcugcugccccuggugagcagccagugcgugaaccugaccacccggacccagcugccaccagccuacaccaacagcuucacccggggcgucuacuaccccgacaagguguuccggagcagcguccugcacagcacccaggaccuguuccugcccuucuucagcaacgugaccugguuccacgccaucagcggcaccaacggcaccaagcgguucgacaaccccgugcugcccuucaacgacggcguguacuucgccagcaccgagaagagcaacaucauccggggcuggaucuucggcaccacccuggacagcaagacccagagccugcugaucgugaauaacgccaccaacguggugaucaaggugugcgaguuccaguucugcaacgaccccuuccugggcguguacuaccacaagaacaacaagagcuggauggagagcgaguuccggguguacagcagcgccaacaacugcaccuucgaguacgugagccagcccuuccugauggaccuggagggcaagcagggcaacuucaagaaccugcgggaguucguguucaagaacaucgacggcuacuucaagaucuacagcaagcacaccccaaucaaccuggugcgggaucugccccagggcuucucagcccuggagccccugguggaccugcccaucggcaucaacaucacccgguuccagacccugcuggcccugcaccggagcuaccugaccccaggcgacagcagcagcggguggacagcaggcgcggcugcuuacuacgugggcuaccugcagccccggaccuuccugcugaaguacaacgagaacggcaccaucaccgacgccguggacugcgcccuggacccucugagcgagaccaagugcacccugaagagcuucaccguggagaagggcaucuaccagaccagcaacuuccgggugcagcccaccgagagcaucgugcgguuccccaacaucaccaaccugugccccuucggcgagguguucaacgccacccgguucgccagcguguacgccuggaaccggaagcggaucagcaacugcguggccgacuacagcgugcuguacaacagcgccagcuucagcaccuucaagugcuacggcgugagccccaccaagcugaacgaccugugcuucaccaacguguacgccgacagcuucgugauccguggcgacgaggugcggcagaucgcacccggccagacaggcaagaucgccgacuacaacuacaagcugcccgacgacuucaccggcugcgugaucgccuggaacagcaacaaccucgacagcaaggugggcggcaacuacaacuaccuguaccggcuguuccggaagagcaaccugaagcccuucgagcgggacaucagcaccgagaucuaccaagccggcuccaccccuugcaacggcguggagggcuucaacugcuacuucccucugcagagcuacggcuuccagcccaccaacggcgugggcuaccagcccuaccgggugguggugcugagcuucgagcugcugcacgccccagccaccguguguggccccaagaagagcaccaaccuggugaagaacaagugcgugaacuucaacuucaacggccuuaccggcaccggcgugcugaccgagagcaacaagaaauuccugcccuuucagcaguucggccgggacaucgccgacaccaccgacgcugugcgggauccccagacccuggagauccuggacaucaccccuugcagcuucggcggcgugagcgugaucaccccaggcaccaacaccagcaaccagguggccgugcuguaccagggcgugaacugcaccgaggugcccguggccauccacgccgaccagcugacacccaccuggcgggucuacagcaccggcagcaacguguuccagacccgggccgguugccugaucggcgccgagcacgugaacaacagcuacgagugcgacauccccaucggcgccggcaucugugccagcuaccagacccagaccaauucaccccggagggcaaggagcguggccagccagagcaucaucgccuacaccaugagccugggcgccgagaacagcguggccuacagcaacaacagcaucgccauccccaccaacuucaccaucagcgugaccaccgagauucugcccgugagcaugaccaagaccagcguggacugcaccauguacaucugcggcgacagcaccgagugcagcaaccugcugcugcaguacggcagcuucugcacccagcugaaccgggcccugaccggcaucgccguggagcaggacaagaacacccaggagguguucgcccaggugaagcagaucuacaagaccccucccaucaaggacuucggcggcuucaacuucagccagauccugcccgaccccagcaagcccagcaagcggagcuucaucgaggaccugcuguucaacaaggugacccuagccgacgccggcuucaucaagcaguacggcgacugccucggcgacauagccgcccgggaccugaucugcgcccagaaguucaacggccugaccgugcugccuccccugcugaccgacgagaugaucgcccaguacaccagcgcccuguuagccggaaccaucaccagcggcuggacuuucggcgcuggagccgcucugcagauccccuucgccaugcagauggccuaccgguucaacggcaucggcgugacccagaacgugcuguacgagaaccagaagcugaucgccaaccaguucaacagcgccaucggcaagauccaggacagccugagcagcaccgcuagcgcccugggcaagcugcaggacguggugaaccagaacgcccaggcccugaacacccuggugaagcagcugagcagcaacuucggcgccaucagcagcgugcugaacgacauccugagccggcuggacccucccgaggccgaggugcagaucgaccggcugaucacuggccggcugcagagccugcagaccuacgugacccagcagcugauccgggccgccgagauucgggccagcgccaaccuggccgccaccaagaugagcgagugcgugcugggccagagcaagcggguggacuucugcggcaagggcuaccaccugaugagcuuuccccagagcgcaccccacggagugguguuccugcacgugaccuacgugcccgcccaggagaagaacuucaccaccgccccagccaucugccacgacggcaaggcccacuuuccccgggagggcguguucgugagcaacggcacccacugguucgugacccagcggaacuucuacgagccccagaucaucaccaccgacaacaccuucgugagcggcaacugcgacguggugaucggcaucgugaacaacaccguguacgauccccugcagcccgagcuggacagcuucaaggaggagcuggacaaguacuucaagaaucacaccagccccgacguggaccugggcgacaucagcggcaucaacgccagcguggugaacauccagaaggagaucgaucggcugaacgagguggccaagaaccugaacgagagccugaucgaccugcaggagcugggcaaguacgagcaguacaucaaguggcccugguacaucuggcugggcuucaucgccggccugaucgccaucgugauggugaccaucaugcugugcugcaugaccagcugcugcagcugccugaagggcuguugcagcugcggcagcugcugcaaguucgacgaggacgacagcgagcccgugcugaagggcgugaagcugcacuacaccugaggacuaguguccaccugucccuccugggcugcuggauugucucguuuuccugccaaauaaacaggaucagcgcuuuacagaucuaaaaaaaaaaaaaaaaaaaaaaaaaaaaaaaaaaaaaaaaaaaaaaaaaaaaaaaaaaaaaaaaaaaaaaaaaaaaaaaaaaaaaaaaaaaaaaaaaaaa

SEQ ID NO: 25320 - RNA, 4105 nt, Artificial Sequence
  SARS-CoV-2/Wuhan/WIV05/2019__EPI_ISL_402128 spike protein mRNA gc (1-1273)(K986P_V987P_Y453F_D614G)
aggagacccgugacccggaaguuguacggcuacgcgacuuucccucccacaaacccucgcgcccuuccuuuccuacuugggcccggcagaaagcuuaccauguucguguuccuggugcugcugccccuggugagcagccagugcgugaaccugaccacccggacccagcugccaccagccuacaccaacagcuucacccggggcgucuacuaccccgacaagguguuccggagcagcguccugcacagcacccaggaccuguuccugcccuucuucagcaacgugaccugguuccacgccauccacgugagcggcaccaacggcaccaagcgguucgacaaccccgugcugcccuucaacgacggcguguacuucgccagcaccgagaagagcaacaucauccggggcuggaucuucggcaccacccuggacagcaagacccagagccugcugaucgugaauaacgccaccaacguggugaucaaggugugcgaguuccaguucugcaacgaccccuuccugggcguguacuaccacaagaacaacaagagcuggauggagagcgaguuccggguguacagcagcgccaacaacugcaccuucgaguacgugagccagcccuuccugauggaccuggagggcaagcagggcaacuucaagaaccugcgggaguucguguucaagaacaucgacggcuacuucaagaucuacagcaagcacaccccaaucaaccuggugcgggaucugccccagggcuucucagcccuggagccccugguggaccugcccaucggcaucaacaucacccgguuccagacccugcuggcccugcaccggagcuaccugaccccaggcgacagcagcagcggguggacagcaggcgcggcugcuuacuacgugggcuaccugcagccccggaccuuccugcugaaguacaacgagaacggcaccaucaccgacgccguggacugcgcccuggacccucugagcgagaccaagugcacccugaagagcuucaccguggagaagggcaucuaccagaccagcaacuuccgggugcagcccaccgagagcaucgugcgguuccccaacaucaccaaccugugccccuucggcgagguguucaacgccacccgguucgccagcguguacgccuggaaccggaagcggaucagcaacugcguggccgacuacagcgugcuguacaacagcgccagcuucagcaccuucaagugcuacggcgugagccccaccaagcugaacgaccugugcuucaccaacguguacgccgacagcuucgugauccguggcgacgaggugcggcagaucgcacccggccagacaggcaagaucgccgacuacaacuacaagcugcccgacgacuucaccggcugcgugaucgccuggaacagcaacaaccucgacagcaaggugggcggcaacuacaacuaccuguuccggcuguuccggaagagcaaccugaagcccuucgagcgggacaucagcaccgagaucuaccaagccggcuccaccccuugcaacggcguggagggcuucaacugcuacuucccucugcagagcuacggcuuccagcccaccaacggcgugggcuaccagcccuaccgggugguggugcugagcuucgagcugcugcacgccccagccaccguguguggccccaagaagagcaccaaccuggugaagaacaagugcgugaacuucaacuucaacggccuuaccggcaccggcgugcugaccgagagcaacaagaaauuccugcccuuucagcaguucggccgggacaucgccgacaccaccgacgcugugcgggauccccagacccuggagauccuggacaucaccccuugcagcuucggcggcgugagcgugaucaccccaggcaccaacaccagcaaccagguggccgugcuguaccagggcgugaacugcaccgaggugcccguggccauccacgccgaccagcugacacccaccuggcgggucuacagcaccggcagcaacguguuccagacccgggccgguugccugaucggcgccgagcacgugaacaacagcuacgagugcgacauccccaucggcgccggcaucugugccagcuaccagacccagaccaauucaccccggagggcaaggagcguggccagccagagcaucaucgccuacaccaugagccugggcgccgagaacagcguggccuacagcaacaacagcaucgccauccccaccaacuucaccaucagcgugaccaccgagauucugcccgugagcaugaccaagaccagcguggacugcaccauguacaucugcggcgacagcaccgagugcagcaaccugcugcugcaguacggcagcuucugcacccagcugaaccgggcccugaccggcaucgccguggagcaggacaagaacacccaggagguguucgcccaggugaagcagaucuacaagaccccucccaucaaggacuucggcggcuucaacuucagccagauccugcccgaccccagcaagcccagcaagcggagcuucaucgaggaccugcuguucaacaaggugacccuagccgacgccggcuucaucaagcaguacggcgacugccucggcgacauagccgcccgggaccugaucugcgcccagaaguucaacggccugaccgugcugccuccccugcugaccgacgagaugaucgcccaguacaccagcgcccuguuagccggaaccaucaccagcggcuggacuuucggcgcuggagccgcucugcagauccccuucgccaugcagauggccuaccgguucaacggcaucggcgugacccagaacgugcuguacgagaaccagaagcugaucgccaaccaguucaacagcgccaucggcaagauccaggacagccugagcagcaccgcuagcgcccugggcaagcugcaggacguggugaaccagaacgcccaggcccugaacacccuggugaagcagcugagcagcaacuucggcgccaucagcagcgugcugaacgacauccugagccggcuggacccucccgaggccgaggugcagaucgaccggcugaucacuggccggcugcagagccugcagaccuacgugacccagcagcugauccgggccgccgagauucgggccagcgccaaccuggccgccaccaagaugagcgagugcgugcugggccagagcaagcggguggacuucugcggcaagggcuaccaccugaugagcuuuccccagagcgcaccccacggagugguguuccugcacgugaccuacgugcccgcccaggagaagaacuucaccaccgccccagccaucugccacgacggcaaggcccacuuuccccgggagggcguguucgugagcaacggcacccacugguucgugacccagcggaacuucuacgagccccagaucaucaccaccgacaacaccuucgugagcggcaacugcgacguggugaucggcaucgugaacaacaccguguacgauccccugcagcccgagcuggacagcuucaaggaggagcuggacaaguacuucaagaaucacaccagccccgacguggaccugggcgacaucagcggcaucaacgccagcguggugaacauccagaaggagaucgaucggcugaacgagguggccaagaaccugaacgagagccugaucgaccugcaggagcugggcaaguacgagcaguacaucaaguggcccugguacaucuggcugggcuucaucgccggccugaucgccaucgugauggugaccaucaugcugugcugcaugaccagcugcugcagcugccugaagggcuguugcagcugcggcagcugcugcaaguucgacgaggacgacagcgagcccgugcugaagggcgugaagcugcacuacaccugaggacuaguguccaccugucccuccugggcugcuggauugucucguuuuccugccaaauaaacaggaucagcgcuuuacagaucuaaaaaaaaaaaaaaaaaaaaaaaaaaaaaaaaaaaaaaaaaaaaaaaaaaaaaaaaaaaaaaaaaaaaaaaaaaaaaaaaaaaaaaaaaaaaaaaaaaaa

SEQ ID NO: 25321 - RNA, 4105 nt, Artificial Sequence
  SARS-CoV-2/Wuhan/WIV05/2019__EPI_ISL_402128 spike protein mRNA gc (1-1273)(K986P_V987P_D614G_I692V)
aggagacccgugacccggaaguuguacggcuacgcgacuuucccucccacaaacccucgcgcccuuccuuuccuacuugggcccggcagaaagcuuaccauguucguguuccuggugcugcugccccuggugagcagccagugcgugaaccugaccacccggacccagcugccaccagccuacaccaacagcuucacccggggcgucuacuaccccgacaagguguuccggagcagcguccugcacagcacccaggaccuguuccugcccuucuucagcaacgugaccugguuccacgccauccacgugagcggcaccaacggcaccaagcgguucgacaaccccgugcugcccuucaacgacggcguguacuucgccagcaccgagaagagcaacaucauccggggcuggaucuucggcaccacccuggacagcaagacccagagccugcugaucgugaauaacgccaccaacguggugaucaaggugugcgaguuccaguucugcaacgaccccuuccugggcguguacuaccacaagaacaacaagagcuggauggagagcgaguuccggguguacagcagcgccaacaacugcaccuucgaguacgugagccagcccuuccugauggaccuggagggcaagcagggcaacuucaagaaccugcgggaguucguguucaagaacaucgacggcuacuucaagaucuacagcaagcacaccccaaucaaccuggugcgggaucugccccagggcuucucagcccuggagccccugguggaccugcccaucggcaucaacaucacccgguuccagacccugcuggcccugcaccggagcuaccugaccccaggcgacagcagcagcggguggacagcaggcgcggcugcuuacuacgugggcuaccugcagccccggaccuuccugcugaaguacaacgagaacggcaccaucaccgacgccguggacugcgcccuggacccucugagcgagaccaagugcacccugaagagcuucaccguggagaagggcaucuaccagaccagcaacuuccgggugcagcccaccgagagcaucgugcgguuccccaacaucaccaaccugugccccuucggcgagguguucaacgccacccgguucgccagcguguacgccuggaaccggaagcggaucagcaacugcguggccgacuacagcgugcuguacaacagcgccagcuucagcaccuucaagugcuacggcgugagccccaccaagcugaacgaccugugcuucaccaacguguacgccgacagcuucgugauccguggcgacgaggugcggcagaucgcacccggccagacaggcaagaucgccgacuacaacuacaagcugcccgacgacuucaccggcugcgugaucgccuggaacagcaacaaccucgacagcaaggugggcggcaacuacaacuaccuguaccggcuguuccggaagagcaaccugaagcccuucgagcgggacaucagcaccgagaucuaccaagccggcuccaccccuugcaacggcguggagggcuucaacugcuacuucccucugcagagcuacggcuuccagcccaccaacggcgugggcuaccagcccuaccgggugguggugcugagcuucgagcugcugcacgccccagccaccguguguggccccaagaagagcaccaaccuggugaagaacaagugcgugaacuucaacuucaacggccuuaccggcaccggcgugcugaccgagagcaacaagaaauuccugcccuuucagcaguucggccgggacaucgccgacaccaccgacgcugugcgggauccccagacccuggagauccuggacaucaccccuugcagcuucggcggcgugagcgugaucaccccaggcaccaacaccagcaaccagguggccgugcuguaccagggcgugaacugcaccgaggugcccguggccauccacgccgaccagcugacacccaccuggcgggucuacagcaccggcagcaacguguuccagacccgggccgguugccugaucggcgccgagcacgugaacaacagcuacgagugcgacauccccaucggcgccggcaucugugccagcuaccagacccagaccaauucaccccggagggcaaggagcguggccagccagagcgugaucgccuacaccaugagccugggcgccgagaacagcguggccuacagcaacaacagcaucgccauccccaccaacuucaccaucagcgugaccaccgagauucugcccgugagcaugaccaagaccagcguggacugcaccauguacaucugcggcgacagcaccgagugcagcaaccugcugcugcaguacggcagcuucugcacccagcugaaccgggcccugaccggcaucgccguggagcaggacaagaacacccaggagguguucgcccaggugaagcagaucuacaagaccccucccaucaaggacuucggcggcuucaacuucagccagauccugcccgaccccagcaagcccagcaagcggagcuucaucgaggaccugcuguucaacaaggugacccuagccgacgccggcuucaucaagcaguacggcgacugccucggcgacauagccgcccgggaccugaucugcgcccagaaguucaacggccugaccgugcugccuccccugcugaccgacgagaugaucgcccaguacaccagcgcccuguuagccggaaccaucaccagcggcuggacuuucggcgcuggagccgcucugcagauccccuucgccaugcagauggccuaccgguucaacggcaucggcgugacccagaacgugcuguacgagaaccagaagcugaucgccaaccaguucaacagcgccaucggcaagauccaggacagccugagcagcaccgcuagcgcccugggcaagcugcaggacguggugaaccagaacgcccaggcccugaacacccuggugaagcagcugagcagcaacuucggcgccaucagcagcgugcugaacgacauccugagccggcuggacccucccgaggccgaggugcagaucgaccggcugaucacuggccggcugcagagccugcagaccuacgugacccagcagcugauccgggccgccgagauucgggccagcgccaaccuggccgccaccaagaugagcgagugcgugcugggccagagcaagcggguggacuucugcggcaagggcuaccaccugaugagcuuuccccagagcgcaccccacggagugguguuccugcacgugaccuacgugcccgcccaggagaagaacuucaccaccgccccagccaucugccacgacggcaaggcccacuuuccccgggagggcguguucgugagcaacggcacccacugguucgugacccagcggaacuucuacgagccccagaucaucaccaccgacaacaccuucgugagcggcaacugcgacguggugaucggcaucgugaacaacaccguguacgauccccugcagcccgagcuggacagcuucaaggaggagcuggacaaguacuucaagaaucacaccagccccgacguggaccugggcgacaucagcggcaucaacgccagcguggugaacauccagaaggagaucgaucggcugaacgagguggccaagaaccugaacgagagccugaucgaccugcaggagcugggcaaguacgagcaguacaucaaguggcccugguacaucuggcugggcuucaucgccggccugaucgccaucgugauggugaccaucaugcugugcugcaugaccagcugcugcagcugccugaagggcuguugcagcugcggcagcugcugcaaguucgacgaggacgacagcgagcccgugcugaagggcgugaagcugcacuacaccugaggacuaguguccaccugucccuccugggcugcuggauugucucguuuuccugccaaauaaacaggaucagcgcuuuacagaucuaaaaaaaaaaaaaaaaaaaaaaaaaaaaaaaaaaaaaaaaaaaaaaaaaaaaaaaaaaaaaaaaaaaaaaaaaaaaaaaaaaaaaaaaaaaaaaaaaaaa

SEQ ID NO: 25322 - RNA, 4105 nt, Artificial Sequence
  SARS-CoV-2/Wuhan/WIV05/2019__EPI_ISL_402128 spike protein mRNA gc (1-1273)(K986P_V987P_D614G_M1229I)
aggagacccgugacccggaaguuguacggcuacgcgacuuucccucccacaaacccucgcgcccuuccuuuccuacuugggcccggcagaaagcuuaccauguucguguuccuggugcugcugccccuggugagcagccagugcgugaaccugaccacccggacccagcugccaccagccuacaccaacagcuucacccggggcgucuacuaccccgacaagguguuccggagcagcguccugcacagcacccaggaccuguuccugcccuucuucagcaacgugaccugguuccacgccauccacgugagcggcaccaacggcaccaagcgguucgacaaccccgugcugcccuucaacgacggcguguacuucgccagcaccgagaagagcaacaucauccggggcuggaucuucggcaccacccuggacagcaagacccagagccugcugaucgugaauaacgccaccaacguggugaucaaggugugcgaguuccaguucugcaacgaccccuuccugggcguguacuaccacaagaacaacaagagcuggauggagagcgaguuccggguguacagcagcgccaacaacugcaccuucgaguacgugagccagcccuuccugauggaccuggagggcaagcagggcaacuucaagaaccugcgggaguucguguucaagaacaucgacggcuacuucaagaucuacagcaagcacaccccaaucaaccuggugcgggaucugccccagggcuucucagcccuggagccccugguggaccugcccaucggcaucaacaucacccgguuccagacccugcuggcccugcaccggagcuaccugaccccaggcgacagcagcagcggguggacagcaggcgcggcugcuuacuacgugggcuaccugcagccccggaccuuccugcugaaguacaacgagaacggcaccaucaccgacgccguggacugcgcccuggacccucugagcgagaccaagugcacccugaagagcuucaccguggagaagggcaucuaccagaccagcaacuuccgggugcagcccaccgagagcaucgugcgguuccccaacaucaccaaccugugccccuucggcgagguguucaacgccacccgguucgccagcguguacgccuggaaccggaagcggaucagcaacugcguggccgacuacagcgugcuguacaacagcgccagcuucagcaccuucaagugcuacggcgugagccccaccaagcugaacgaccugugcuucaccaacguguacgccgacagcuucgugauccguggcgacgaggugcggcagaucgcacccggccagacaggcaagaucgccgacuacaacuacaagcugcccgacgacuucaccggcugcgugaucgccuggaacagcaacaaccucgacagcaaggugggcggcaacuacaacuaccuguaccggcuguuccggaagagcaaccugaagcccuucgagcgggacaucagcaccgagaucuaccaagccggcuccaccccuugcaacggcguggagggcuucaacugcuacuucccucugcagagcuacggcuuccagcccaccaacggcgugggcuaccagcccuaccgggugguggugcugagcuucgagcugcugcacgccccagccaccguguguggccccaagaagagcaccaaccuggugaagaacaagugcgugaacuucaacuucaacggccuuaccggcaccggcgugcugaccgagagcaacaagaaauuccugcccuuucagcaguucggccgggacaucgccgacaccaccgacgcugugcgggauccccagacccuggagauccuggacaucaccccuugcagcuucggcggcgugagcgugaucaccccaggcaccaacaccagcaaccagguggccgugcuguaccagggcgugaacugcaccgaggugcccguggccauccacgccgaccagcugacacccaccuggcgggucuacagcaccggcagcaacguguuccagacccgggccgguugccugaucggcgccgagcacgugaacaacagcuacgagugcgacauccccaucggcgccggcaucugugccagcuaccagacccagaccaauucaccccggagggcaaggagcguggccagccagagcaucaucgccuacaccaugagccugggcgccgagaacagcguggccuacagcaacaacagcaucgccauccccaccaacuucaccaucagcgugaccaccgagauucugcccgugagcaugaccaagaccagcguggacugcaccauguacaucugcggcgacagcaccgagugcagcaaccugcugcugcaguacggcagcuucugcacccagcugaaccgggcccugaccggcaucgccguggagcaggacaagaacacccaggagguguucgcccaggugaagcagaucuacaagaccccucccaucaaggacuucggcggcuucaacuucagccagauccugcccgaccccagcaagcccagcaagcggagcuucaucgaggaccugcuguucaacaaggugacccuagccgacgccggcuucaucaagcaguacggcgacugccucggcgacauagccgcccgggaccugaucugcgcccagaaguucaacggccugaccgugcugccuccccugcugaccgacgagaugaucgcccaguacaccagcgcccuguuagccggaaccaucaccagcggcuggacuuucggcgcuggagccgcucugcagauccccuucgccaugcagauggccuaccgguucaacggcaucggcgugacccagaacgugcuguacgagaaccagaagcugaucgccaaccaguucaacagcgccaucggcaagauccaggacagccugagcagcaccgcuagcgcccugggcaagcugcaggacguggugaaccagaacgcccaggcccugaacacccuggugaagcagcugagcagcaacuucggcgccaucagcagcgugcugaacgacauccugagccggcuggacccucccgaggccgaggugcagaucgaccggcugaucacuggccggcugcagagccugcagaccuacgugacccagcagcugauccgggccgccgagauucgggccagcgccaaccuggccgccaccaagaugagcgagugcgugcugggccagagcaagcggguggacuucugcggcaagggcuaccaccugaugagcuuuccccagagcgcaccccacggagugguguuccugcacgugaccuacgugcccgcccaggagaagaacuucaccaccgccccagccaucugccacgacggcaaggcccacuuuccccgggagggcguguucgugagcaacggcacccacugguucgugacccagcggaacuucuacgagccccagaucaucaccaccgacaacaccuucgugagcggcaacugcgacguggugaucggcaucgugaacaacaccguguacgauccccugcagcccgagcuggacagcuucaaggaggagcuggacaaguacuucaagaaucacaccagccccgacguggaccugggcgacaucagcggcaucaacgccagcguggugaacauccagaaggagaucgaucggcugaacgagguggccaagaaccugaacgagagccugaucgaccugcaggagcugggcaaguacgagcaguacaucaaguggcccugguacaucuggcugggcuucaucgccggccugaucgccaucgugaucgugaccaucaugcugugcugcaugaccagcugcugcagcugccugaagggcuguugcagcugcggcagcugcugcaaguucgacgaggacgacagcgagcccgugcugaagggcgugaagcugcacuacaccugaggacuaguguccaccugucccuccugggcugcuggauugucucguuuuccugccaaauaaacaggaucagcgcuuuacagaucuaaaaaaaaaaaaaaaaaaaaaaaaaaaaaaaaaaaaaaaaaaaaaaaaaaaaaaaaaaaaaaaaaaaaaaaaaaaaaaaaaaaaaaaaaaaaaaaaaaaa

SEQ ID NO: 25323 - RNA, 4099 nt, Artificial Sequence
  SARS-CoV-2/Wuhan/WIV05/2019__EPI_ISL_402128 spike protein mRNA gc (1-1273)(K986P_V987P_H69del_V70del_A222V_Y453F_S477N_D614G_I692V)
aggagacccgugacccggaaguuguacggcuacgcgacuuucccucccacaaacccucgcgcccuuccuuuccuacuugggcccggcagaaagcuuaccauguucguguuccuggugcugcugccccuggugagcagccagugcgugaaccugaccacccggacccagcugccaccagccuacaccaacagcuucacccggggcgucuacuaccccgacaagguguuccggagcagcguccugcacagcacccaggaccuguuccugcccuucuucagcaacgugaccugguuccacgccaucagcggcaccaacggcaccaagcgguucgacaaccccgugcugcccuucaacgacggcguguacuucgccagcaccgagaagagcaacaucauccggggcuggaucuucggcaccacccuggacagcaagacccagagccugcugaucgugaauaacgccaccaacguggugaucaaggugugcgaguuccaguucugcaacgaccccuuccugggcguguacuaccacaagaacaacaagagcuggauggagagcgaguuccggguguacagcagcgccaacaacugcaccuucgaguacgugagccagcccuuccugauggaccuggagggcaagcagggcaacuucaagaaccugcgggaguucguguucaagaacaucgacggcuacuucaagaucuacagcaagcacaccccaaucaaccuggugcgggaucugccccagggcuucucagugcuggagccccugguggaccugcccaucggcaucaacaucacccgguuccagacccugcuggcccugcaccggagcuaccugaccccaggcgacagcagcagcggguggacagcaggcgcggcugcuuacuacgugggcuaccugcagccccggaccuuccugcugaaguacaacgagaacggcaccaucaccgacgccguggacugcgcccuggacccucugagcgagaccaagugcacccugaagagcuucaccguggagaagggcaucuaccagaccagcaacuuccgggugcagcccaccgagagcaucgugcgguuccccaacaucaccaaccugugccccuucggcgagguguucaacgccacccgguucgccagcguguacgccuggaaccggaagcggaucagcaacugcguggccgacuacagcgugcuguacaacagcgccagcuucagcaccuucaagugcuacggcgugagccccaccaagcugaacgaccugugcuucaccaacguguacgccgacagcuucgugauccguggcgacgaggugcggcagaucgcacccggccagacaggcaagaucgccgacuacaacuacaagcugcccgacgacuucaccggcugcgugaucgccuggaacagcaacaaccucgacagcaaggugggcggcaacuacaacuaccuguuccggcuguuccggaagagcaaccugaagcccuucgagcgggacaucagcaccgagaucuaccaagccggcaacaccccuugcaacggcguggagggcuucaacugcuacuucccucugcagagcuacggcuuccagcccaccaacggcgugggcuaccagcccuaccgggugguggugcugagcuucgagcugcugcacgccccagccaccguguguggccccaagaagagcaccaaccuggugaagaacaagugcgugaacuucaacuucaacggccuuaccggcaccggcgugcugaccgagagcaacaagaaauuccugcccuuucagcaguucggccgggacaucgccgacaccaccgacgcugugcgggauccccagacccuggagauccuggacaucaccccuugcagcuucggcggcgugagcgugaucaccccaggcaccaacaccagcaaccagguggccgugcuguaccagggcgugaacugcaccgaggugcccguggccauccacgccgaccagcugacacccaccuggcgggucuacagcaccggcagcaacguguuccagacccgggccgguugccugaucggcgccgagcacgugaacaacagcuacgagugcgacauccccaucggcgccggcaucugugccagcuaccagacccagaccaauucaccccggagggcaaggagcguggccagccagagcgugaucgccuacaccaugagccugggcgccgagaacagcguggccuacagcaacaacagcaucgccauccccaccaacuucaccaucagcgugaccaccgagauucugcccgugagcaugaccaagaccagcguggacugcaccauguacaucugcggcgacagcaccgagugcagcaaccugcugcugcaguacggcagcuucugcacccagcugaaccgggcccugaccggcaucgccguggagcaggacaagaacacccaggagguguucgcccaggugaagcagaucuacaagaccccucccaucaaggacuucggcggcuucaacuucagccagauccugcccgaccccagcaagcccagcaagcggagcuucaucgaggaccugcuguucaacaaggugacccuagccgacgccggcuucaucaagcaguacggcgacugccucggcgacauagccgcccgggaccugaucugcgcccagaaguucaacggccugaccgugcugccuccccugcugaccgacgagaugaucgcccaguacaccagcgcccuguuagccggaaccaucaccagcggcuggacuuucggcgcuggagccgcucugcagauccccuucgccaugcagauggccuaccgguucaacggcaucggcgugacccagaacgugcuguacgagaaccagaagcugaucgccaaccaguucaacagcgccaucggcaagauccaggacagccugagcagcaccgcuagcgcccugggcaagcugcaggacguggugaaccagaacgcccaggcccugaacacccuggugaagcagcugagcagcaacuucggcgccaucagcagcgugcugaacgacauccugagccggcuggacccucccgaggccgaggugcagaucgaccggcugaucacuggccggcugcagagccugcagaccuacgugacccagcagcugauccgggccgccgagauucgggccagcgccaaccuggccgccaccaagaugagcgagugcgugcugggccagagcaagcggguggacuucugcggcaagggcuaccaccugaugagcuuuccccagagcgcaccccacggagugguguuccugcacgugaccuacgugcccgcccaggagaagaacuucaccaccgccccagccaucugccacgacggcaaggcccacuuuccccgggagggcguguucgugagcaacggcacccacugguucgugacccagcggaacuucuacgagccccagaucaucaccaccgacaacaccuucgugagcggcaacugcgacguggugaucggcaucgugaacaacaccguguacgauccccugcagcccgagcuggacagcuucaaggaggagcuggacaaguacuucaagaaucacaccagccccgacguggaccugggcgacaucagcggcaucaacgccagcguggugaacauccagaaggagaucgaucggcugaacgagguggccaagaaccugaacgagagccugaucgaccugcaggagcugggcaaguacgagcaguacaucaaguggcccugguacaucuggcugggcuucaucgccggccugaucgccaucgugauggugaccaucaugcugugcugcaugaccagcugcugcagcugccugaagggcuguugcagcugcggcagcugcugcaaguucgacgaggacgacagcgagcccgugcugaagggcgugaagcugcacuacaccugaggacuaguguccaccugucccuccugggcugcuggauugucucguuuuccugccaaauaaacaggaucagcgcuuuacagaucuaaaaaaaaaaaaaaaaaaaaaaaaaaaaaaaaaaaaaaaaaaaaaaaaaaaaaaaaaaaaaaaaaaaaaaaaaaaaaaaaaaaaaaaaaaaaaaaaaaaa

SEQ ID NO: 25324 - RNA, 4099 nt, Artificial Sequence
  SARS-CoV-2/Wuhan/WIV05/2019__EPI_ISL_402128 spike protein mRNA gc (1-1273)(K986P_V987P_H69del_V70del_Y453F_D614G_I692V_M1229I)
aggagacccgugacccggaaguuguacggcuacgcgacuuucccucccacaaacccucgcgcccuuccuuuccuacuugggcccggcagaaagcuuaccauguucguguuccuggugcugcugccccuggugagcagccagugcgugaaccugaccacccggacccagcugccaccagccuacaccaacagcuucacccggggcgucuacuaccccgacaagguguuccggagcagcguccugcacagcacccaggaccuguuccugcccuucuucagcaacgugaccugguuccacgccaucagcggcaccaacggcaccaagcgguucgacaaccccgugcugcccuucaacgacggcguguacuucgccagcaccgagaagagcaacaucauccggggcuggaucuucggcaccacccuggacagcaagacccagagccugcugaucgugaauaacgccaccaacguggugaucaaggugugcgaguuccaguucugcaacgaccccuuccugggcguguacuaccacaagaacaacaagagcuggauggagagcgaguuccggguguacagcagcgccaacaacugcaccuucgaguacgugagccagcccuuccugauggaccuggagggcaagcagggcaacuucaagaaccugcgggaguucguguucaagaacaucgacggcuacuucaagaucuacagcaagcacaccccaaucaaccuggugcgggaucugccccagggcuucucagcccuggagccccugguggaccugcccaucggcaucaacaucacccgguuccagacccugcuggcccugcaccggagcuaccugaccccaggcgacagcagcagcggguggacagcaggcgcggcugcuuacuacgugggcuaccugcagccccggaccuuccugcugaaguacaacgagaacggcaccaucaccgacgccguggacugcgcccuggacccucugagcgagaccaagugcacccugaagagcuucaccguggagaagggcaucuaccagaccagcaacuuccgggugcagcccaccgagagcaucgugcgguuccccaacaucaccaaccugugccccuucggcgagguguucaacgccacccgguucgccagcguguacgccuggaaccggaagcggaucagcaacugcguggccgacuacagcgugcuguacaacagcgccagcuucagcaccuucaagugcuacggcgugagccccaccaagcugaacgaccugugcuucaccaacguguacgccgacagcuucgugauccguggcgacgaggugcggcagaucgcacccggccagacaggcaagaucgccgacuacaacuacaagcugcccgacgacuucaccggcugcgugaucgccuggaacagcaacaaccucgacagcaaggugggcggcaacuacaacuaccuguuccggcuguuccggaagagcaaccugaagcccuucgagcgggacaucagcaccgagaucuaccaagccggcuccaccccuugcaacggcguggagggcuucaacugcuacuucccucugcagagcuacggcuuccagcccaccaacggcgugggcuaccagcccuaccgggugguggugcugagcuucgagcugcugcacgccccagccaccguguguggccccaagaagagcaccaaccuggugaagaacaagugcgugaacuucaacuucaacggccuuaccggcaccggcgugcugaccgagagcaacaagaaauuccugcccuuucagcaguucggccgggacaucgccgacaccaccgacgcugugcgggauccccagacccuggagauccuggacaucaccccuugcagcuucggcggcgugagcgugaucaccccaggcaccaacaccagcaaccagguggccgugcuguaccagggcgugaacugcaccgaggugcccguggccauccacgccgaccagcugacacccaccuggcgggucuacagcaccggcagcaacguguuccagacccgggccgguugccugaucggcgccgagcacgugaacaacagcuacgagugcgacauccccaucggcgccggcaucugugccagcuaccagacccagaccaauucaccccggagggcaaggagcguggccagccagagcgugaucgccuacaccaugagccugggcgccgagaacagcguggccuacagcaacaacagcaucgccauccccaccaacuucaccaucagcgugaccaccgagauucugcccgugagcaugaccaagaccagcguggacugcaccauguacaucugcggcgacagcaccgagugcagcaaccugcugcugcaguacggcagcuucugcacccagcugaaccgggcccugaccggcaucgccguggagcaggacaagaacacccaggagguguucgcccaggugaagcagaucuacaagaccccucccaucaaggacuucggcggcuucaacuucagccagauccugcccgaccccagcaagcccagcaagcggagcuucaucgaggaccugcuguucaacaaggugacccuagccgacgccggcuucaucaagcaguacggcgacugccucggcgacauagccgcccgggaccugaucugcgcccagaaguucaacggccugaccgugcugccuccccugcugaccgacgagaugaucgcccaguacaccagcgcccuguuagccggaaccaucaccagcggcuggacuuucggcgcuggagccgcucugcagauccccuucgccaugcagauggccuaccgguucaacggcaucggcgugacccagaacgugcuguacgagaaccagaagcugaucgccaaccaguucaacagcgccaucggcaagauccaggacagccugagcagcaccgcuagcgcccugggcaagcugcaggacguggugaaccagaacgcccaggcccugaacacccuggugaagcagcugagcagcaacuucggcgccaucagcagcgugcugaacgacauccugagccggcuggacccucccgaggccgaggugcagaucgaccggcugaucacuggccggcugcagagccugcagaccuacgugacccagcagcugauccgggccgccgagauucgggccagcgccaaccuggccgccaccaagaugagcgagugcgugcugggccagagcaagcggguggacuucugcggcaagggcuaccaccugaugagcuuuccccagagcgcaccccacggagugguguuccugcacgugaccuacgugcccgcccaggagaagaacuucaccaccgccccagccaucugccacgacggcaaggcccacuuuccccgggagggcguguucgugagcaacggcacccacugguucgugacccagcggaacuucuacgagccccagaucaucaccaccgacaacaccuucgugagcggcaacugcgacguggugaucggcaucgugaacaacaccguguacgauccccugcagcccgagcuggacagcuucaaggaggagcuggacaaguacuucaagaaucacaccagccccgacguggaccugggcgacaucagcggcaucaacgccagcguggugaacauccagaaggagaucgaucggcugaacgagguggccaagaaccugaacgagagccugaucgaccugcaggagcugggcaaguacgagcaguacaucaaguggcccugguacaucuggcugggcuucaucgccggccugaucgccaucgugaucgugaccaucaugcugugcugcaugaccagcugcugcagcugccugaagggcuguugcagcugcggcagcugcugcaaguucgacgaggacgacagcgagcccgugcugaagggcgugaagcugcacuacaccugaggacuaguguccaccugucccuccugggcugcuggauugucucguuuuccugccaaauaaacaggaucagcgcuuuacagaucuaaaaaaaaaaaaaaaaaaaaaaaaaaaaaaaaaaaaaaaaaaaaaaaaaaaaaaaaaaaaaaaaaaaaaaaaaaaaaaaaaaaaaaaaaaaaaaaaaaaa

SEQ ID NO: 25325 - RNA, 4096 nt, Artificial Sequence
  SARS-CoV-2/Wuhan/WIV05/2019__EPI_ISL_402128 spike protein mRNA gc (1-1273)(K986P_V987P_K986P_V987P_H69del_V70del_Y144del_N501Y_A570 D_D614G_P681H_T716I_S982A_D1118H)
aggagacccgugacccggaaguuguacggcuacgcgacuuucccucccacaaacccucgcgcccuuccuuuccuacuugggcccggcagaaagcuuaccauguucguguuccuggugcugcugccccuggugagcagccagugcgugaaccugaccacccggacccagcugccaccagccuacaccaacagcuucacccggggcgucuacuaccccgacaagguguuccggagcagcguccugcacagcacccaggaccuguuccugcccuucuucagcaacgugaccugguuccacgccaucagcggcaccaacggcaccaagcgguucgacaaccccgugcugcccuucaacgacggcguguacuucgccagcaccgagaagagcaacaucauccggggcuggaucuucggcaccacccuggacagcaagacccagagccugcugaucgugaauaacgccaccaacguggugaucaaggugugcgaguuccaguucugcaacgaccccuuccugggcguguaccacaagaacaacaagagcuggauggagagcgaguuccggguguacagcagcgccaacaacugcaccuucgaguacgugagccagcccuuccugauggaccuggagggcaagcagggcaacuucaagaaccugcgggaguucguguucaagaacaucgacggcuacuucaagaucuacagcaagcacaccccaaucaaccuggugcgggaucugccccagggcuucucagcccuggagccccugguggaccugcccaucggcaucaacaucacccgguuccagacccugcuggcccugcaccggagcuaccugaccccaggcgacagcagcagcggguggacagcaggcgcggcugcuuacuacgugggcuaccugcagccccggaccuuccugcugaaguacaacgagaacggcaccaucaccgacgccguggacugcgcccuggacccucugagcgagaccaagugcacccugaagagcuucaccguggagaagggcaucuaccagaccagcaacuuccgggugcagcccaccgagagcaucgugcgguuccccaacaucaccaaccugugccccuucggcgagguguucaacgccacccgguucgccagcguguacgccuggaaccggaagcggaucagcaacugcguggccgacuacagcgugcuguacaacagcgccagcuucagcaccuucaagugcuacggcgugagccccaccaagcugaacgaccugugcuucaccaacguguacgccgacagcuucgugauccguggcgacgaggugcggcagaucgcacccggccagacaggcaagaucgccgacuacaacuacaagcugcccgacgacuucaccggcugcgugaucgccuggaacagcaacaaccucgacagcaaggugggcggcaacuacaacuaccuguaccggcuguuccggaagagcaaccugaagcccuucgagcgggacaucagcaccgagaucuaccaagccggcuccaccccuugcaacggcguggagggcuucaacugcuacuucccucugcagagcuacggcuuccagcccaccuacggcgugggcuaccagcccuaccgggugguggugcugagcuucgagcugcugcacgccccagccaccguguguggccccaagaagagcaccaaccuggugaagaacaagugcgugaacuucaacuucaacggccuuaccggcaccggcgugcugaccgagagcaacaagaaauuccugcccuuucagcaguucggccgggacaucgacgacaccaccgacgcugugcgggauccccagacccuggagauccuggacaucaccccuugcagcuucggcggcgugagcgugaucaccccaggcaccaacaccagcaaccagguggccgugcuguaccagggcgugaacugcaccgaggugcccguggccauccacgccgaccagcugacacccaccuggcgggucuacagcaccggcagcaacguguuccagacccgggccgguugccugaucggcgccgagcacgugaacaacagcuacgagugcgacauccccaucggcgccggcaucugugccagcuaccagacccagaccaauucacaccggagggcaaggagcguggccagccagagcaucaucgccuacaccaugagccugggcgccgagaacagcguggccuacagcaacaacagcaucgccauccccaucaacuucaccaucagcgugaccaccgagauucugcccgugagcaugaccaagaccagcguggacugcaccauguacaucugcggcgacagcaccgagugcagcaaccugcugcugcaguacggcagcuucugcacccagcugaaccgggcccugaccggcaucgccguggagcaggacaagaacacccaggagguguucgcccaggugaagcagaucuacaagaccccucccaucaaggacuucggcggcuucaacuucagccagauccugcccgaccccagcaagcccagcaagcggagcuucaucgaggaccugcuguucaacaaggugacccuagccgacgccggcuucaucaagcaguacggcgacugccucggcgacauagccgcccgggaccugaucugcgcccagaaguucaacggccugaccgugcugccuccccugcugaccgacgagaugaucgcccaguacaccagcgcccuguuagccggaaccaucaccagcggcuggacuuucggcgcuggagccgcucugcagauccccuucgccaugcagauggccuaccgguucaacggcaucggcgugacccagaacgugcuguacgagaaccagaagcugaucgccaaccaguucaacagcgccaucggcaagauccaggacagccugagcagcaccgcuagcgcccugggcaagcugcaggacguggugaaccagaacgcccaggcccugaacacccuggugaagcagcugagcagcaacuucggcgccaucagcagcgugcugaacgacauccuggcccggcuggacccucccgaggccgaggugcagaucgaccggcugaucacuggccggcugcagagccugcagaccuacgugacccagcagcugauccgggccgccgagauucgggccagcgccaaccuggccgccaccaagaugagcgagugcgugcugggccagagcaagcggguggacuucugcggcaagggcuaccaccugaugagcuuuccccagagcgcaccccacggagugguguuccugcacgugaccuacgugcccgcccaggagaagaacuucaccaccgccccagccaucugccacgacggcaaggcccacuuuccccgggagggcguguucgugagcaacggcacccacugguucgugacccagcggaacuucuacgagccccagaucaucaccacccacaacaccuucgugagcggcaacugcgacguggugaucggcaucgugaacaacaccguguacgauccccugcagcccgagcuggacagcuucaaggaggagcuggacaaguacuucaagaaucacaccagccccgacguggaccugggcgacaucagcggcaucaacgccagcguggugaacauccagaaggagaucgaucggcugaacgagguggccaagaaccugaacgagagccugaucgaccugcaggagcugggcaaguacgagcaguacaucaaguggcccugguacaucuggcugggcuucaucgccggccugaucgccaucgugauggugaccaucaugcugugcugcaugaccagcugcugcagcugccugaagggcuguugcagcugcggcagcugcugcaaguucgacgaggacgacagcgagcccgugcugaagggcgugaagcugcacuacaccugaggacuaguguccaccugucccuccugggcugcuggauugucucguuuuccugccaaauaaacaggaucagcgcuuuacagaucuaaaaaaaaaaaaaaaaaaaaaaaaaaaaaaaaaaaaaaaaaaaaaaaaaaaaaaaaaaaaaaaaaaaaaaaaaaaaaaaaaaaaaaaaaaaaaaaaaaaa

SEQ ID NO: 25326 - RNA, 4105 nt, Artificial Sequence
  SARS-CoV-2/Wuhan/WIV05/2019__EPI_ISL_402128 spike protein mRNA gc (1-1273)(K986P_V987P_K986P_V987P_K417N_E484K_N501Y_D614G)
aggagacccgugacccggaaguuguacggcuacgcgacuuucccucccacaaacccucgcgcccuuccuuuccuacuugggcccggcagaaagcuuaccauguucguguuccuggugcugcugccccuggugagcagccagugcgugaaccugaccacccggacccagcugccaccagccuacaccaacagcuucacccggggcgucuacuaccccgacaagguguuccggagcagcguccugcacagcacccaggaccuguuccugcccuucuucagcaacgugaccugguuccacgccauccacgugagcggcaccaacggcaccaagcgguucgacaaccccgugcugcccuucaacgacggcguguacuucgccagcaccgagaagagcaacaucauccggggcuggaucuucggcaccacccuggacagcaagacccagagccugcugaucgugaauaacgccaccaacguggugaucaaggugugcgaguuccaguucugcaacgaccccuuccugggcguguacuaccacaagaacaacaagagcuggauggagagcgaguuccggguguacagcagcgccaacaacugcaccuucgaguacgugagccagcccuuccugauggaccuggagggcaagcagggcaacuucaagaaccugcgggaguucguguucaagaacaucgacggcuacuucaagaucuacagcaagcacaccccaaucaaccuggugcgggaucugccccagggcuucucagcccuggagccccugguggaccugcccaucggcaucaacaucacccgguuccagacccugcuggcccugcaccggagcuaccugaccccaggcgacagcagcagcggguggacagcaggcgcggcugcuuacuacgugggcuaccugcagccccggaccuuccugcugaaguacaacgagaacggcaccaucaccgacgccguggacugcgcccuggacccucugagcgagaccaagugcacccugaagagcuucaccguggagaagggcaucuaccagaccagcaacuuccgggugcagcccaccgagagcaucgugcgguuccccaacaucaccaaccugugccccuucggcgagguguucaacgccacccgguucgccagcguguacgccuggaaccggaagcggaucagcaacugcguggccgacuacagcgugcuguacaacagcgccagcuucagcaccuucaagugcuacggcgugagccccaccaagcugaacgaccugugcuucaccaacguguacgccgacagcuucgugauccguggcgacgaggugcggcagaucgcacccggccagacaggcaacaucgccgacuacaacuacaagcugcccgacgacuucaccggcugcgugaucgccuggaacagcaacaaccucgacagcaaggugggcggcaacuacaacuaccuguaccggcuguuccggaagagcaaccugaagcccuucgagcgggacaucagcaccgagaucuaccaagccggcuccaccccuugcaacggcgugaagggcuucaacugcuacuucccucugcagagcuacggcuuccagcccaccuacggcgugggcuaccagcccuaccgggugguggugcugagcuucgagcugcugcacgccccagccaccguguguggccccaagaagagcaccaaccuggugaagaacaagugcgugaacuucaacuucaacggccuuaccggcaccggcgugcugaccgagagcaacaagaaauuccugcccuuucagcaguucggccgggacaucgccgacaccaccgacgcugugcgggauccccagacccuggagauccuggacaucaccccuugcagcuucggcggcgugagcgugaucaccccaggcaccaacaccagcaaccagguggccgugcuguaccagggcgugaacugcaccgaggugcccguggccauccacgccgaccagcugacacccaccuggcgggucuacagcaccggcagcaacguguuccagacccgggccgguugccugaucggcgccgagcacgugaacaacagcuacgagugcgacauccccaucggcgccggcaucugugccagcuaccagacccagaccaauucaccccggagggcaaggagcguggccagccagagcaucaucgccuacaccaugagccugggcgccgagaacagcguggccuacagcaacaacagcaucgccauccccaccaacuucaccaucagcgugaccaccgagauucugcccgugagcaugaccaagaccagcguggacugcaccauguacaucugcggcgacagcaccgagugcagcaaccugcugcugcaguacggcagcuucugcacccagcugaaccgggcccugaccggcaucgccguggagcaggacaagaacacccaggagguguucgcccaggugaagcagaucuacaagaccccucccaucaaggacuucggcggcuucaacuucagccagauccugcccgaccccagcaagcccagcaagcggagcuucaucgaggaccugcuguucaacaaggugacccuagccgacgccggcuucaucaagcaguacggcgacugccucggcgacauagccgcccgggaccugaucugcgcccagaaguucaacggccugaccgugcugccuccccugcugaccgacgagaugaucgcccaguacaccagcgcccuguuagccggaaccaucaccagcggcuggacuuucggcgcuggagccgcucugcagauccccuucgccaugcagauggccuaccgguucaacggcaucggcgugacccagaacgugcuguacgagaaccagaagcugaucgccaaccaguucaacagcgccaucggcaagauccaggacagccugagcagcaccgcuagcgcccugggcaagcugcaggacguggugaaccagaacgcccaggcccugaacacccuggugaagcagcugagcagcaacuucggcgccaucagcagcgugcugaacgacauccugagccggcuggacccucccgaggccgaggugcagaucgaccggcugaucacuggccggcugcagagccugcagaccuacgugacccagcagcugauccgggccgccgagauucgggccagcgccaaccuggccgccaccaagaugagcgagugcgugcugggccagagcaagcggguggacuucugcggcaagggcuaccaccugaugagcuuuccccagagcgcaccccacggagugguguuccugcacgugaccuacgugcccgcccaggagaagaacuucaccaccgccccagccaucugccacgacggcaaggcccacuuuccccgggagggcguguucgugagcaacggcacccacugguucgugacccagcggaacuucuacgagccccagaucaucaccaccgacaacaccuucgugagcggcaacugcgacguggugaucggcaucgugaacaacaccguguacgauccccugcagcccgagcuggacagcuucaaggaggagcuggacaaguacuucaagaaucacaccagccccgacguggaccugggcgacaucagcggcaucaacgccagcguggugaacauccagaaggagaucgaucggcugaacgagguggccaagaaccugaacgagagccugaucgaccugcaggagcugggcaaguacgagcaguacaucaaguggcccugguacaucuggcugggcuucaucgccggccugaucgccaucgugauggugaccaucaugcugugcugcaugaccagcugcugcagcugccugaagggcuguugcagcugcggcagcugcugcaaguucgacgaggacgacagcgagcccgugcugaagggcgugaagcugcacuacaccugaggacuaguguccaccugucccuccugggcugcuggauugucucguuuuccugccaaauaaacaggaucagcgcuuuacagaucuaaaaaaaaaaaaaaaaaaaaaaaaaaaaaaaaaaaaaaaaaaaaaaaaaaaaaaaaaaaaaaaaaaaaaaaaaaaaaaaaaaaaaaaaaaaaaaaaaaaa

SEQ ID NO: 25327 - RNA, 4096 nt, Artificial Sequence
  SARS-CoV-2/Wuhan/WIV05/2019__EPI_ISL_402128 spike protein mRNA gc (1-1273)(K986P_V987P_K986P_V987P_L18F_D80A_D215G_L242del_A243del_ L244del_R246I_K417N_E484K_N501Y_D614G_A701V)
aggagacccgugacccggaaguuguacggcuacgcgacuuucccucccacaaacccucgcgcccuuccuuuccuacuugggcccggcagaaagcuuaccauguucguguuccuggugcugcugccccuggugagcagccagugcgugaacuucaccacccggacccagcugccaccagccuacaccaacagcuucacccggggcgucuacuaccccgacaagguguuccggagcagcguccugcacagcacccaggaccuguuccugcccuucuucagcaacgugaccugguuccacgccauccacgugagcggcaccaacggcaccaagcgguucgccaaccccgugcugcccuucaacgacggcguguacuucgccagcaccgagaagagcaacaucauccggggcuggaucuucggcaccacccuggacagcaagacccagagccugcugaucgugaauaacgccaccaacguggugaucaaggugugcgaguuccaguucugcaacgaccccuuccugggcguguacuaccacaagaacaacaagagcuggauggagagcgaguuccggguguacagcagcgccaacaacugcaccuucgaguacgugagccagcccuuccugauggaccuggagggcaagcagggcaacuucaagaaccugcgggaguucguguucaagaacaucgacggcuacuucaagaucuacagcaagcacaccccaaucaaccuggugcggggccugccccagggcuucucagcccuggagccccugguggaccugcccaucggcaucaacaucacccgguuccagacccugcacaucagcuaccugaccccaggcgacagcagcagcggguggacagcaggcgcggcugcuuacuacgugggcuaccugcagccccggaccuuccugcugaaguacaacgagaacggcaccaucaccgacgccguggacugcgcccuggacccucugagcgagaccaagugcacccugaagagcuucaccguggagaagggcaucuaccagaccagcaacuuccgggugcagcccaccgagagcaucgugcgguuccccaacaucaccaaccugugccccuucggcgagguguucaacgccacccgguucgccagcguguacgccuggaaccggaagcggaucagcaacugcguggccgacuacagcgugcuguacaacagcgccagcuucagcaccuucaagugcuacggcgugagccccaccaagcugaacgaccugugcuucaccaacguguacgccgacagcuucgugauccguggcgacgaggugcggcagaucgcacccggccagacaggcaacaucgccgacuacaacuacaagcugcccgacgacuucaccggcugcgugaucgccuggaacagcaacaaccucgacagcaaggugggcggcaacuacaacuaccuguaccggcuguuccggaagagcaaccugaagcccuucgagcgggacaucagcaccgagaucuaccaagccggcuccaccccuugcaacggcgugaagggcuucaacugcuacuucccucugcagagcuacggcuuccagcccaccuacggcgugggcuaccagcccuaccgggugguggugcugagcuucgagcugcugcacgccccagccaccguguguggccccaagaagagcaccaaccuggugaagaacaagugcgugaacuucaacuucaacggccuuaccggcaccggcgugcugaccgagagcaacaagaaauuccugcccuuucagcaguucggccgggacaucgccgacaccaccgacgcugugcgggauccccagacccuggagauccuggacaucaccccuugcagcuucggcggcgugagcgugaucaccccaggcaccaacaccagcaaccagguggccgugcuguaccagggcgugaacugcaccgaggugcccguggccauccacgccgaccagcugacacccaccuggcgggucuacagcaccggcagcaacguguuccagacccgggccgguugccugaucggcgccgagcacgugaacaacagcuacgagugcgacauccccaucggcgccggcaucugugccagcuaccagacccagaccaauucaccccggagggcaaggagcguggccagccagagcaucaucgccuacaccaugagccugggcguggagaacagcguggccuacagcaacaacagcaucgccauccccaccaacuucaccaucagcgugaccaccgagauucugcccgugagcaugaccaagaccagcguggacugcaccauguacaucugcggcgacagcaccgagugcagcaaccugcugcugcaguacggcagcuucugcacccagcugaaccgggcccugaccggcaucgccguggagcaggacaagaacacccaggagguguucgcccaggugaagcagaucuacaagaccccucccaucaaggacuucggcggcuucaacuucagccagauccugcccgaccccagcaagcccagcaagcggagcuucaucgaggaccugcuguucaacaaggugacccuagccgacgccggcuucaucaagcaguacggcgacugccucggcgacauagccgcccgggaccugaucugcgcccagaaguucaacggccugaccgugcugccuccccugcugaccgacgagaugaucgcccaguacaccagcgcccuguuagccggaaccaucaccagcggcuggacuuucggcgcuggagccgcucugcagauccccuucgccaugcagauggccuaccgguucaacggcaucggcgugacccagaacgugcuguacgagaaccagaagcugaucgccaaccaguucaacagcgccaucggcaagauccaggacagccugagcagcaccgcuagcgcccugggcaagcugcaggacguggugaaccagaacgcccaggcccugaacacccuggugaagcagcugagcagcaacuucggcgccaucagcagcgugcugaacgacauccugagccggcuggacccucccgaggccgaggugcagaucgaccggcugaucacuggccggcugcagagccugcagaccuacgugacccagcagcugauccgggccgccgagauucgggccagcgccaaccuggccgccaccaagaugagcgagugcgugcugggccagagcaagcggguggacuucugcggcaagggcuaccaccugaugagcuuuccccagagcgcaccccacggagugguguuccugcacgugaccuacgugcccgcccaggagaagaacuucaccaccgccccagccaucugccacgacggcaaggcccacuuuccccgggagggcguguucgugagcaacggcacccacugguucgugacccagcggaacuucuacgagccccagaucaucaccaccgacaacaccuucgugagcggcaacugcgacguggugaucggcaucgugaacaacaccguguacgauccccugcagcccgagcuggacagcuucaaggaggagcuggacaaguacuucaagaaucacaccagccccgacguggaccugggcgacaucagcggcaucaacgccagcguggugaacauccagaaggagaucgaucggcugaacgagguggccaagaaccugaacgagagccugaucgaccugcaggagcugggcaaguacgagcaguacaucaaguggcccugguacaucuggcugggcuucaucgccggccugaucgccaucgugauggugaccaucaugcugugcugcaugaccagcugcugcagcugccugaagggcuguugcagcugcggcagcugcugcaaguucgacgaggacgacagcgagcccgugcugaagggcgugaagcugcacuacaccugaggacuaguguccaccugucccuccugggcugcuggauugucucguuuuccugccaaauaaacaggaucagcgcuuuacagaucuaaaaaaaaaaaaaaaaaaaaaaaaaaaaaaaaaaaaaaaaaaaaaaaaaaaaaaaaaaaaaaaaaaaaaaaaaaaaaaaaaaaaaaaaaaaaaaaaaaaa

SEQ ID NO: 25328 - RNA, 4105 nt, Artificial Sequence
  SARS-CoV-2/Wuhan/WIV05/2019__EPI_ISL_402128 spike protein mRNA gc (1-1273)(K986P_V987P_K986P_V987P_E484K_D614G)
aggagacccgugacccggaaguuguacggcuacgcgacuuucccucccacaaacccucgcgcccuuccuuuccuacuugggcccggcagaaagcuuaccauguucguguuccuggugcugcugccccuggugagcagccagugcgugaaccugaccacccggacccagcugccaccagccuacaccaacagcuucacccggggcgucuacuaccccgacaagguguuccggagcagcguccugcacagcacccaggaccuguuccugcccuucuucagcaacgugaccugguuccacgccauccacgugagcggcaccaacggcaccaagcgguucgacaaccccgugcugcccuucaacgacggcguguacuucgccagcaccgagaagagcaacaucauccggggcuggaucuucggcaccacccuggacagcaagacccagagccugcugaucgugaauaacgccaccaacguggugaucaaggugugcgaguuccaguucugcaacgaccccuuccugggcguguacuaccacaagaacaacaagagcuggauggagagcgaguuccggguguacagcagcgccaacaacugcaccuucgaguacgugagccagcccuuccugauggaccuggagggcaagcagggcaacuucaagaaccugcgggaguucguguucaagaacaucgacggcuacuucaagaucuacagcaagcacaccccaaucaaccuggugcgggaucugccccagggcuucucagcccuggagccccugguggaccugcccaucggcaucaacaucacccgguuccagacccugcuggcccugcaccggagcuaccugaccccaggcgacagcagcagcggguggacagcaggcgcggcugcuuacuacgugggcuaccugcagccccggaccuuccugcugaaguacaacgagaacggcaccaucaccgacgccguggacugcgcccuggacccucugagcgagaccaagugcacccugaagagcuucaccguggagaagggcaucuaccagaccagcaacuuccgggugcagcccaccgagagcaucgugcgguuccccaacaucaccaaccugugccccuucggcgagguguucaacgccacccgguucgccagcguguacgccuggaaccggaagcggaucagcaacugcguggccgacuacagcgugcuguacaacagcgccagcuucagcaccuucaagugcuacggcgugagccccaccaagcugaacgaccugugcuucaccaacguguacgccgacagcuucgugauccguggcgacgaggugcggcagaucgcacccggccagacaggcaagaucgccgacuacaacuacaagcugcccgacgacuucaccggcugcgugaucgccuggaacagcaacaaccucgacagcaaggugggcggcaacuacaacuaccuguaccggcuguuccggaagagcaaccugaagcccuucgagcgggacaucagcaccgagaucuaccaagccggcuccaccccuugcaacggcgugaagggcuucaacugcuacuucccucugcagagcuacggcuuccagcccaccaacggcgugggcuaccagcccuaccgggugguggugcugagcuucgagcugcugcacgccccagccaccguguguggccccaagaagagcaccaaccuggugaagaacaagugcgugaacuucaacuucaacggccuuaccggcaccggcgugcugaccgagagcaacaagaaauuccugcccuuucagcaguucggccgggacaucgccgacaccaccgacgcugugcgggauccccagacccuggagauccuggacaucaccccuugcagcuucggcggcgugagcgugaucaccccaggcaccaacaccagcaaccagguggccgugcuguaccagggcgugaacugcaccgaggugcccguggccauccacgccgaccagcugacacccaccuggcgggucuacagcaccggcagcaacguguuccagacccgggccgguugccugaucggcgccgagcacgugaacaacagcuacgagugcgacauccccaucggcgccggcaucugugccagcuaccagacccagaccaauucaccccggagggcaaggagcguggccagccagagcaucaucgccuacaccaugagccugggcgccgagaacagcguggccuacagcaacaacagcaucgccauccccaccaacuucaccaucagcgugaccaccgagauucugcccgugagcaugaccaagaccagcguggacugcaccauguacaucugcggcgacagcaccgagugcagcaaccugcugcugcaguacggcagcuucugcacccagcugaaccgggcccugaccggcaucgccguggagcaggacaagaacacccaggagguguucgcccaggugaagcagaucuacaagaccccucccaucaaggacuucggcggcuucaacuucagccagauccugcccgaccccagcaagcccagcaagcggagcuucaucgaggaccugcuguucaacaaggugacccuagccgacgccggcuucaucaagcaguacggcgacugccucggcgacauagccgcccgggaccugaucugcgcccagaaguucaacggccugaccgugcugccuccccugcugaccgacgagaugaucgcccaguacaccagcgcccuguuagccggaaccaucaccagcggcuggacuuucggcgcuggagccgcucugcagauccccuucgccaugcagauggccuaccgguucaacggcaucggcgugacccagaacgugcuguacgagaaccagaagcugaucgccaaccaguucaacagcgccaucggcaagauccaggacagccugagcagcaccgcuagcgcccugggcaagcugcaggacguggugaaccagaacgcccaggcccugaacacccuggugaagcagcugagcagcaacuucggcgccaucagcagcgugcugaacgacauccugagccggcuggacccucccgaggccgaggugcagaucgaccggcugaucacuggccggcugcagagccugcagaccuacgugacccagcagcugauccgggccgccgagauucgggccagcgccaaccuggccgccaccaagaugagcgagugcgugcugggccagagcaagcggguggacuucugcggcaagggcuaccaccugaugagcuuuccccagagcgcaccccacggagugguguuccugcacgugaccuacgugcccgcccaggagaagaacuucaccaccgccccagccaucugccacgacggcaaggcccacuuuccccgggagggcguguucgugagcaacggcacccacugguucgugacccagcggaacuucuacgagccccagaucaucaccaccgacaacaccuucgugagcggcaacugcgacguggugaucggcaucgugaacaacaccguguacgauccccugcagcccgagcuggacagcuucaaggaggagcuggacaaguacuucaagaaucacaccagccccgacguggaccugggcgacaucagcggcaucaacgccagcguggugaacauccagaaggagaucgaucggcugaacgagguggccaagaaccugaacgagagccugaucgaccugcaggagcugggcaaguacgagcaguacaucaaguggcccugguacaucuggcugggcuucaucgccggccugaucgccaucgugauggugaccaucaugcugugcugcaugaccagcugcugcagcugccugaagggcuguugcagcugcggcagcugcugcaaguucgacgaggacgacagcgagcccgugcugaagggcgugaagcugcacuacaccugaggacuaguguccaccugucccuccugggcugcuggauugucucguuuuccugccaaauaaacaggaucagcgcuuuacagaucuaaaaaaaaaaaaaaaaaaaaaaaaaaaaaaaaaaaaaaaaaaaaaaaaaaaaaaaaaaaaaaaaaaaaaaaaaaaaaaaaaaaaaaaaaaaaaaaaaaaa

SEQ ID NO: 25329 - RNA, 4105 nt, Artificial Sequence
  SARS-CoV-2/Wuhan/WIV05/2019__EPI_ISL_402128 spike protein mRNA gc (1-1273)(K986P_V987P_K986P_V987P_L18F_T20N_P26S_D138Y_R190S_K417T _E484K_N501Y_D614G_H655Y_T1027I)
aggagacccgugacccggaaguuguacggcuacgcgacuuucccucccacaaacccucgcgcccuuccuuuccuacuugggcccggcagaaagcuuaccauguucguguuccuggugcugcugccccuggugagcagccagugcgugaacuucaccaaccggacccagcugccaagcgccuacaccaacagcuucacccggggcgucuacuaccccgacaagguguuccggagcagcguccugcacagcacccaggaccuguuccugcccuucuucagcaacgugaccugguuccacgccauccacgugagcggcaccaacggcaccaagcgguucgacaaccccgugcugcccuucaacgacggcguguacuucgccagcaccgagaagagcaacaucauccggggcuggaucuucggcaccacccuggacagcaagacccagagccugcugaucgugaauaacgccaccaacguggugaucaaggugugcgaguuccaguucugcaacuaccccuuccugggcguguacuaccacaagaacaacaagagcuggauggagagcgaguuccggguguacagcagcgccaacaacugcaccuucgaguacgugagccagcccuuccugauggaccuggagggcaagcagggcaacuucaagaaccugagcgaguucguguucaagaacaucgacggcuacuucaagaucuacagcaagcacaccccaaucaaccuggugcgggaucugccccagggcuucucagcccuggagccccugguggaccugcccaucggcaucaacaucacccgguuccagacccugcuggcccugcaccggagcuaccugaccccaggcgacagcagcagcggguggacagcaggcgcggcugcuuacuacgugggcuaccugcagccccggaccuuccugcugaaguacaacgagaacggcaccaucaccgacgccguggacugcgcccuggacccucugagcgagaccaagugcacccugaagagcuucaccguggagaagggcaucuaccagaccagcaacuuccgggugcagcccaccgagagcaucgugcgguuccccaacaucaccaaccugugccccuucggcgagguguucaacgccacccgguucgccagcguguacgccuggaaccggaagcggaucagcaacugcguggccgacuacagcgugcuguacaacagcgccagcuucagcaccuucaagugcuacggcgugagccccaccaagcugaacgaccugugcuucaccaacguguacgccgacagcuucgugauccguggcgacgaggugcggcagaucgcacccggccagacaggcaccaucgccgacuacaacuacaagcugcccgacgacuucaccggcugcgugaucgccuggaacagcaacaaccucgacagcaaggugggcggcaacuacaacuaccuguaccggcuguuccggaagagcaaccugaagcccuucgagcgggacaucagcaccgagaucuaccaagccggcuccaccccuugcaacggcgugaagggcuucaacugcuacuucccucugcagagcuacggcuuccagcccaccuacggcgugggcuaccagcccuaccgggugguggugcugagcuucgagcugcugcacgccccagccaccguguguggccccaagaagagcaccaaccuggugaagaacaagugcgugaacuucaacuucaacggccuuaccggcaccggcgugcugaccgagagcaacaagaaauuccugcccuuucagcaguucggccgggacaucgccgacaccaccgacgcugugcgggauccccagacccuggagauccuggacaucaccccuugcagcuucggcggcgugagcgugaucaccccaggcaccaacaccagcaaccagguggccgugcuguaccagggcgugaacugcaccgaggugcccguggccauccacgccgaccagcugacacccaccuggcgggucuacagcaccggcagcaacguguuccagacccgggccgguugccugaucggcgccgaguacgugaacaacagcuacgagugcgacauccccaucggcgccggcaucugugccagcuaccagacccagaccaauucaccccggagggcaaggagcguggccagccagagcaucaucgccuacaccaugagccugggcgccgagaacagcguggccuacagcaacaacagcaucgccauccccaccaacuucaccaucagcgugaccaccgagauucugcccgugagcaugaccaagaccagcguggacugcaccauguacaucugcggcgacagcaccgagugcagcaaccugcugcugcaguacggcagcuucugcacccagcugaaccgggcccugaccggcaucgccguggagcaggacaagaacacccaggagguguucgcccaggugaagcagaucuacaagaccccucccaucaaggacuucggcggcuucaacuucagccagauccugcccgaccccagcaagcccagcaagcggagcuucaucgaggaccugcuguucaacaaggugacccuagccgacgccggcuucaucaagcaguacggcgacugccucggcgacauagccgcccgggaccugaucugcgcccagaaguucaacggccugaccgugcugccuccccugcugaccgacgagaugaucgcccaguacaccagcgcccuguuagccggaaccaucaccagcggcuggacuuucggcgcuggagccgcucugcagauccccuucgccaugcagauggccuaccgguucaacggcaucggcgugacccagaacgugcuguacgagaaccagaagcugaucgccaaccaguucaacagcgccaucggcaagauccaggacagccugagcagcaccgcuagcgcccugggcaagcugcaggacguggugaaccagaacgcccaggcccugaacacccuggugaagcagcugagcagcaacuucggcgccaucagcagcgugcugaacgacauccugagccggcuggacccucccgaggccgaggugcagaucgaccggcugaucacuggccggcugcagagccugcagaccuacgugacccagcagcugauccgggccgccgagauucgggccagcgccaaccuggccgccaucaagaugagcgagugcgugcugggccagagcaagcggguggacuucugcggcaagggcuaccaccugaugagcuuuccccagagcgcaccccacggagugguguuccugcacgugaccuacgugcccgcccaggagaagaacuucaccaccgccccagccaucugccacgacggcaaggcccacuuuccccgggagggcguguucgugagcaacggcacccacugguucgugacccagcggaacuucuacgagccccagaucaucaccaccgacaacaccuucgugagcggcaacugcgacguggugaucggcaucgugaacaacaccguguacgauccccugcagcccgagcuggacagcuucaaggaggagcuggacaaguacuucaagaaucacaccagccccgacguggaccugggcgacaucagcggcaucaacgccagcguggugaacauccagaaggagaucgaucggcugaacgagguggccaagaaccugaacgagagccugaucgaccugcaggagcugggcaaguacgagcaguacaucaaguggcccugguacaucuggcugggcuucaucgccggccugaucgccaucgugauggugaccaucaugcugugcugcaugaccagcugcugcagcugccugaagggcuguugcagcugcggcagcugcugcaaguucgacgaggacgacagcgagcccgugcugaagggcgugaagcugcacuacaccugaggacuaguguccaccugucccuccugggcugcuggauugucucguuuuccugccaaauaaacaggaucagcgcuuuacagaucuaaaaaaaaaaaaaaaaaaaaaaaaaaaaaaaaaaaaaaaaaaaaaaaaaaaaaaaaaaaaaaaaaaaaaaaaaaaaaaaaaaaaaaaaaaaaaaaaaaaa

SEQ ID NO: 25330 - RNA, 4105 nt, Artificial Sequence
  SARS-CoV-2/Wuhan/WIV05/2019__EPI_ISL_402128 spike protein mRNA gc (1-1273)(K986P_V987P_K986P_V987P_S13I_W152C_L452R_D614G)
aggagacccgugacccggaaguuguacggcuacgcgacuuucccucccacaaacccucgcgcccuuccuuuccuacuugggcccggcagaaagcuuaccauguucguguuccuggugcugcugccccuggugagcauccagugcgugaaccugaccacccggacccagcugccaccagccuacaccaacagcuucacccggggcgucuacuaccccgacaagguguuccggagcagcguccugcacagcacccaggaccuguuccugcccuucuucagcaacgugaccugguuccacgccauccacgugagcggcaccaacggcaccaagcgguucgacaaccccgugcugcccuucaacgacggcguguacuucgccagcaccgagaagagcaacaucauccggggcuggaucuucggcaccacccuggacagcaagacccagagccugcugaucgugaauaacgccaccaacguggugaucaaggugugcgaguuccaguucugcaacgaccccuuccugggcguguacuaccacaagaacaacaagagcugcauggagagcgaguuccggguguacagcagcgccaacaacugcaccuucgaguacgugagccagcccuuccugauggaccuggagggcaagcagggcaacuucaagaaccugcgggaguucguguucaagaacaucgacggcuacuucaagaucuacagcaagcacaccccaaucaaccuggugcgggaucugccccagggcuucucagcccuggagccccugguggaccugcccaucggcaucaacaucacccgguuccagacccugcuggcccugcaccggagcuaccugaccccaggcgacagcagcagcggguggacagcaggcgcggcugcuuacuacgugggcuaccugcagccccggaccuuccugcugaaguacaacgagaacggcaccaucaccgacgccguggacugcgcccuggacccucugagcgagaccaagugcacccugaagagcuucaccguggagaagggcaucuaccagaccagcaacuuccgggugcagcccaccgagagcaucgugcgguuccccaacaucaccaaccugugccccuucggcgagguguucaacgccacccgguucgccagcguguacgccuggaaccggaagcggaucagcaacugcguggccgacuacagcgugcuguacaacagcgccagcuucagcaccuucaagugcuacggcgugagccccaccaagcugaacgaccugugcuucaccaacguguacgccgacagcuucgugauccguggcgacgaggugcggcagaucgcacccggccagacaggcaagaucgccgacuacaacuacaagcugcccgacgacuucaccggcugcgugaucgccuggaacagcaacaaccucgacagcaaggugggcggcaacuacaacuaccgcuaccggcuguuccggaagagcaaccugaagcccuucgagcgggacaucagcaccgagaucuaccaagccggcuccaccccuugcaacggcguggagggcuucaacugcuacuucccucugcagagcuacggcuuccagcccaccaacggcgugggcuaccagcccuaccgggugguggugcugagcuucgagcugcugcacgccccagccaccguguguggccccaagaagagcaccaaccuggugaagaacaagugcgugaacuucaacuucaacggccuuaccggcaccggcgugcugaccgagagcaacaagaaauuccugcccuuucagcaguucggccgggacaucgccgacaccaccgacgcugugcgggauccccagacccuggagauccuggacaucaccccuugcagcuucggcggcgugagcgugaucaccccaggcaccaacaccagcaaccagguggccgugcuguaccagggcgugaacugcaccgaggugcccguggccauccacgccgaccagcugacacccaccuggcgggucuacagcaccggcagcaacguguuccagacccgggccgguugccugaucggcgccgagcacgugaacaacagcuacgagugcgacauccccaucggcgccggcaucugugccagcuaccagacccagaccaauucaccccggagggcaaggagcguggccagccagagcaucaucgccuacaccaugagccugggcgccgagaacagcguggccuacagcaacaacagcaucgccauccccaccaacuucaccaucagcgugaccaccgagauucugcccgugagcaugaccaagaccagcguggacugcaccauguacaucugcggcgacagcaccgagugcagcaaccugcugcugcaguacggcagcuucugcacccagcugaaccgggcccugaccggcaucgccguggagcaggacaagaacacccaggagguguucgcccaggugaagcagaucuacaagaccccucccaucaaggacuucggcggcuucaacuucagccagauccugcccgaccccagcaagcccagcaagcggagcuucaucgaggaccugcuguucaacaaggugacccuagccgacgccggcuucaucaagcaguacggcgacugccucggcgacauagccgcccgggaccugaucugcgcccagaaguucaacggccugaccgugcugccuccccugcugaccgacgagaugaucgcccaguacaccagcgcccuguuagccggaaccaucaccagcggcuggacuuucggcgcuggagccgcucugcagauccccuucgccaugcagauggccuaccgguucaacggcaucggcgugacccagaacgugcuguacgagaaccagaagcugaucgccaaccaguucaacagcgccaucggcaagauccaggacagccugagcagcaccgcuagcgcccugggcaagcugcaggacguggugaaccagaacgcccaggcccugaacacccuggugaagcagcugagcagcaacuucggcgccaucagcagcgugcugaacgacauccugagccggcuggacccucccgaggccgaggugcagaucgaccggcugaucacuggccggcugcagagccugcagaccuacgugacccagcagcugauccgggccgccgagauucgggccagcgccaaccuggccgccaccaagaugagcgagugcgugcugggccagagcaagcggguggacuucugcggcaagggcuaccaccugaugagcuuuccccagagcgcaccccacggagugguguuccugcacgugaccuacgugcccgcccaggagaagaacuucaccaccgccccagccaucugccacgacggcaaggcccacuuuccccgggagggcguguucgugagcaacggcacccacugguucgugacccagcggaacuucuacgagccccagaucaucaccaccgacaacaccuucgugagcggcaacugcgacguggugaucggcaucgugaacaacaccguguacgauccccugcagcccgagcuggacagcuucaaggaggagcuggacaaguacuucaagaaucacaccagccccgacguggaccugggcgacaucagcggcaucaacgccagcguggugaacauccagaaggagaucgaucggcugaacgagguggccaagaaccugaacgagagccugaucgaccugcaggagcugggcaaguacgagcaguacaucaaguggcccugguacaucuggcugggcuucaucgccggccugaucgccaucgugauggugaccaucaugcugugcugcaugaccagcugcugcagcugccugaagggcuguugcagcugcggcagcugcugcaaguucgacgaggacgacagcgagcccgugcugaagggcgugaagcugcacuacaccugaggacuaguguccaccugucccuccugggcugcuggauugucucguuuuccugccaaauaaacaggaucagcgcuuuacagaucuaaaaaaaaaaaaaaaaaaaaaaaaaaaaaaaaaaaaaaaaaaaaaaaaaaaaaaaaaaaaaaaaaaaaaaaaaaaaaaaaaaaaaaaaaaaaaaaaaaaa

SEQ ID NO: 25331 - RNA, 4105 nt, Artificial Sequence
  SARS-CoV-2/Wuhan/WIV05/2019__EPI_ISL_402128 spike protein mRNA gc (1-1273)(K986P_V987P)
aggagacccgugacccggaaguuguacggcuacgcgacuuucccucccacaaacccucgcgcccuuccuuuccuacuugggcccggcagaaagcuuaccauguucguguuccuggugcugcugccccuggugagcagccagugcgugaaccugaccacccggacccagcugcccccugccuacaccaacagcuucacccggggcguguacuaccccgacaagguguuccggagcagcgugcugcacagcacccaggaccuguuccugcccuucuucagcaacgugaccugguuccacgccauccacgugagcggcaccaacggcaccaagcgguucgacaacccagugcugcccuucaacgacggcguguacuucgccagcaccgagaagucaaacaucauccggggcuggaucuucggcaccacccuggacagcaagacacagagccugcugaucgugaacaacgccaccaacguggugaucaaggugugcgaguuucaguucugcaacgaccccuuccugggcguguacuaccacaagaacaacaagagcuggauggagagcgaguuccgggucuacagcagcgcuaacaauugcaccuucgaguacgugagccagcccuuccugauggaccucgagggcaagcagggcaacuucaagaaccugcgggaguucguguucaagaacaucgauggcuacuucaagaucuacagcaagcacacccccaucaaccuggugcgggaccugccccagggauucagcgcccuggagccucugguggaccugcccaucggcaucaacaucaccagguuccagacccugcuggcccugcaccggagcuaccugacccccggcgacagcagcagcggcuggaccgccggcgccgccgcauacuacgugggcuaccugcagccacggaccuuccugcugaaguacaacgagaacggcaccaucaccgacgccguggacugcgcccuggacccccugagcgagaccaagugcacccuaaagagcuucaccguggagaagggcaucuaccagaccagcaacuuccgggugcagcccacugagagcaucgugcgguuccccaacauuaccaaccugugucccuucggcgagguguucaacgccacccgguucgccagcguguacgccuggaaccggaagcggaucagcaacugcguggccgacuacagcgugcuguacaacagcgccagcuucagcaccuucaagugcuacggcgugagcccuaccaagcugaacgaccugugcuucaccaacguguacgcugacagcuucgugauccggggcgacgaggugcggcagaucgcccccggccagaccggcaagaucgccgacuacaacuacaagcugcccgacgacuucaccggcugcgugaucgccuggaacagcaacaaccuggacagcaaggugggcggcaacuacaacuaccuguaccggcuguuccguaagagcaaccugaagccauucgagcgggacaucagcaccgagaucuaccaggccggcagcacccccugcaacgguguggagggcuuuaacugcuacuucccccugcagagcuacggcuuccagcccaccaacggcgugggcuaccagcccuaccgggugguggugcugagcuucgagcugcugcacgcccccgccaccgugugcggcccuaaaaagagcaccaaccuggugaagaacaagugcgugaacuucaauuucaacggccugaccggcaccggcgugcugaccgagagcaacaagaaguuccugcccuuccagcaguucggccgggauaucgccgacaccaccgacgcagugcgggacccccagacccuggagauccuggacaucaccccaugcagcuucggcggcgugagcgucaucacccccggcacaaacaccagcaaccagguggccgugcuguaccaggacgugaacugcaccgaggugcccguggccauccacgccgaccagcugacccccaccuggcggguguacagcaccggaagcaacguguuccagacccgggccggcugccugaucggcgccgagcacgugaacaacuccuacgagugcgacauccccaucggcgcuggcaucugcgccagcuaccagacccagaccaacagcccccggcgggcccggagcguggccagccagagcaucaucgccuacaccaugagcuuaggcgccgagaacagcguggccuacagcaacaacagcaucgcgaucccuaccaacuucaccaucagcgugaccaccgagauacugcccgugagcaugaccaagaccagcguggacuguaccauguacaucugcggcgacagcaccgagugcagcaaccugcugcugcaguacggcagcuucugcacccagcugaaccgggcccugaccggcaucgccguggagcaggacaagaacacccaagagguguucgcccaggugaagcagaucuacaagacucccccaaucaaggacuucggcggcuucaacuucagccagauccugcccgaccccagcaagcccagcaagcggagcuucaucgaggaccugcuguucaacaaggugacccuggccgacgccggcuucaucaagcaguacggcgauugccugggcgacaucgccgcucgggaccugaucugcgcccagaaguucaacgggcugaccgugcugcccccucugcugaccgacgagaugaucgcccaguacaccagcgcccugcuugccggcaccaucaccagcggcuggaccuucggcgccggcgcagcccugcagauccccuucgccaugcagauggccuaccgguucaacggcaucggcgugacccagaacgugcuguacgagaaccagaagcugaucgccaaccaguucaacagcgccaucggcaagauccaggacagccugagcagcaccgccagcgcccugggcaagcugcaggacguggugaaccagaacgcucaggcccugaacacccuggugaagcagcugagcagcaacuucggcgccaucagcucagugcugaaugacauccugagcaggcuggaucccccagaggccgaggugcagaucgaccggcugaucaccggccggcugcagagccugcagaccuacgugacccagcagcugauccgggccgccgagauccgggccagcgccaaccuggcagccaccaagaugagcgagugcgugcugggccagagcaagcggguggacuuuugcggcaagggcuaccaccugaugagcuucccccagagcgcuccccacggcgugguguuccuccacgugacauacguccccgcccaggagaagaacuucaccaccgcccccgccauuugccacgacggcaaggcccacuucccccgggagggcguguucgugagcaacggaacccacugguucgugacccagcggaacuucuacgagccucagaucaucaccaccgacaacaccuucgugagcggcaacugcgacguggugaucggcaucgugaacaacaccguguacgacccccugcagcccgagcuggacagcuucaaggaggagcuggacaaguacuucaagaaccacaccagcccagacguggaccugggcgacaucagcggcaucaacgccagcguggugaacauccagaaggagaucgaccggcugaacgagguggccaagaaccugaacgagagccugaucgaccugcaggagcugggcaaguacgagcaguacaucaaguggcccugguacaucuggcugggcuucaucgccggccugaucgccaucgugauggugaccaucaugcugugcugcaugaccagcugcuguagcugccugaagggcugcugcagcugcggcagcugcugcaaguucgacgaggacgacagcgagcccgugcugaagggcgugaagcugcacuacaccugaggacuaguguccaccugucccuccugggcugcuggauugucucguuuuccugccaaauaaacaggaucagcgcuuuacagaucuaaaaaaaaaaaaaaaaaaaaaaaaaaaaaaaaaaaaaaaaaaaaaaaaaaaaaaaaaaaaaaaaaaaaaaaaaaaaaaaaaaaaaaaaaaaaaaaaaaaa

SEQ ID NO: 25332 - RNA, 4105 nt, Artificial Sequence
  SARS-CoV-2/Wuhan/WIV05/2019__EPI_ISL_402128 spike protein mRNA gc (1-1273)(K986P_V987P_ D614G)
aggagacccgugacccggaaguuguacggcuacgcgacuuucccucccacaaacccucgcgcccuuccuuuccuacuugggcccggcagaaagcuuaccauguucguguuccuggugcugcugccccuggugagcagccagugcgugaaccugaccacccggacccagcugcccccugccuacaccaacagcuucacccggggcguguacuaccccgacaagguguuccggagcagcgugcugcacagcacccaggaccuguuccugcccuucuucagcaacgugaccugguuccacgccauccacgugagcggcaccaacggcaccaagcgguucgacaacccagugcugcccuucaacgacggcguguacuucgccagcaccgagaagucaaacaucauccggggcuggaucuucggcaccacccuggacagcaagacacagagccugcugaucgugaacaacgccaccaacguggugaucaaggugugcgaguuucaguucugcaacgaccccuuccugggcguguacuaccacaagaacaacaagagcuggauggagagcgaguuccgggucuacagcagcgcuaacaauugcaccuucgaguacgugagccagcccuuccugauggaccucgagggcaagcagggcaacuucaagaaccugcgggaguucguguucaagaacaucgauggcuacuucaagaucuacagcaagcacacccccaucaaccuggugcgggaccugccccagggauucagcgcccuggagccucugguggaccugcccaucggcaucaacaucaccagguuccagacccugcuggcccugcaccggagcuaccugacccccggcgacagcagcagcggcuggaccgccggcgccgccgcauacuacgugggcuaccugcagccacggaccuuccugcugaaguacaacgagaacggcaccaucaccgacgccguggacugcgcccuggacccccugagcgagaccaagugcacccuaaagagcuucaccguggagaagggcaucuaccagaccagcaacuuccgggugcagcccacugagagcaucgugcgguuccccaacauuaccaaccugugucccuucggcgagguguucaacgccacccgguucgccagcguguacgccuggaaccggaagcggaucagcaacugcguggccgacuacagcgugcuguacaacagcgccagcuucagcaccuucaagugcuacggcgugagcccuaccaagcugaacgaccugugcuucaccaacguguacgcugacagcuucgugauccggggcgacgaggugcggcagaucgcccccggccagaccggcaagaucgccgacuacaacuacaagcugcccgacgacuucaccggcugcgugaucgccuggaacagcaacaaccuggacagcaaggugggcggcaacuacaacuaccuguaccggcuguuccguaagagcaaccugaagccauucgagcgggacaucagcaccgagaucuaccaggccggcagcacccccugcaacgguguggagggcuuuaacugcuacuucccccugcagagcuacggcuuccagcccaccaacggcgugggcuaccagcccuaccgggugguggugcugagcuucgagcugcugcacgcccccgccaccgugugcggcccuaaaaagagcaccaaccuggugaagaacaagugcgugaacuucaauuucaacggccugaccggcaccggcgugcugaccgagagcaacaagaaguuccugcccuuccagcaguucggccgggauaucgccgacaccaccgacgcagugcgggacccccagacccuggagauccuggacaucaccccaugcagcuucggcggcgugagcgucaucacccccggcacaaacaccagcaaccagguggccgugcuguaccagggagugaacugcaccgaggugcccguggccauccacgccgaccagcugacccccaccuggcggguguacagcaccggcagcaacguguuccagacccgggccggcugccugaucggcgccgagcacgugaacaacuccuacgagugcgacauccccaucggcgcuggcaucugcgccagcuaccagacccagaccaacagcccccggcgggcccggagcguggccagccagagcaucaucgccuacaccaugagcuuaggcgccgagaacagcguggccuacagcaacaacagcaucgcgaucccuaccaacuucaccaucagcgugaccaccgagauacugcccgugagcaugaccaagaccagcguggacuguaccauguacaucugcggcgacagcaccgagugcagcaaccugcugcugcaguacggcagcuucugcacccagcugaaccgggcccugaccggcaucgccguggagcaggacaagaacacccaagagguguucgcccaggugaagcagaucuacaagacucccccaaucaaggacuucggcggcuucaacuucagccagauccugcccgaccccagcaagcccagcaagcggagcuucaucgaggaccugcuguucaacaaggugacccuggccgacgccggcuucaucaagcaguacggcgacugccugggggauaucgccgcucgggaccugaucugcgcccagaaguucaacggccugaccgugcugcccccucugcugaccgacgagaugaucgcccaguacaccagcgcccugcuugccggcaccaucaccagcggcuggaccuucggcgccggcgcagcccugcagauccccuucgccaugcagauggccuaccgguucaacggcaucggcgugacccagaacgugcuguacgagaaccagaagcugaucgccaaccaguucaacagcgccaucggcaagauccaggacagccugagcagcaccgccagcgcccugggcaagcugcaggacguggugaaccagaacgcucaggcccugaacacccuggugaagcagcugagcagcaacuucggcgccaucagcucagugcugaaugacauccugagcaggcuggaucccccagaggccgaggugcagaucgaccggcugaucaccggccggcugcagagccugcagaccuacgugacccagcagcugauccgggccgccgagauccgggccagcgccaaccuggcagccaccaagaugagcgagugcgugcugggccagagcaagcggguggacuuuugcggcaagggcuaccaccugaugagcuucccccagagcgcuccccacggcgugguguuccuccacgugacauacguccccgcccaggagaagaacuucaccaccgcccccgccauuugccacgacggcaaggcccacuucccccgggagggaguguucgugagcaacggcacccacugguucgugacccagcggaacuucuacgagccucagaucaucaccaccgacaacaccuucgugagcggcaacugcgacguggugaucggcaucgugaacaacaccguguacgacccccugcagcccgagcuggacagcuucaaggaggagcuggacaaguacuucaagaaccacaccagcccagacguggaccugggcgacaucagcggcaucaacgccagcguggugaacauccagaaggagaucgaccggcugaacgagguggccaagaaccugaacgagagccugaucgaccugcaggagcugggcaaguacgagcaguacaucaaguggcccugguacaucuggcugggcuucaucgccggccugaucgccaucgugauggugaccaucaugcugugcugcaugaccagcugcuguagcugccugaagggcugcugcagcugcggcagcugcugcaaguucgacgaggacgacagcgagcccgugcugaagggcgugaagcugcacuacaccugaggacuaguguccaccugucccuccugggcugcuggauugucucguuuuccugccaaauaaacaggaucagcgcuuuacagaucuaaaaaaaaaaaaaaaaaaaaaaaaaaaaaaaaaaaaaaaaaaaaaaaaaaaaaaaaaaaaaaaaaaaaaaaaaaaaaaaaaaaaaaaaaaaaaaaaaaaa

SEQ ID NO: 25333 - RNA, 4105 nt, Artificial Sequence
  SARS-CoV-2/Wuhan/WIV05/2019__EPI_ISL_402128 spike protein mRNA gc (1-1273)(K986P_V987P_A222V_D614G)
aggagacccgugacccggaaguuguacggcuacgcgacuuucccucccacaaacccucgcgcccuuccuuuccuacuugggcccggcagaaagcuuaccauguucguguuccuggugcugcugccccuggugagcagccagugcgugaaccugaccacccggacccagcugcccccugccuacaccaacagcuucacccggggcguguacuaccccgacaagguguuccggagcagcgugcugcacagcacccaggaccuguuccugcccuucuucagcaacgugaccugguuccacgccauccacgugagcggcaccaacggcaccaagcgguucgacaacccagugcugcccuucaacgacggcguguacuucgccagcaccgagaagucaaacaucauccggggcuggaucuucggcaccacccuggacagcaagacacagagccugcugaucgugaacaacgccaccaacguggugaucaaggugugcgaguuucaguucugcaacgaccccuuccugggcguguacuaccacaagaacaacaagagcuggauggagagcgaguuccgggucuacagcagcgcuaacaauugcaccuucgaguacgugagccagcccuuccugauggaccucgagggcaagcagggcaacuucaagaaccugcgggaguucguguucaagaacaucgauggcuacuucaagaucuacagcaagcacacccccaucaaccuggugcgggaccugccccagggauucagcgugcuggagccucugguggaccugcccaucggcaucaacaucaccagguuccagacccugcuggcccugcaccggagcuaccugacccccggcgacagcagcagcggcuggaccgccggcgccgccgccuacuacgugggcuaccugcagccacggaccuuccugcugaaguacaacgagaacggcaccaucaccgacgcaguggacugcgcccuggacccccugagcgagaccaagugcacccuaaagagcuucaccguggagaagggcaucuaccagaccagcaacuuccgggugcagcccacugagagcaucgugcgguuccccaacauuaccaaccugugucccuucggcgagguguucaacgccacccgguucgccagcguguacgccuggaaccggaagcggaucagcaacugcguggccgacuacagcgugcuguacaacagcgccagcuucagcaccuucaagugcuacggcgugagcccuaccaagcugaacgaccugugcuucaccaacguguacgccgacagcuucgugauccggggcgacgaggugcggcagaucgcucccggccagaccggcaagaucgccgacuacaacuacaagcugcccgacgacuucaccggcugcgugaucgccuggaacagcaacaaccuggacagcaaggugggcggcaacuacaacuaccuguaccggcuguuccguaagagcaaccugaagccauucgagcgggacaucagcaccgagaucuaccaggccggcagcacccccugcaacgguguggagggcuuuaacugcuacuucccccugcagagcuacggcuuccagcccaccaacggcgugggcuaccagcccuaccgggugguggugcugagcuucgagcugcugcacgcccccgccaccgugugcggcccuaaaaagagcaccaaccuggugaagaacaagugcgugaacuucaauuucaacggccugaccggcaccggcgugcugaccgagagcaacaagaaguuccugcccuuccagcaguucggccgggauaucgccgacaccaccgacgccgugcgggacccccagacccuggagauccuggacaucaccccaugcagcuucggcggcgucagcgugaucacccccggcacaaacaccagcaaccagguggcagugcuguaccagggagugaacugcaccgaggugcccguggccauccacgccgaccagcugacccccaccuggcggguguacagcaccggcagcaacguguuccagacccgggccggcugccugaucggcgccgagcacgugaacaacuccuacgagugcgacauccccaucggcgccggcaucugcgcuagcuaccagacccagaccaacagcccccggcgggcccggagcguggccagccagagcaucaucgccuacaccaugagcuuaggcgccgagaacagcguggccuacagcaacaacagcaucgccaucccuaccaacuucaccaucagcgugaccaccgagauacugcccgugagcaugaccaagaccagcguggacuguaccauguacaucugcggcgacagcaccgagugcagcaaccugcugcugcaguacggcagcuucugcacccagcugaaccgggcgcugaccggcaucgccguggagcaggacaagaacacccaagagguguucgcccaggugaagcagaucuacaagacucccccaaucaaggacuucggcggcuucaacuucagccagauccugcccgaccccagcaagcccagcaagcggagcuucaucgaggaccugcuguucaacaaggugacccuggccgacgccggcuucaucaagcaguacggcgacugccugggggauaucgccgcccgggaccugaucugcgcucagaaguucaacggccugaccgugcugcccccucugcugaccgacgagaugaucgcccaguacaccagcgcccugcuugccggcaccaucaccagcggcuggaccuucggcgccggcgccgcacugcagauccccuucgccaugcagauggccuaccgguucaacggcaucggcgugacccagaacgugcuguacgagaaccagaagcugaucgccaaccaguucaacagcgccaucggcaagauccaggacagccugagcagcaccgccagcgcccugggcaagcugcaggacguggugaaccagaacgcccaggcucugaacacccuggugaagcagcugagcagcaacuucggcgccaucagcucagugcugaaugacauccugagcaggcuggaucccccagaggccgaggugcagaucgaccggcugaucaccggccggcugcagagccugcagaccuacgugacccagcagcugauccgggccgccgagauccgggccagcgccaaccuggccgcaaccaagaugagcgagugcgugcugggccagagcaagcggguggacuuuugcggcaagggcuaccaccugaugagcuucccccagagcgcuccccacggcgugguguuccuccacgucacauacgugcccgcccaggagaagaacuucaccaccgcccccgccauuugccacgacggcaaggcccacuucccccgggagggaguguucgugagcaacggcacccacugguucgugacccagcggaacuucuacgagccucagaucaucaccaccgacaacaccuucgugagcggcaacugcgacguggugaucggcaucgugaacaacaccguguacgacccccugcagcccgagcuggacagcuucaaggaggagcuggacaaguacuucaagaaccacaccagcccagacguggaccugggcgacaucagcggcaucaacgccagcguggugaacauccagaaggagaucgaccggcugaacgagguggccaagaaccugaacgagagccugaucgaccugcaggagcugggcaaguacgagcaguacaucaaguggcccugguacaucuggcugggcuucaucgccggccugaucgccaucgugauggugaccaucaugcugugcugcaugaccagcugcuguagcugccugaagggcugcugcagcugcggcagcugcugcaaguucgacgaggacgacagcgagcccgugcugaagggcgugaagcugcacuacaccugaggacuaguguccaccugucccuccugggcugcuggauugucucguuuuccugccaaauaaacaggaucagcgcuuuacagaucuaaaaaaaaaaaaaaaaaaaaaaaaaaaaaaaaaaaaaaaaaaaaaaaaaaaaaaaaaaaaaaaaaaaaaaaaaaaaaaaaaaaaaaaaaaaaaaaaaaaa

SEQ ID NO: 25334 - RNA, 4105 nt, Artificial Sequence
  SARS-CoV-2/Wuhan/WIV05/2019__EPI_ISL_402128 spike protein mRNA gc (1-1273)(K986P_V987P_N439K_D614G)
aggagacccgugacccggaaguuguacggcuacgcgacuuucccucccacaaacccucgcgcccuuccuuuccuacuugggcccggcagaaagcuuaccauguucguguuccuggugcugcugccccuggugagcagccagugcgugaaccugaccacccggacccagcugcccccugccuacaccaacagcuucacccggggcguguacuaccccgacaagguguuccggagcagcgugcugcacagcacccaggaccuguuccugcccuucuucagcaacgugaccugguuccacgccauccacgugagcggcaccaacggcaccaagcgguucgacaacccagugcugcccuucaacgacggcguguacuucgccagcaccgagaagucaaacaucauccggggcuggaucuucggcaccacccuggacagcaagacacagagccugcugaucgugaacaacgccaccaacguggugaucaaggugugcgaguuucaguucugcaacgaccccuuccugggcguguacuaccacaagaacaacaagagcuggauggagagcgaguuccgggucuacagcagcgcuaacaauugcaccuucgaguacgugagccagcccuuccugauggaccucgagggcaagcagggcaacuucaagaaccugcgggaguucguguucaagaacaucgauggcuacuucaagaucuacagcaagcacacccccaucaaccuggugcgggaccugccccagggauucagcgcccuggagccucugguggaccugcccaucggcaucaacaucaccagguuccagacccugcuggcccugcaccggagcuaccugacccccggcgacagcagcagcggcuggaccgccggcgccgccgcauacuacgugggcuaccugcagccacggaccuuccugcugaaguacaacgagaacggcaccaucaccgacgccguggacugcgcccuggacccccugagcgagaccaagugcacccuaaagagcuucaccguggagaagggcaucuaccagaccagcaacuuccgggugcagcccacugagagcaucgugcgguuccccaacauuaccaaccugugucccuucggcgagguguucaacgccacccgguucgccagcguguacgccuggaaccggaagcggaucagcaacugcguggccgacuacagcgugcuguacaacagcgccagcuucagcaccuucaagugcuacggcgugagcccuaccaagcugaacgaccugugcuucaccaacguguacgcugacagcuucgugauccggggcgacgaggugcggcagaucgcccccggccagaccggcaagaucgccgacuacaacuacaagcugcccgacgacuucaccggcugcgugaucgccuggaacagcaagaaccuggacagcaaggugggcggcaacuacaacuaccuguaccggcuguuccguaagagcaaccugaagccauucgagcgggacaucagcaccgagaucuaccaggccggcagcacccccugcaacgguguggagggcuuuaacugcuacuucccccugcagagcuacggcuuccagcccaccaacggcgugggcuaccagcccuaccgggugguggugcugagcuucgagcugcugcacgcccccgccaccgugugcggcccuaaaaagagcaccaaccuggugaagaacaagugcgugaacuucaacuucaauggccugaccggcaccggcgugcugaccgagagcaacaagaaguuccugcccuuccagcaguucggccgggauaucgccgacaccaccgacgcagugcgggacccccagacccuggagauccuggacaucaccccaugcagcuucggcggcgugagcgucaucacccccggcacaaacaccagcaaccagguggccgugcuguaccagggagugaacugcaccgaggugcccguggccauccacgccgaccagcugacccccaccuggcggguguacagcaccggcagcaacguguuccagacccgggccggcugccugaucggcgccgagcacgugaacaacuccuacgagugcgacauccccaucggcgcuggcaucugcgccagcuaccagacccagaccaacagcccccggcgggcccggagcguggccagccagagcaucaucgccuacaccaugagcuuaggcgccgagaacagcguggccuacagcaacaacagcaucgcgaucccuaccaacuucaccaucagcgugaccaccgagauacugcccgugagcaugaccaagaccagcguggacuguaccauguacaucugcggcgacagcaccgagugcagcaaccugcugcugcaguacggcagcuucugcacccagcugaaccgggcccugaccggcaucgccguggagcaggacaagaacacccaagagguguucgcccaggugaagcagaucuacaagacucccccaaucaaggacuucggcggcuucaacuucagccagauccugcccgaccccagcaagcccagcaagcggagcuucaucgaggaccugcuguucaacaaggugacccuggccgacgccggcuucaucaagcaguacggcgacugccugggggauaucgccgcucgggaccugaucugcgcccagaaguucaacggccugaccgugcugcccccucugcugaccgacgagaugaucgcccaguacaccagcgcccugcuugccggcaccaucaccagcggcuggaccuucggcgccggcgcagcccugcagauccccuucgccaugcagauggccuaccgguucaacggcaucggcgugacccagaacgugcuguacgagaaccagaagcugaucgccaaccaguucaacagcgccaucggcaagauccaggacagccugagcagcaccgccagcgcccugggcaagcugcaggacguggugaaccagaacgcucaggcccugaacacccuggugaagcagcugagcagcaacuucggcgccaucagcucagugcugaacgacauccugagcaggcuggaucccccagaggccgaggugcagaucgaccggcugaucaccggccggcugcagagccugcagaccuacgugacccagcagcugauccgggccgccgagauccgggccagcgccaaucuggcagccaccaagaugagcgagugcgugcugggccagagcaagcggguggacuuuugcggcaagggcuaccaccugaugagcuucccccagagcgcuccccacggcgugguguuccuccacgugacauacguccccgcccaggagaagaacuucaccaccgcccccgccauuugccacgacggcaaggcccacuucccccgggagggaguguucgugagcaacggcacccacugguucgugacccagcggaacuucuacgagccucagaucaucaccaccgacaacaccuucgugagcggcaacugcgacguggugaucggcaucgugaacaacaccguguacgacccccugcagcccgagcuggacagcuucaaggaggagcuggacaaguacuucaagaaccacaccagcccagacguggaccugggcgacaucagcggcaucaacgccagcguggugaacauccagaaggagaucgaccggcugaacgagguggccaagaaccugaacgagagccugaucgaccugcaggagcugggcaaguacgagcaguacaucaaguggcccugguacaucuggcugggcuucaucgccggccugaucgccaucgugauggugaccaucaugcugugcugcaugaccagcugcuguagcugccugaagggcugcugcagcugcggcagcugcugcaaguucgacgaggacgacagcgagcccgugcugaagggcgugaagcugcacuacaccugaggacuaguguccaccugucccuccugggcugcuggauugucucguuuuccugccaaauaaacaggaucagcgcuuuacagaucuaaaaaaaaaaaaaaaaaaaaaaaaaaaaaaaaaaaaaaaaaaaaaaaaaaaaaaaaaaaaaaaaaaaaaaaaaaaaaaaaaaaaaaaaaaaaaaaaaaaa

SEQ ID NO: 25335 - RNA, 4105 nt, Artificial Sequence
  SARS-CoV-2/Wuhan/WIV05/2019__EPI_ISL_402128 spike protein mRNA gc (1-1273)(K986P_V987P_S477N_D614G)
aggagacccgugacccggaaguuguacggcuacgcgacuuucccucccacaaacccucgcgcccuuccuuuccuacuugggcccggcagaaagcuuaccauguucguguuccuggugcugcugccccuggugagcagccagugcgugaaccugaccacccggacccagcugcccccugccuacaccaacagcuucacccggggcguguacuaccccgacaagguguuccggagcagcgugcugcacagcacccaggaccuguuccugcccuucuucagcaacgugaccugguuccacgccauccacgugagcggcaccaacggcaccaagcgguucgacaacccagugcugcccuucaacgacggcguguacuucgccagcaccgagaagucaaacaucauccggggcuggaucuucggcaccacccuggacagcaagacacagagccugcugaucgugaacaacgccaccaacguggugaucaaggugugcgaguuucaguucugcaacgaccccuuccugggcguguacuaccacaagaacaacaagagcuggauggagagcgaguuccgggucuacagcagcgcuaacaauugcaccuucgaguacgugagccagcccuuccugauggaccucgagggcaagcagggcaacuucaagaaccugcgggaguucguguucaagaacaucgauggcuacuucaagaucuacagcaagcacacccccaucaaccuggugcgggaccugccccagggauucagcgcccuggagccucugguggaccugcccaucggcaucaacaucaccagguuccagacccugcuggcccugcaccggagcuaccugacccccggcgacagcagcagcggcuggaccgccggcgccgccgcauacuacgugggcuaccugcagccacggaccuuccugcugaaguacaacgagaacggcaccaucaccgacgccguggacugcgcccuggacccccugagcgagaccaagugcacccuaaagagcuucaccguggagaagggcaucuaccagaccagcaacuuccgggugcagcccacugagagcaucgugcgguuccccaacauuaccaaccugugucccuucggcgagguguucaacgccacccgguucgccagcguguacgccuggaaccggaagcggaucagcaacugcguggccgacuacagcgugcuguacaacagcgccagcuucagcaccuucaagugcuacggcgugagcccuaccaagcugaacgaccugugcuucaccaacguguacgcugacagcuucgugauccggggcgacgaggugcggcagaucgcccccggccagaccggcaagaucgccgacuacaacuacaagcugcccgacgacuucaccggcugcgugaucgccuggaacagcaacaaccuggacagcaaggugggcggcaacuacaacuaccuguaccggcuguuccguaagagcaaccugaagccauucgagcgggacaucagcaccgagaucuaccaggccggcaacacccccugcaacgguguggagggcuuuaacugcuacuucccccugcagagcuacggcuuccagcccaccaacggcgugggcuaccagcccuaccgggugguggugcugagcuucgagcugcugcacgcccccgccaccgugugcggcccuaaaaagagcaccaaccuggugaagaacaagugcgugaauuucaacuucaacggccugaccggcaccggcgugcugaccgagagcaacaagaaguuccugcccuuccagcaguucggccgggauaucgccgacaccaccgacgcagugcgggacccccagacccuggagauccuggacaucaccccaugcagcuucggcggcgugagcgucaucacccccggcacaaacaccagcaaccagguggccgugcuguaccagggagugaacugcaccgaggugcccguggccauccacgccgaccagcugacccccaccuggcggguguacagcaccggcagcaacguguuccagacccgggccggcugccugaucggcgccgagcacgugaacaacagcuacgagugcgacauccccaucggcgcuggcaucugcgccuccuaccagacccagaccaacagcccccggcgggcccggagcguggccagccagagcaucaucgccuacaccaugagcuuaggcgccgagaacagcguggccuacagcaacaacagcaucgcgaucccuaccaacuucaccaucagcgugaccaccgagauacugcccgugagcaugaccaagaccagcguggacuguaccauguacaucugcggcgacagcaccgagugcagcaaccugcugcugcaguacggcagcuucugcacccagcugaaccgggcccugaccggcaucgccguggagcaggacaagaacacccaagagguguucgcccaggugaagcagaucuacaagacucccccaaucaaggacuucggcggcuucaacuucagccagauccugcccgaccccagcaagcccagcaagcggagcuucaucgaggaccugcuguucaacaaggugacccuggccgacgccggcuucaucaagcaguacggcgacugccugggggauaucgccgcucgggaccugaucugcgcccagaaguucaacggccugaccgugcugcccccucugcugaccgacgagaugaucgcccaguacaccagcgcccugcuugccggcaccaucaccagcggcuggaccuucggcgccggcgcagcccugcagauccccuucgccaugcagauggccuaccgguucaacggcaucggcgugacccagaacgugcuguacgagaaccagaagcugaucgccaaccaguucaacagcgccaucggcaagauccaggacagccugagcagcaccgccagcgcccugggcaagcugcaggacguggugaaccagaacgcucaggcccugaacacccuggugaagcagcugagcagcaauuucggcgccaucagcagcgugcugaacgacauccugucaaggcuggaucccccagaggccgaggugcagaucgaccggcugaucaccggccggcugcagagccugcagaccuacgugacccagcagcugauccgggccgccgagauccgggccagcgccaaccuggcagccaccaagaugagcgagugcgugcugggccagagcaagcggguggacuuuugcggcaagggcuaccaccugaugagcuucccccagagcgcuccccacggcgugguguuccuccacgugacauacguccccgcccaggagaagaacuucaccaccgcccccgccauuugccacgacggcaaggcccacuucccccgggagggaguguucgugagcaacggcacccacugguucgugacccagcggaacuucuacgagccucagaucaucaccaccgacaacaccuucgugagcggcaacugcgacguggugaucggcaucgugaacaacaccguguacgacccccugcagcccgagcuggacagcuucaaggaggagcuggacaaguacuucaagaaccacaccagcccagacguggaccugggcgacaucagcggcaucaacgccagcguggugaacauccagaaggagaucgaccggcugaacgagguggccaagaaccugaacgagagccugaucgaccugcaggagcugggcaaguacgagcaguacaucaaguggcccugguacaucuggcugggcuucaucgccggccugaucgccaucgugauggugaccaucaugcugugcugcaugaccagcugcuguagcugccugaagggcugcugcagcugcggcagcugcugcaaguucgacgaggacgacagcgagcccgugcugaagggcgugaagcugcacuacaccugaggacuaguguccaccugucccuccugggcugcuggauugucucguuuuccugccaaauaaacaggaucagcgcuuuacagaucuaaaaaaaaaaaaaaaaaaaaaaaaaaaaaaaaaaaaaaaaaaaaaaaaaaaaaaaaaaaaaaaaaaaaaaaaaaaaaaaaaaaaaaaaaaaaaaaaaaaa

SEQ ID NO: 25336 - RNA, 4105 nt, Artificial Sequence
  SARS-CoV-2/Wuhan/WIV05/2019__EPI_ISL_402128 spike protein mRNA gc (1-1273)(K986P_V987P_N501Y_D614G)
aggagacccgugacccggaaguuguacggcuacgcgacuuucccucccacaaacccucgcgcccuuccuuuccuacuugggcccggcagaaagcuuaccauguucguguuccuggugcugcugccccuggugagcagccagugcgugaaccugaccacccggacccagcugcccccugccuacaccaacagcuucacccggggcguguacuaccccgacaagguguuccggagcagcgugcugcacagcacccaggaccuguuccugcccuucuucagcaacgugaccugguuccacgccauccacgugagcggcaccaacggcaccaagcgguucgacaacccagugcugcccuucaacgacggcguguacuucgccagcaccgagaagucaaacaucauccggggcuggaucuucggcaccacccuggacagcaagacacagagccugcugaucgugaacaacgccaccaacguggugaucaaggugugcgaguuucaguucugcaacgaccccuuccugggcguguacuaccacaagaacaacaagagcuggauggagagcgaguuccgggucuacagcagcgcuaacaauugcaccuucgaguacgugagccagcccuuccugauggaccucgagggcaagcagggcaacuucaagaaccugcgggaguucguguucaagaacaucgauggcuacuucaagaucuacagcaagcacacccccaucaaccuggugcgggaccugccccagggauucagcgcccuggagccucugguggaccugcccaucggcaucaacaucaccagguuccagacccugcuggcccugcaccggagcuaccugacccccggcgacagcagcagcggcuggaccgccggcgccgccgcauacuacgugggcuaccugcagccacggaccuuccugcugaaguacaacgagaacggcaccaucaccgacgccguggacugcgcccuggacccccugagcgagaccaagugcacccuaaagagcuucaccguggagaagggcaucuaccagaccagcaacuuccgggugcagcccacugagagcaucgugcgguuccccaacauuaccaaccugugucccuucggcgagguguucaacgccacccgguucgccagcguguacgccuggaaccggaagcggaucagcaacugcguggccgacuacagcgugcuguacaacagcgccagcuucagcaccuucaagugcuacggcgugagcccuaccaagcugaacgaccugugcuucaccaacguguacgcugacagcuucgugauccggggcgacgaggugcggcagaucgcccccggccagaccggcaagaucgccgacuacaacuacaagcugcccgacgacuucaccggcugcgugaucgccuggaacagcaacaaccuggacagcaaggugggcggcaacuacaacuaccuguaccggcuguuccguaagagcaaccugaagccauucgagcgggacaucagcaccgagaucuaccaggccggcagcacccccugcaacgguguggagggcuuuaacugcuacuucccccugcagagcuacggcuuccagcccaccuacggcgugggcuaccagcccuaccgggugguggugcugagcuucgagcugcugcacgcccccgccaccgugugcggcccuaaaaagagcaccaaccuggugaagaacaagugcgugaacuucaacuucaauggccugaccggcaccggcgugcugaccgagagcaacaagaaguuccugcccuuccagcaguucggccgggauaucgccgacaccaccgacgcagugcgggacccccagacccuggagauccuggacaucaccccaugcagcuucggcggcgugagcgucaucacccccggcacaaacaccagcaaccagguggccgugcuguaccagggagugaacugcaccgaggugcccguggccauccacgccgaccagcugacccccaccuggcggguguacagcaccggcagcaacguguuccagacccgggccggcugccugaucggcgccgagcacgugaacaacuccuacgagugcgacauccccaucggcgcuggcaucugcgccagcuaccagacccagaccaacagcccccggcgggcccggagcguggccagccagagcaucaucgccuacaccaugagcuuaggcgccgagaacagcguggccuacagcaacaacagcaucgcgaucccuaccaacuucaccaucagcgugaccaccgagauacugcccgugagcaugaccaagaccagcguggacuguaccauguacaucugcggcgacagcaccgagugcagcaaccugcugcugcaguacggcagcuucugcacccagcugaaccgggcccugaccggcaucgccguggagcaggacaagaacacccaagagguguucgcccaggugaagcagaucuacaagacucccccaaucaaggacuucggcggcuucaacuucagccagauccugcccgaccccagcaagcccagcaagcggagcuucaucgaggaccugcuguucaacaaggugacccuggccgacgccggcuucaucaagcaguacggcgacugccugggggauaucgccgcucgggaccugaucugcgcccagaaguucaacggccugaccgugcugcccccucugcugaccgacgagaugaucgcccaguacaccagcgcccugcuugccggcaccaucaccagcggcuggaccuucggcgccggcgcagcccugcagauccccuucgccaugcagauggccuaccgguucaacggcaucggcgugacccagaacgugcuguacgagaaccagaagcugaucgccaaccaguucaacagcgccaucggcaagauccaggacagccugagcagcaccgccagcgcccugggcaagcugcaggacguggugaaccagaacgcucaggcccugaacacccuggugaagcagcugagcagcaacuucggcgccaucagcucagugcugaacgacauccugagcaggcuggaucccccagaggccgaggugcagaucgaccggcugaucaccggccggcugcagagccugcagaccuacgugacccagcagcugauccgggccgccgagauccgggccagcgccaaucuggcagccaccaagaugagcgagugcgugcugggccagagcaagcggguggacuuuugcggcaagggcuaccaccugaugagcuucccccagagcgcuccccacggcgugguguuccuccacgugacauacguccccgcccaggagaagaacuucaccaccgcccccgccauuugccacgacggcaaggcccacuucccccgggagggaguguucgugagcaacggcacccacugguucgugacccagcggaacuucuacgagccucagaucaucaccaccgacaacaccuucgugagcggcaacugcgacguggugaucggcaucgugaacaacaccguguacgacccccugcagcccgagcuggacagcuucaaggaggagcuggacaaguacuucaagaaccacaccagcccagacguggaccugggcgacaucagcggcaucaacgccagcguggugaacauccagaaggagaucgaccggcugaacgagguggccaagaaccugaacgagagccugaucgaccugcaggagcugggcaaguacgagcaguacaucaaguggcccugguacaucuggcugggcuucaucgccggccugaucgccaucgugauggugaccaucaugcugugcugcaugaccagcugcuguagcugccugaagggcugcugcagcugcggcagcugcugcaaguucgacgaggacgacagcgagcccgugcugaagggcgugaagcugcacuacaccugaggacuaguguccaccugucccuccugggcugcuggauugucucguuuuccugccaaauaaacaggaucagcgcuuuacagaucuaaaaaaaaaaaaaaaaaaaaaaaaaaaaaaaaaaaaaaaaaaaaaaaaaaaaaaaaaaaaaaaaaaaaaaaaaaaaaaaaaaaaaaaaaaaaaaaaaaaa

SEQ ID NO: 25337 - RNA, 4099 nt, Artificial Sequence
  SARS-CoV-2/Wuhan/WIV05/2019__EPI_ISL_402128 spike protein mRNA gc (1-1273)(K986P_V987P_H69del_V70del_D614G)
aggagacccgugacccggaaguuguacggcuacgcgacuuucccucccacaaacccucgcgcccuuccuuuccuacuugggcccggcagaaagcuuaccauguucguguuccuggugcugcugccccuggugagcagccagugcgugaaccugaccacccggacccagcugcccccugccuacaccaacagcuucacccggggcguguacuaccccgacaagguguuccggagcagcgugcugcacagcacccaggaccuguuccugcccuucuucagcaacgugaccugguuccacgccaucagcggcaccaacggcaccaagcgguucgacaacccagugcugcccuucaacgacggcguguacuucgccagcaccgagaagucaaacaucauccggggcuggaucuucggcaccacccuggacagcaagacacagagccugcugaucgugaacaacgccaccaacguggugaucaaggugugcgaguuucaguucugcaacgaccccuuccugggcguguacuaccacaagaacaacaagagcuggauggagagcgaguuccggguguacagcagcgcuaacaauugcaccuucgaguacgucagccagcccuuccugauggaccucgagggcaagcagggcaacuucaagaaccugcgggaguucguguucaagaacaucgauggcuacuucaagaucuacagcaagcacacccccaucaaccuggugcgggaccugccccagggauucagcgcccuggagccucugguggaccugcccaucggcaucaacaucaccagguuccagacccugcuggcccugcaccggagcuaccugacccccggcgacagcagcagcggcuggaccgccggcgccgccgcauacuacgugggcuaccugcagccacggaccuuccugcugaaguacaacgagaacggcaccaucaccgacgccguggacugcgcccuggacccccugagcgagaccaagugcacccuaaagagcuucaccguggagaagggcaucuaccagaccagcaacuuccgggugcagcccacugagagcaucgugcgguuccccaacauuaccaaccugugucccuucggcgagguguucaacgccacccgguucgccagcguguacgccuggaaccggaagcggaucagcaacugcguggccgacuacagcgugcuguacaacagcgccagcuucagcaccuucaagugcuacggcgugagcccuaccaagcugaacgaccugugcuucaccaacguguacgcugacagcuucgugauccggggcgacgaggugcggcagaucgcccccggccagaccggcaagaucgccgacuacaacuacaagcugcccgacgacuucaccggcugcgugaucgccuggaacagcaacaaccuggacagcaaggugggcggcaacuacaacuaccuguaccggcuguuccguaagagcaaccugaagccauucgagcgggacaucagcaccgagaucuaccaggccggcagcacccccugcaacgguguggagggcuuuaacugcuacuucccccugcagagcuacggcuuccagcccaccaacggcgugggcuaccagcccuaccgggugguggugcugagcuucgagcugcugcacgcccccgccaccgugugcggcccuaaaaagagcaccaaccuggugaagaacaagugcgugaacuucaauuucaacggccugaccggcaccggcgugcugaccgagagcaacaagaaguuccugcccuuccagcaguucggccgggauaucgccgacaccaccgacgcagugcgggacccccagacccuggagauccuggacaucaccccaugcagcuucggcggcgugagcgugaucacccccggcacaaacaccagcaaccaggucgccgugcuguaccagggagugaacugcaccgaggugcccguggccauccacgccgaccagcugacccccaccuggcggguguacagcaccggcagcaacguguuccagacccgggccggcugccugaucggcgccgagcacgugaacaacuccuacgagugcgacauccccaucggcgcuggcaucugcgccagcuaccagacccagaccaacagcccccggcgggcccggagcguggccagccagagcaucaucgccuacaccaugagcuuaggcgccgagaacagcguggccuacagcaacaacagcaucgcgaucccuaccaacuucaccaucagcgugaccaccgagauacugcccgugagcaugaccaagaccagcguggacuguaccauguacaucugcggcgacagcaccgagugcagcaaccugcugcugcaguacggcagcuucugcacccagcugaaccgggcccugaccggcaucgccguggagcaggacaagaacacccaagagguguucgcccaggugaagcagaucuacaagacucccccaaucaaggacuucggcggcuucaacuucagccagauccugcccgaccccagcaagcccagcaagcggagcuucaucgaggaccugcuguucaacaaggugacccuggccgacgccggcuucaucaagcaguacggcgacugccugggggauaucgccgcucgggaccugaucugcgcccagaaguucaacggccugaccgugcugcccccucugcugaccgacgagaugaucgcccaguacaccagcgcccugcuugccggcaccaucaccagcggcuggaccuucggcgccggcgcagcccugcagauccccuucgccaugcagauggccuaccgguucaacggcaucggcgugacccagaacgugcuguacgagaaccagaagcugaucgccaaccaguucaacagcgccaucggcaagauccaggacagccugagcagcaccgccagcgcccugggcaagcugcaggacguggugaaccagaacgcucaggcccugaacacccuggugaagcagcugagcagcaacuucggcgccaucagcucagugcugaaugacauccugagcaggcuggaucccccagaggccgaggugcagaucgaccggcugaucaccggccggcugcagagccugcagaccuacgugacccagcagcugauccgggccgccgagauccgggccagcgccaaccuggcagccaccaagaugagcgagugcgugcugggccagagcaagcggguggacuuuugcggcaagggcuaccaccugaugagcuucccccagagcgcuccccacggcgugguguuccuccacgugacauacgugcccgcccaggagaagaacuucaccaccgcccccgccauuugccacgacggcaaggcccacuucccccgggagggagucuucgugagcaacggcacccacugguucgugacccagcggaacuucuacgagccucagaucaucaccaccgacaacaccuucgugagcggcaacugcgacguggugaucggcaucgugaacaacaccguguacgacccccugcagcccgagcuggacagcuucaaggaggagcuggacaaguacuucaagaaccacaccagcccagacguggaccugggcgacaucagcggcaucaacgccagcguggugaacauccagaaggagaucgaccggcugaacgagguggccaagaaccugaacgagagccugaucgaccugcaggagcugggcaaguacgagcaguacaucaaguggcccugguacaucuggcugggcuucaucgccggccugaucgccaucgugauggugaccaucaugcugugcugcaugaccagcugcuguagcugccugaagggcugcugcagcugcggcagcugcugcaaguucgacgaggacgacagcgagcccgugcugaagggcgugaagcugcacuacaccugaggacuaguguccaccugucccuccugggcugcuggauugucucguuuuccugccaaauaaacaggaucagcgcuuuacagaucuaaaaaaaaaaaaaaaaaaaaaaaaaaaaaaaaaaaaaaaaaaaaaaaaaaaaaaaaaaaaaaaaaaaaaaaaaaaaaaaaaaaaaaaaaaaaaaaaaaaa

SEQ ID NO: 25338 - RNA, 4105 nt, Artificial Sequence
  SARS-CoV-2/Wuhan/WIV05/2019__EPI_ISL_402128 spike protein mRNA gc (1-1273)(K986P_V987P_Y453F_D614G)
aggagacccgugacccggaaguuguacggcuacgcgacuuucccucccacaaacccucgcgcccuuccuuuccuacuugggcccggcagaaagcuuaccauguucguguuccuggugcugcugccccuggugagcagccagugcgugaaccugaccacccggacccagcugcccccugccuacaccaacagcuucacccggggcguguacuaccccgacaagguguuccggagcagcgugcugcacagcacccaggaccuguuccugcccuucuucagcaacgugaccugguuccacgccauccacgugagcggcaccaacggcaccaagcgguucgacaacccagugcugcccuucaacgacggcguguacuucgccagcaccgagaagucaaacaucauccggggcuggaucuucggcaccacccuggacagcaagacacagagccugcugaucgugaacaacgccaccaacguggugaucaaggugugcgaguuucaguucugcaacgaccccuuccugggcguguacuaccacaagaacaacaagagcuggauggagagcgaguuccgggucuacagcagcgcuaacaauugcaccuucgaguacgugagccagcccuuccugauggaccucgagggcaagcagggcaacuucaagaaccugcgggaguucguguucaagaacaucgauggcuacuucaagaucuacagcaagcacacccccaucaaccuggugcgggaccugccccagggauucagcgcccuggagccucugguggaccugcccaucggcaucaacaucaccagguuccagacccugcuggcccugcaccggagcuaccugacccccggcgacagcagcagcggcuggaccgccggcgccgccgcauacuacgugggcuaccugcagccacggaccuuccugcugaaguacaacgagaacggcaccaucaccgacgccguggacugcgcccuggacccccugagcgagaccaagugcacccuaaagagcuucaccguggagaagggcaucuaccagaccagcaacuuccgggugcagcccacugagagcaucgugcgguuccccaacauuaccaaccugugucccuucggcgagguguucaacgccacccgguucgccagcguguacgccuggaaccggaagcggaucagcaacugcguggccgacuacagcgugcuguacaacagcgccagcuucagcaccuucaagugcuacggcgugagcccuaccaagcugaacgaccugugcuucaccaacguguacgcugacagcuucgugauccggggcgacgaggugcggcagaucgcccccggccagaccggcaagaucgccgacuacaacuacaagcugcccgacgacuucaccggcugcgugaucgccuggaacagcaacaaccuggacagcaaggugggcggcaacuacaacuaccuguuccggcuguuccguaagagcaaccugaagccauuugagcgggacaucagcaccgagaucuaccaggccggcagcacccccugcaacgguguggagggcuucaacugcuacuucccccugcagagcuacggcuuccagcccaccaacggcgugggcuaccagcccuaccgggugguggugcugagcuucgagcugcugcacgcccccgccaccgugugcggcccuaaaaagagcaccaaccuggugaagaacaagugcgugaacuucaauuucaacggccugaccggcaccggcgugcugaccgagagcaacaagaaguuccugcccuuccagcaguucggccgggauaucgccgacaccaccgacgcagugcgggacccccagacccuggagauccuggacaucaccccaugcagcuucggcggcgugagcgucaucacccccggcacaaacaccagcaaccagguggccgugcuguaccagggagugaacugcaccgaggugcccguggccauccacgccgaccagcugacccccaccuggcggguguacagcaccggcagcaacguguuccagacccgggccggcugccugaucggcgccgagcacgugaacaacuccuacgagugcgacauccccaucggcgcuggcaucugcgccagcuaccagacccagaccaacagcccccggcgggcccggagcguggccagccagagcaucaucgccuacaccaugagcuuaggcgccgagaacagcguggccuacagcaacaacagcaucgcgaucccuaccaacuucaccaucagcgugaccaccgagauacugcccgugagcaugaccaagaccagcguggacuguaccauguacaucugcggcgacagcaccgagugcagcaaccugcugcugcaguacggcagcuucugcacccagcugaaccgggcccugaccggcaucgccguggagcaggacaagaacacccaagagguguucgcccaggugaagcagaucuacaagacucccccaaucaaggacuucggcggcuucaacuucagccagauccugcccgaccccagcaagcccagcaagcggagcuucaucgaggaccugcuguucaacaaggugacccuggccgacgccggcuucaucaagcaguacggcgacugccugggggauaucgccgcucgggaccugaucugcgcccagaaguucaacggccugaccgugcugcccccucugcugaccgacgagaugaucgcccaguacaccagcgcccugcuugccggcaccaucaccagcggcuggaccuucggcgccggcgcagcccugcagauccccuucgccaugcagauggccuaccgguucaacggcaucggcgugacccagaacgugcuguacgagaaccagaagcugaucgccaaccaguucaacagcgccaucggcaagauccaggacagccugagcagcaccgccagcgcccugggcaagcugcaggacguggugaaccagaacgcucaggcccugaacacccuggugaagcagcugagcagcaacuuuggcgccaucagcucagugcugaaugacauccugagcaggcuggaucccccagaggccgaggugcagaucgaccggcugaucaccggccggcugcagagccugcagaccuacgugacccagcagcugauccgggccgccgagauccgggccagcgccaaccuggcagccaccaagaugagcgagugcgugcugggccagagcaagcggguggacuucugcggcaagggcuaccaccugaugagcuucccccagagcgcuccccacggcgugguguuccuccacgugacauacguccccgcccaggagaagaacuucaccaccgcccccgccauuugccacgacggcaaggcccacuucccccgggagggaguguucgugagcaacggcacccacugguucgugacccagcggaacuucuacgagccucagaucaucaccaccgacaacaccuucgugagcggcaacugcgacguggugaucggcaucgugaacaacaccguguacgacccccugcagcccgagcuggacagcuucaaggaggagcuggacaaguacuucaagaaccacaccagcccagacguggaccugggcgacaucagcggcaucaacgccagcguggugaacauccagaaggagaucgaccggcugaacgagguggccaagaaccugaacgagagccugaucgaccugcaggagcugggcaaguacgagcaguacaucaaguggcccugguacaucuggcugggcuucaucgccggccugaucgccaucgugauggugaccaucaugcugugcugcaugaccagcugcuguagcugccugaagggcugcugcagcugcggcagcugcugcaaguucgacgaggacgacagcgagcccgugcugaagggcgugaagcugcacuacaccugaggacuaguguccaccugucccuccugggcugcuggauugucucguuuuccugccaaauaaacaggaucagcgcuuuacagaucuaaaaaaaaaaaaaaaaaaaaaaaaaaaaaaaaaaaaaaaaaaaaaaaaaaaaaaaaaaaaaaaaaaaaaaaaaaaaaaaaaaaaaaaaaaaaaaaaaaaa

SEQ ID NO: 25339 - RNA, 4105 nt, Artificial Sequence
  SARS-CoV-2/Wuhan/WIV05/2019__EPI_ISL_402128 spike protein mRNA gc (1-1273)(K986P_V987P_D614G_I692V)
aggagacccgugacccggaaguuguacggcuacgcgacuuucccucccacaaacccucgcgcccuuccuuuccuacuugggcccggcagaaagcuuaccauguucguguuccuggugcugcugccccuggugagcagccagugcgugaaccugaccacccggacccagcugcccccugccuacaccaacagcuucacccggggcguguacuaccccgacaagguguuccggagcagcgugcugcacagcacccaggaccuguuccugcccuucuucagcaacgugaccugguuccacgccauccacgugagcggcaccaacggcaccaagcgguucgacaacccagugcugcccuucaacgacggcguguacuucgccagcaccgagaagucaaacaucauccggggcuggaucuucggcaccacccuggacagcaagacacagagccugcugaucgugaacaacgccaccaacguggugaucaaggugugcgaguuucaguucugcaacgaccccuuccugggcguguacuaccacaagaacaacaagagcuggauggagagcgaguuccgggucuacagcagcgcuaacaauugcaccuucgaguacgugagccagcccuuccugauggaccucgagggcaagcagggcaacuucaagaaccugcgggaguucguguucaagaacaucgauggcuacuucaagaucuacagcaagcacacccccaucaaccuggugcgggaccugccccagggauucagcgcccuggagccucugguggaccugcccaucggcaucaacaucaccagguuccagacccugcuggcccugcaccggagcuaccugacccccggcgacagcagcagcggcuggaccgccggcgccgccgcauacuacgugggcuaccugcagccacggaccuuccugcugaaguacaacgagaacggcaccaucaccgacgccguggacugcgcccuggacccccugagcgagaccaagugcacccuaaagagcuucaccguggagaagggcaucuaccagaccagcaacuuccgggugcagcccacugagagcaucgugcgguuccccaacauuaccaaccugugucccuucggcgagguguucaacgccacccgguucgccagcguguacgccuggaaccggaagcggaucagcaacugcguggccgacuacagcgugcuguacaacagcgccagcuucagcaccuucaagugcuacggcgugagcccuaccaagcugaacgaccugugcuucaccaacguguacgcugacagcuucgugauccggggcgacgaggugcggcagaucgcccccggccagaccggcaagaucgccgacuacaacuacaagcugcccgacgacuucaccggcugcgugaucgccuggaacagcaacaaccuggacagcaaggugggcggcaacuacaacuaccuguaccggcuguuccguaagagcaaccugaagccauucgagcgggacaucagcaccgagaucuaccaggccggcagcacccccugcaacgguguggagggcuuuaacugcuacuucccccugcagagcuacggcuuccagcccaccaacggcgugggcuaccagcccuaccgggugguggugcugagcuucgagcugcugcacgcccccgccaccgugugcggcccuaaaaagagcaccaaccuggugaagaacaagugcgugaacuucaauuucaacggccugaccggcaccggcgugcugaccgagagcaacaagaaguuccugcccuuccagcaguucggccgggauaucgccgacaccaccgacgcagugcgggacccccagacccuggagauccuggacaucaccccaugcagcuucggcggcgugagcgucaucacccccggcacaaacaccagcaaccagguggccgugcuguaccagggagugaacugcaccgaggugcccguggccauccacgccgaccagcugacccccaccuggcggguguacagcaccggcagcaacguguuccagacccgggccggcugccugaucggcgccgagcacgugaacaacuccuacgagugcgacauccccaucggcgcuggcaucugcgccagcuaccagacccagaccaacagcccccggcgggcccggagcguggccagccagagcgugaucgccuacaccaugagcuuaggcgccgagaacagcguggccuacagcaacaacagcaucgcgaucccuaccaacuucaccaucagcgugaccaccgagauccugcccgugagcaugaccaagaccagcguggacuguaccauguacauaugcggcgacagcaccgagugcagcaaccugcugcugcaguacggcagcuucugcacccagcugaaccgggcccugaccggcaucgccguggagcaggacaagaacacccaagagguguucgcccaggugaagcagaucuacaagacucccccaaucaaggacuucggcggcuucaacuucagccagauccugcccgaccccagcaagcccagcaagcggagcuucaucgaggaccugcuguucaacaaggugacccuggccgacgccggcuucaucaagcaguacggcgacugccugggggauaucgccgcucgggaccugaucugcgcccagaaguucaacggccugaccgugcugcccccucugcugaccgacgagaugaucgcccaguacaccagcgcccugcuugccggcaccaucaccagcggcuggaccuucggcgccggcgcagcccugcagauccccuucgccaugcagauggccuaccgguucaacggcaucggcgugacccagaacgugcuguacgagaaccagaagcugaucgccaaccaguucaacagcgccaucggcaagauccaggacagccugagcagcaccgccagcgcccugggcaagcugcaggacguggugaaccagaacgcucaggcccugaacacccuggugaagcagcugagcagcaacuucggcgccaucagcucagugcugaaugacauccugagcaggcuggaucccccagaggccgaggugcagaucgaccggcugaucaccggccggcugcagagccugcagaccuacgugacccagcagcugauccgggccgccgagauccgggccagcgccaaccuggcagccaccaagaugagcgagugcgugcugggccagagcaagcggguggacuuuugcggcaagggcuaccaccugaugagcuucccccagagcgcuccccacggcgugguguuccuccacgucacauacgugcccgcccaggagaagaacuucaccaccgcccccgccaucugccacgacggcaaggcccacuucccccgggagggaguguucgugagcaacggcacccacugguucgugacccagcggaacuucuacgagccucagauuaucaccaccgacaacaccuucgugagcggcaacugcgacguggugaucggcaucgugaacaacaccguguacgacccccugcagcccgagcuggacagcuucaaggaggagcuggacaaguacuucaagaaccacaccagcccagacguggaccugggcgacaucagcggcaucaacgccagcguggugaacauccagaaggagaucgaccggcugaacgagguggccaagaaccugaacgagagccugaucgaccugcaggagcugggcaaguacgagcaguacaucaaguggcccugguacaucuggcugggcuucaucgccggccugaucgccaucgugauggugaccaucaugcugugcugcaugaccagcugcuguagcugccugaagggcugcugcagcugcggcagcugcugcaaguucgacgaggacgacagcgagcccgugcugaagggcgugaagcugcacuacaccugaggacuaguguccaccugucccuccugggcugcuggauugucucguuuuccugccaaauaaacaggaucagcgcuuuacagaucuaaaaaaaaaaaaaaaaaaaaaaaaaaaaaaaaaaaaaaaaaaaaaaaaaaaaaaaaaaaaaaaaaaaaaaaaaaaaaaaaaaaaaaaaaaaaaaaaaaaa

SEQ ID NO: 25340 - RNA, 4105 nt, Artificial Sequence
  SARS-CoV-2/Wuhan/WIV05/2019__EPI_ISL_402128 spike protein mRNA gc (1-1273)(K986P_V987P_D614G_M1229I)
aggagacccgugacccggaaguuguacggcuacgcgacuuucccucccacaaacccucgcgcccuuccuuuccuacuugggcccggcagaaagcuuaccauguucguguuccuggugcugcugccccuggugagcagccagugcgugaaccugaccacccggacccagcugcccccugccuacaccaacagcuucacccggggcguguacuaccccgacaagguguuccggagcagcgugcugcacagcacccaggaccuguuccugcccuucuucagcaacgugaccugguuccacgccauccacgugagcggcaccaacggcaccaagcgguucgacaacccagugcugcccuucaacgacggcguguacuucgccagcaccgagaagucaaacaucauccggggcuggaucuucggcaccacccuggacagcaagacacagagccugcugaucgugaacaacgccaccaacguggugaucaaggugugcgaguuucaguucugcaacgaccccuuccugggcguguacuaccacaagaacaacaagagcuggauggagagcgaguuccgggucuacagcagcgcuaacaauugcaccuucgaguacgugagccagcccuuccugauggaccucgagggcaagcagggcaacuucaagaaccugcgggaguucguguucaagaacaucgauggcuacuucaagaucuacagcaagcacacccccaucaaccuggugcgggaccugccccagggauucagcgcccuggagccucugguggaccugcccaucggcaucaacaucaccagguuccagacccugcuggcccugcaccggagcuaccugacccccggcgacagcagcagcggcuggaccgccggcgccgccgcauacuacgugggcuaccugcagccacggaccuuccugcugaaguacaacgagaacggcaccaucaccgacgccguggacugcgcccuggacccccugagcgagaccaagugcacccuaaagagcuucaccguggagaagggcaucuaccagaccagcaacuuccgggugcagcccacugagagcaucgugcgguuccccaacauuaccaaccugugucccuucggcgagguguucaacgccacccgguucgccagcguguacgccuggaaccggaagcggaucagcaacugcguggccgacuacagcgugcuguacaacagcgccagcuucagcaccuucaagugcuacggcgugagcccuaccaagcugaacgaccugugcuucaccaacguguacgcugacagcuucgugauccggggcgacgaggugcggcagaucgcccccggccagaccggcaagaucgccgacuacaacuacaagcugcccgacgacuucaccggcugcgugaucgccuggaacagcaacaaccuggacagcaaggugggcggcaacuacaacuaccuguaccggcuguuccguaagagcaaccugaagccauucgagcgggacaucagcaccgagaucuaccaggccggcagcacccccugcaacgguguggagggcuuuaacugcuacuucccccugcagagcuacggcuuccagcccaccaacggcgugggcuaccagcccuaccgggugguggugcugagcuucgagcugcugcacgcccccgccaccgugugcggcccuaaaaagagcaccaaccuggugaagaacaagugcgugaacuucaauuucaacggccugaccggcaccggcgugcugaccgagagcaacaagaaguuccugcccuuccagcaguucggccgggauaucgccgacaccaccgacgcagugcgggacccccagacccuggagauccuggacaucaccccaugcagcuucggcggcgugagcgucaucacccccggcacaaacaccagcaaccagguggccgugcuguaccagggagugaacugcaccgaggugcccguggccauccacgccgaccagcugacccccaccuggcggguguacagcaccggcagcaacguguuccagacccgggccggcugccugaucggcgccgagcacgugaacaacuccuacgagugcgacauccccaucggcgcuggcaucugcgccagcuaccagacccagaccaacagcccccggcgggcccggagcguggccagccagagcaucaucgccuacaccaugagcuuaggcgccgagaacagcguggccuacagcaacaacagcaucgcgaucccuaccaacuucaccaucagcgugaccaccgagauacugcccgugagcaugaccaagaccagcguggacuguaccauguacaucugcggcgacagcaccgagugcagcaaccugcugcugcaguacggcagcuucugcacccagcugaaccgggcccugaccggcaucgccguggagcaggacaagaacacccaagagguguucgcccaggugaagcagaucuacaagacucccccaaucaaggacuucggcggcuucaacuucagccagauccugcccgaccccagcaagcccagcaagcggagcuucaucgaggaccugcuguucaacaaggugacccuggccgacgccggcuucaucaagcaguacggcgacugccugggggauaucgccgcucgggaccugaucugcgcccagaaguucaacggccugaccgugcugcccccucugcugaccgacgagaugaucgcccaguacaccagcgcccugcuugccggcaccaucaccagcggcuggaccuucggcgccggcgcagcccugcagauccccuucgccaugcagauggccuaccgguucaacggcaucggcgugacccagaacgugcuguacgagaaccagaagcugaucgccaaccaguucaacagcgccaucggcaagauccaggacagccugagcagcaccgccagcgcccugggcaagcugcaggacguggugaaccagaacgcucaggcccugaacacccuggugaagcagcugagcagcaacuucggcgccaucagcucagugcugaaugacauccugagcaggcuggaucccccagaggccgaggugcagaucgaccggcugaucaccggccggcugcagagccugcagaccuacgugacccagcagcugauccgggccgccgagauccgggccagcgccaaccuggcagccaccaagaugagcgagugcgugcugggccagagcaagcggguggacuuuugcggcaagggcuaccaccugaugagcuucccccagagcgcuccccacggcgugguguuccuccacgugacauacguccccgcccaggagaagaacuucaccaccgcccccgccauuugccacgacggcaaggcccacuucccccgggagggaguguucgugagcaacggcacccacugguucgugacccagcggaacuucuacgagccucagaucaucaccaccgacaacaccuucgugagcggcaacugcgacguggugaucggcaucgugaacaacaccguguacgacccccugcagcccgagcuggacagcuucaaggaggagcuggacaaguacuucaagaaccacaccagcccagacguggaccugggcgacaucagcggcaucaacgccagcguggugaacauccagaaggagaucgaccggcugaacgagguggccaagaaccugaacgagagccugaucgaccugcaggagcugggcaaguacgagcaguacaucaaguggcccugguacaucuggcugggcuucaucgccggccugaucgccaucgugaucgugaccaucaugcugugcugcaugaccagcugcuguagcugccugaagggcugcugcagcugcggcagcugcugcaaguucgacgaggacgacagcgagcccgugcugaagggcgugaagcugcacuacaccugaggacuaguguccaccugucccuccugggcugcuggauugucucguuuuccugccaaauaaacaggaucagcgcuuuacagaucuaaaaaaaaaaaaaaaaaaaaaaaaaaaaaaaaaaaaaaaaaaaaaaaaaaaaaaaaaaaaaaaaaaaaaaaaaaaaaaaaaaaaaaaaaaaaaaaaaaaa

SEQ ID NO: 25341 - RNA, 4099 nt, Artificial Sequence
  SARS-CoV-2/Wuhan/WIV05/2019__EPI_ISL_402128 spike protein mRNA gc (1-1273)(K986P_V987P_H69del_V70del_A222V_Y453F_S477N_D614G_I692V)
aggagacccgugacccggaaguuguacggcuacgcgacuuucccucccacaaacccucgcgcccuuccuuuccuacuugggcccggcagaaagcuuaccauguucguguuccuggugcugcugccccuggugagcagccagugcgugaaccugaccacccggacccagcugcccccugccuacaccaacagcuucacccggggcguguacuaccccgacaagguguuccggagcagcgugcugcacagcacccaggaccuguuccugcccuucuucagcaacgugaccugguuccacgccaucagcggcaccaacggcaccaagcgguucgacaacccagugcugcccuucaacgacggcguguacuucgccagcaccgagaagucaaacaucauccggggcuggaucuucggcaccacccuggacagcaagacacagagccugcugaucgugaacaacgccaccaacguggugaucaaggugugcgaguuucaguucugcaacgaccccuuccugggcguguacuaccacaagaacaacaagagcuggauggagagcgaguuccggguguacagcagcgcuaacaauugcaccuucgaguacgucagccagcccuuccugauggaccucgagggcaagcagggcaacuucaagaaccugcgggaguucguguucaagaacaucgauggcuacuucaagaucuacagcaagcacacccccaucaaccuggugcgggaccugccccagggauucagcgugcuggagccucugguggaccugcccaucggcaucaacaucaccagguuccagacccugcuggcccugcaccggagcuaccugacccccggcgacagcagcagcggcuggaccgccggcgccgccgccuacuacgugggcuaccugcagccacggaccuuccugcugaaguacaacgagaacggcaccaucaccgacgcaguggacugcgcccuggacccccugagcgagaccaagugcacccuaaagagcuucaccguggagaagggcaucuaccagaccagcaacuuccgggugcagcccacugagagcaucgugcgguuccccaacauuaccaaccugugucccuucggcgagguguucaacgccacccgguucgccagcguguacgccuggaaccggaagcggaucagcaacugcguggccgacuacagcgugcuguacaacagcgccagcuucagcaccuucaagugcuacggcgugagcccuaccaagcugaacgaccugugcuucaccaacguguacgccgacagcuucgugauccggggcgacgaggugcggcagaucgcucccggccagaccggcaagaucgccgacuacaacuacaagcugcccgacgacuucaccggcugcgugaucgccuggaacagcaacaaccuggacagcaaggugggcggcaacuacaacuaccuguuccggcuguuccguaagagcaaccugaagccauuugagcgggacaucagcaccgagaucuaccaggccggcaacacccccugcaacgguguggagggcuucaacugcuacuucccccugcagagcuacggcuuccagcccaccaacggcgugggcuaccagcccuaccgggugguggugcugagcuucgagcugcugcacgcccccgccaccgugugcggcccuaaaaagagcaccaaccuggugaagaacaagugcgugaauuucaacuucaacggccugaccggcaccggcgugcugaccgagagcaacaagaaguuccugcccuuccagcaguucggccgggauaucgccgacaccaccgacgccgugcgggacccccagacccuggagauccuggacaucaccccaugcagcuucggcggcgugagcgucaucacccccggcacaaacaccagcaaccagguggcagugcuguaccagggagugaacugcaccgaggugcccguggccauccacgccgaccagcugacccccaccuggcggguguacagcaccggcagcaacguguuccagacccgggccggcugccugaucggcgccgagcacgugaacaacagcuacgagugcgacauccccaucggcgccggcaucugcgcuuccuaccagacccagaccaacagcccccggcgggcccggagcguggccagccagagcgugaucgccuacaccaugagcuuaggcgccgagaacagcguggccuacagcaacaacagcaucgccaucccuaccaacuucaccaucagcgugaccaccgagauccugcccgugagcaugaccaagaccagcguggacuguaccauguacauaugcggcgacagcaccgagugcagcaaccugcugcugcaguacggcagcuucugcacccagcugaaccgggcgcugaccggcaucgccguggagcaggacaagaacacccaagagguguucgcccaggugaagcagaucuacaagacucccccaaucaaggacuucggcggcuucaacuucagccagauccugcccgaccccagcaagcccagcaagcggagcuucaucgaggaccugcuguucaacaaggugacccuggccgacgccggcuucaucaagcaguacggcgacugccugggggauaucgccgcccgggaccugaucugcgcucagaaguucaacggccugaccgugcugcccccucugcugaccgacgagaugaucgcccaguacaccagcgcccugcuugccggcaccaucaccagcggcuggaccuucggcgccggcgccgcacugcagauccccuucgccaugcagauggccuaccgguucaacggcaucggcgugacccagaacgugcuguacgagaaccagaagcugaucgccaaccaguucaacagcgccaucggcaagauccaggacagccugagcagcaccgccagcgcccugggcaagcugcaggacguggugaaccagaacgcccaggcucugaacacccuggugaagcagcugagcagcaauuuuggcgccaucagcagcgugcugaacgacauccugucaaggcuggaucccccagaggccgaggugcagaucgaccggcugaucaccggccggcugcagagccugcagaccuacgugacccagcagcugauccgggccgccgagauccgggccagcgccaaccuggccgcaaccaagaugagcgagugcgugcugggccagagcaagcggguggacuucugcggcaagggcuaccaccugaugagcuucccccagagcgcuccccacggcgugguguuccuccacgucacauacgugcccgcccaggagaagaacuucaccaccgcccccgccaucugccacgacggcaaggcccacuucccccgggagggaguguucgugagcaacggcacccacugguucgugacccagcggaacuucuacgagccucagauuaucaccaccgacaacaccuucgugagcggcaacugcgacguggugaucggcaucgugaacaacaccguguacgacccccugcagcccgagcuggacagcuucaaggaggagcuggacaaguacuucaagaaccacaccagcccagacguggaccugggcgacaucagcggcaucaacgccagcguggugaacauccagaaggagaucgaccggcugaacgagguggccaagaaccugaacgagagccugaucgaccugcaggagcugggcaaguacgagcaguacaucaaguggcccugguacaucuggcugggcuucaucgccggccugaucgccaucgugauggugaccaucaugcugugcugcaugaccagcugcuguagcugccugaagggcugcugcagcugcggcagcugcugcaaguucgacgaggacgacagcgagcccgugcugaagggcgugaagcugcacuacaccugaggacuaguguccaccugucccuccugggcugcuggauugucucguuuuccugccaaauaaacaggaucagcgcuuuacagaucuaaaaaaaaaaaaaaaaaaaaaaaaaaaaaaaaaaaaaaaaaaaaaaaaaaaaaaaaaaaaaaaaaaaaaaaaaaaaaaaaaaaaaaaaaaaaaaaaaaaa

SEQ ID NO: 25342 - RNA, 4099 nt, Artificial Sequence
  SARS-CoV-2/Wuhan/WIV05/2019__EPI_ISL_402128 spike protein mRNA gc (1-1273)(K986P_V987P_H69del_V70del_Y453F_D614G_I692V_M1229I)
aggagacccgugacccggaaguuguacggcuacgcgacuuucccucccacaaacccucgcgcccuuccuuuccuacuugggcccggcagaaagcuuaccauguucguguuccuggugcugcugccccuggugagcagccagugcgugaaccugaccacccggacccagcugcccccugccuacaccaacagcuucacccggggcguguacuaccccgacaagguguuccggagcagcgugcugcacagcacccaggaccuguuccugcccuucuucagcaacgugaccugguuccacgccaucagcggcaccaacggcaccaagcgguucgacaacccagugcugcccuucaacgacggcguguacuucgccagcaccgagaagucaaacaucauccggggcuggaucuucggcaccacccuggacagcaagacacagagccugcugaucgugaacaacgccaccaacguggugaucaaggugugcgaguuucaguucugcaacgaccccuuccugggcguguacuaccacaagaacaacaagagcuggauggagagcgaguuccggguguacagcagcgcuaacaauugcaccuucgaguacgucagccagcccuuccugauggaccucgagggcaagcagggcaacuucaagaaccugcgggaguucguguucaagaacaucgauggcuacuucaagaucuacagcaagcacacccccaucaaccuggugcgggaccugccccagggauucagcgcccuggagccucugguggaccugcccaucggcaucaacaucaccagguuccagacccugcuggcccugcaccggagcuaccugacccccggcgacagcagcagcggcuggaccgccggcgccgccgcauacuacgugggcuaccugcagccacggaccuuccugcugaaguacaacgagaacggcaccaucaccgacgccguggacugcgcccuggacccccugagcgagaccaagugcacccuaaagagcuucaccguggagaagggcaucuaccagaccagcaacuuccgggugcagcccacugagagcaucgugcgguuccccaacauuaccaaccugugucccuucggcgagguguucaacgccacccgguucgccagcguguacgccuggaaccggaagcggaucagcaacugcguggccgacuacagcgugcuguacaacagcgccagcuucagcaccuucaagugcuacggcgugagcccuaccaagcugaacgaccugugcuucaccaacguguacgcugacagcuucgugauccggggcgacgaggugcggcagaucgcccccggccagaccggcaagaucgccgacuacaacuacaagcugcccgacgacuucaccggcugcgugaucgccuggaacagcaacaaccuggacagcaaggugggcggcaacuacaacuaccuguuccggcuguuccguaagagcaaccugaagccauuugagcgggacaucagcaccgagaucuaccaggccggcagcacccccugcaacgguguggagggcuucaacugcuacuucccccugcagagcuacggcuuccagcccaccaacggcgugggcuaccagcccuaccgggugguggugcugagcuucgagcugcugcacgcccccgccaccgugugcggcccuaaaaagagcaccaaccuggugaagaacaagugcgugaacuucaauuucaacggccugaccggcaccggcgugcugaccgagagcaacaagaaguuccugcccuuccagcaguucggccgggauaucgccgacaccaccgacgcagugcgggacccccagacccuggagauccuggacaucaccccaugcagcuucggcggcgugagcgugaucacccccggcacaaacaccagcaaccaggucgccgugcuguaccagggagugaacugcaccgaggugcccguggccauccacgccgaccagcugacccccaccuggcggguguacagcaccggcagcaacguguuccagacccgggccggcugccugaucggcgccgagcacgugaacaacuccuacgagugcgacauccccaucggcgcuggcaucugcgccagcuaccagacccagaccaacagcccccggcgggcccggagcguggccagccagagcgugaucgccuacaccaugagcuuaggcgccgagaacagcguggccuacagcaacaacagcaucgcgaucccuaccaacuucaccaucagcgugaccaccgagauccugcccgugagcaugaccaagaccagcguggacuguaccauguacauaugcggcgacagcaccgagugcagcaaccugcugcugcaguacggcagcuucugcacccagcugaaccgggcccugaccggcaucgccguggagcaggacaagaacacccaagagguguucgcccaggugaagcagaucuacaagacucccccaaucaaggacuucggcggcuucaacuucagccagauccugcccgaccccagcaagcccagcaagcggagcuucaucgaggaccugcuguucaacaaggugacccuggccgacgccggcuucaucaagcaguacggcgacugccugggggauaucgccgcucgggaccugaucugcgcccagaaguucaacggccugaccgugcugcccccucugcugaccgacgagaugaucgcccaguacaccagcgcccugcuugccggcaccaucaccagcggcuggaccuucggcgccggcgcagcccugcagauccccuucgccaugcagauggccuaccgguucaacggcaucggcgugacccagaacgugcuguacgagaaccagaagcugaucgccaaccaguucaacagcgccaucggcaagauccaggacagccugagcagcaccgccagcgcccugggcaagcugcaggacguggugaaccagaacgcucaggcccugaacacccuggugaagcagcugagcagcaacuuuggcgccaucagcucagugcugaaugacauccugagcaggcuggaucccccagaggccgaggugcagaucgaccggcugaucaccggccggcugcagagccugcagaccuacgugacccagcagcugauccgggccgccgagauccgggccagcgccaaccuggcagccaccaagaugagcgagugcgugcugggccagagcaagcggguggacuucugcggcaagggcuaccaccugaugagcuucccccagagcgcuccccacggcgugguguuccuccacgugacauacguccccgcccaggagaagaacuucaccaccgcccccgccaucugccacgacggcaaggcccacuucccccgggagggaguguucgugagcaacggcacccacugguucgugacccagcggaacuucuacgagccucagauuaucaccaccgacaacaccuucgugagcggcaacugcgacguggugaucggcaucgugaacaacaccguguacgacccccugcagcccgagcuggacagcuucaaggaggagcuggacaaguacuucaagaaccacaccagcccagacguggaccugggcgacaucagcggcaucaacgccagcguggugaacauccagaaggagaucgaccggcugaacgagguggccaagaaccugaacgagagccugaucgaccugcaggagcugggcaaguacgagcaguacaucaaguggcccugguacaucuggcugggcuucaucgccggccugaucgccaucgugaucgugaccaucaugcugugcugcaugaccagcugcuguagcugccugaagggcugcugcagcugcggcagcugcugcaaguucgacgaggacgacagcgagcccgugcugaagggcgugaagcugcacuacaccugaggacuaguguccaccugucccuccugggcugcuggauugucucguuuuccugccaaauaaacaggaucagcgcuuuacagaucuaaaaaaaaaaaaaaaaaaaaaaaaaaaaaaaaaaaaaaaaaaaaaaaaaaaaaaaaaaaaaaaaaaaaaaaaaaaaaaaaaaaaaaaaaaaaaaaaaaaa

SEQ ID NO: 25343 - RNA, 4096 nt, Artificial Sequence
  SARS-CoV-2/Wuhan/WIV05/2019__EPI_ISL_402128 spike protein mRNA gc (1-1273)(K986P_V987P_K986P_V987P_H69del_V70del_Y144del_N501Y_A570 D_D614G_P681H_T716I_S982A_D1118H)
aggagacccgugacccggaaguuguacggcuacgcgacuuucccucccacaaacccucgcgcccuuccuuuccuacuugggcccggcagaaagcuuaccauguucguguuccuggugcugcugccccuggugagcagccagugcgugaaccugaccacccggacccagcugcccccugccuacaccaacagcuucacccggggcguguacuaccccgacaagguguuccggagcagcgugcugcacagcacccaggaccuguuccugcccuucuucagcaacgugaccugguuccacgccaucagcggcaccaacggcaccaagcgguucgacaacccagugcugcccuucaacgacggcguguacuucgccagcaccgagaagucaaacaucauccggggcuggaucuucggcaccacccuggacagcaagacacagagccugcugaucgugaacaacgccaccaacguggugaucaaggugugcgaguuucaguucugcaacgaccccuuccugggcguguaccacaagaacaacaagagcuggauggagagcgaguuccggguguacagcagcgcuaacaauugcaccuucgaguacgucagccagcccuuccugauggaccucgagggcaagcagggcaacuucaagaaccugcgggaguucguguucaagaacaucgauggcuacuucaagaucuacagcaagcacacccccaucaaccuggugcgggaccugccccagggauucagcgcccuggagccucugguggaccugcccaucggcaucaacaucaccagguuccagacccugcuggcccugcaccggagcuaccugacccccggcgacagcagcagcggcuggaccgccggcgccgccgcauacuacgugggcuaccugcagccacggaccuuccugcugaaguacaacgagaacggcaccaucaccgacgccguggacugcgcccuggacccccugagcgagaccaagugcacccuaaagagcuucaccguggagaagggcaucuaccagaccagcaacuuccgggugcagcccacugagagcaucgugcgguuccccaacauuaccaaccugugucccuucggcgagguguucaacgccacccgguucgccagcguguacgccuggaaccggaagcggaucagcaacugcguggccgacuacagcgugcuguacaacagcgccagcuucagcaccuucaagugcuacggcgugagcccuaccaagcugaacgaccugugcuucaccaacguguacgcugacagcuucgugauccggggcgacgaggugcggcagaucgcccccggccagaccggcaagaucgccgacuacaacuacaagcugcccgacgacuucaccggcugcgugaucgccuggaacagcaacaaccuggacagcaaggugggcggcaacuacaacuaccuguaccggcuguuccguaagagcaaccugaagccauucgagcgggacaucagcaccgagaucuaccaggccggcagcacccccugcaacgguguggagggcuuuaacugcuacuucccccugcagagcuacggcuuccagcccaccuacggcgugggcuaccagcccuaccgggugguggugcugagcuucgagcugcugcacgcccccgccaccgugugcggcccuaaaaagagcaccaaccuggugaagaacaagugcgugaacuucaacuucaauggccugaccggcaccggcgugcugaccgagagcaacaagaaguuccugcccuuccagcaguucggccgggauaucgacgacaccaccgacgccgugcgggacccccagacccuggagauccuggacaucaccccaugcagcuucggcggcgugagcgugaucacccccggcacaaacaccagcaaccaggucgcagugcuguaccagggagugaacugcaccgaggugcccguggccauccacgccgaccagcugacccccaccuggcggguguacagcaccggcagcaacguguuccagacccgggccggcugccugaucggcgccgagcacgugaacaacuccuacgagugcgacauccccaucggcgccggcaucugcgcuagcuaccagacccagaccaacagccaccggcgggcccggagcguggccagccagagcaucaucgccuacaccaugagcuuaggcgccgagaacagcguggccuacagcaacaacagcaucgccauccccaucaacuucaccauaagcgugaccaccgagauccugccugugagcaugaccaagaccagcguggacuguaccauguacaucugcggcgacagcaccgagugcagcaaccugcugcugcaguacggcagcuucugcacccagcugaaccgggcgcugaccggcaucgccguggagcaggacaagaacacccaagagguguucgcccaggugaagcagaucuacaagaccccacccaucaaggacuucggcggcuucaacuucagccagauccugcccgaccccagcaagcccagcaagcggagcuucaucgaggaccugcuguucaacaaggugacucuggccgacgccggcuucaucaagcaguacggcgauugccugggggacaucgccgcccgggaccugaucugcgcucagaaguucaacggccugaccgugcugccuccccugcugaccgacgagaugaucgcccaguacaccagcgcccugcuugccggcaccaucaccagcggcuggaccuucggcgccggcgccgcacugcagauccccuucgccaugcagauggccuaccgguucaacggcaucggcgugacccagaacgugcuguacgagaaccagaagcugaucgccaaccaguucaacagcgccaucggcaagauccaggacagccugagcagcaccgccagcgcccugggcaagcugcaggacguggugaaccagaacgcccaggcucugaacacccuggugaagcagcugagcagcaacuucggcgccaucagcucagugcugaacgacauccuggccaggcuggacccacccgaggccgaggugcagaucgaccggcugaucaccggccggcugcagagccugcagaccuacgugacccagcagcugauccgggccgccgagauucgggccagcgccaaucuggcagccaccaagaugagcgagugcgugcugggccagagcaagcggguggacuuuugcggcaagggcuaccaccugaugagcuucccccagagcgcuccccacggcgugguguuccuccacgugaccuacgugcccgcccaggagaagaacuucacaaccgcccccgccaucugccacgacggcaaggcccacuucccccgggagggagucuucgugagcaacggcacccacugguucgugacccagcggaacuucuacgagccccagaucaucaccacccacaacaccuucgugagcggcaacugcgacguggugaucggcaucgugaacaacaccguguacgacccucugcagcccgagcuggacagcuucaaggaggagcuggacaaguacuucaagaaccacaccagccccgacguggaucugggcgacaucagcggcaucaacgccagcguggugaacauccagaaggagaucgaccggcugaacgagguggccaagaaccugaacgagagccugaucgaccugcaggagcugggcaaguacgagcaguacaucaaguggccaugguacaucuggcugggcuucaucgccggccugaucgccaucgugauggugaccaucaugcugugcugcaugaccagcugcuguagcugccugaagggcugcugcagcugcggcagcugcugcaaguucgacgaggacgacagcgagcccgugcugaagggcgugaagcugcacuacaccugaggacuaguguccaccugucccuccugggcugcuggauugucucguuuuccugccaaauaaacaggaucagcgcuuuacagaucuaaaaaaaaaaaaaaaaaaaaaaaaaaaaaaaaaaaaaaaaaaaaaaaaaaaaaaaaaaaaaaaaaaaaaaaaaaaaaaaaaaaaaaaaaaaaaaaaaaaa

SEQ ID NO: 25344 - RNA, 4105 nt, Artificial Sequence
  SARS-CoV-2/Wuhan/WIV05/2019__EPI_ISL_402128 spike protein mRNA gc (1-1273)(K986P_V987P_K986P_V987P_K417N_E484K_N501Y_D614G)
aggagacccgugacccggaaguuguacggcuacgcgacuuucccucccacaaacccucgcgcccuuccuuuccuacuugggcccggcagaaagcuuaccauguucguguuccuggugcugcugccccuggugagcagccagugcgugaaccugaccacccggacccagcugcccccugccuacaccaacagcuucacccggggcguguacuaccccgacaagguguuccggagcagcgugcugcacagcacccaggaccuguuccugcccuucuucagcaacgugaccugguuccacgccauccacgugagcggcaccaacggcaccaagcgguucgacaacccagugcugcccuucaacgacggcguguacuucgccagcaccgagaagucaaacaucauccggggcuggaucuucggcaccacccuggacagcaagacacagagccugcugaucgugaacaacgccaccaacguggugaucaaggugugcgaguuucaguucugcaacgaccccuuccugggcguguacuaccacaagaacaacaagagcuggauggagagcgaguuccgggucuacagcagcgcuaacaauugcaccuucgaguacgugagccagcccuuccugauggaccucgagggcaagcagggcaacuucaagaaccugcgggaguucguguucaagaacaucgauggcuacuucaagaucuacagcaagcacacccccaucaaccuggugcgggaccugccccagggauucagcgcccuggagccucugguggaccugcccaucggcaucaacaucaccagguuccagacccugcuggcccugcaccggagcuaccugacccccggcgacagcagcagcggcuggaccgccggcgccgccgcauacuacgugggcuaccugcagccacggaccuuccugcugaaguacaacgagaacggcaccaucaccgacgccguggacugcgcccuggacccccugagcgagaccaagugcacccuaaagagcuucaccguggagaagggcaucuaccagaccagcaacuuccgggugcagcccacugagagcaucgugcgguuccccaacauuaccaaccugugucccuucggcgagguguucaacgccacccgguucgccagcguguacgccuggaaccggaagcggaucagcaacugcguggccgacuacagcgugcuguacaacagcgccagcuucagcaccuucaagugcuacggcgugagcccuaccaagcugaacgaccugugcuucaccaacguguacgcugacagcuucgugauccggggcgacgaggugcggcagaucgcccccggccagaccggcaacaucgccgacuacaacuacaagcugcccgacgacuucaccggcugcgugaucgccuggaacagcaacaaccuggacagcaaggugggcggcaacuacaacuaccuguaccggcuguuccguaagagcaaccugaagccauucgagcgggacaucagcaccgagaucuaccaggccggcagcacccccugcaacggugugaagggcuuuaacugcuacuucccccugcagagcuacggcuuccagcccaccuacggcgugggcuaccagcccuaccgggugguggugcugagcuucgagcugcugcacgcccccgccaccgugugcggcccuaaaaagagcaccaaccuggugaagaacaagugcgugaacuucaauuucaacggccugaccggcaccggcgugcugaccgagagcaacaagaaguuccugcccuuccagcaguucggccgggauaucgccgacaccaccgacgcagugcgggacccccagacccuggagauccuggacaucaccccaugcagcuucggcggcgugagcgucaucacccccggcacaaacaccagcaaccagguggccgugcuguaccagggagugaacugcaccgaggugcccguggccauccacgccgaccagcugacccccaccuggcggguguacagcaccggcagcaacguguuccagacccgggccggcugccugaucggcgccgagcacgugaacaacuccuacgagugcgacauccccaucggcgcuggcaucugcgccagcuaccagacccagaccaacagcccccggcgggcccggagcguggccagccagagcaucaucgccuacaccaugagcuuaggcgccgagaacagcguggccuacagcaacaacagcaucgcgaucccuaccaacuucaccaucagcgugaccaccgagauacugcccgugagcaugaccaagaccagcguggacuguaccauguacaucugcggcgacagcaccgagugcagcaaccugcugcugcaguacggcagcuucugcacccagcugaaccgggcccugaccggcaucgccguggagcaggacaagaacacccaagagguguucgcccaggugaagcagaucuacaagacucccccaaucaaggacuucggcggcuucaacuucagccagauccugcccgaccccagcaagcccagcaagcggagcuucaucgaggaccugcuguucaacaaggugacccuggccgacgccggcuucaucaagcaguacggcgacugccugggggauaucgccgcucgggaccugaucugcgcccagaaguucaacggccugaccgugcugcccccucugcugaccgacgagaugaucgcccaguacaccagcgcccugcuugccggcaccaucaccagcggcuggaccuucggcgccggcgcagcccugcagauccccuucgccaugcagauggccuaccgguucaacggcaucggcgugacccagaacgugcuguacgagaaccagaagcugaucgccaaccaguucaacagcgccaucggcaagauccaggacagccugagcagcaccgccagcgcccugggcaagcugcaggacguggugaaccagaacgcucaggcccugaacacccuggugaagcagcugagcagcaacuucggcgccaucagcucagugcugaaugacauccugagcaggcuggaucccccagaggccgaggugcagaucgaccggcugaucaccggccggcugcagagccugcagaccuacgugacccagcagcugauccgggccgccgagauccgggccagcgccaaccuggcagccaccaagaugagcgagugcgugcugggccagagcaagcggguggacuuuugcggcaagggcuaccaccugaugagcuucccccagagcgcuccccacggcgugguguuccuccacgugacauacguccccgcccaggagaagaacuucaccaccgcccccgccauuugccacgacggcaaggcccacuucccccgggagggaguguucgugagcaacggcacccacugguucgugacccagcggaacuucuacgagccucagaucaucaccaccgacaacaccuucgugagcggcaacugcgacguggugaucggcaucgugaacaacaccguguacgacccccugcagcccgagcuggacagcuucaaggaggagcuggacaaguacuucaagaaccacaccagcccagacguggaccugggcgacaucagcggcaucaacgccagcguggugaacauccagaaggagaucgaccggcugaacgagguggccaagaaccugaacgagagccugaucgaccugcaggagcugggcaaguacgagcaguacaucaaguggcccugguacaucuggcugggcuucaucgccggccugaucgccaucgugauggugaccaucaugcugugcugcaugaccagcugcuguagcugccugaagggcugcugcagcugcggcagcugcugcaaguucgacgaggacgacagcgagcccgugcugaagggcgugaagcugcacuacaccugaggacuaguguccaccugucccuccugggcugcuggauugucucguuuuccugccaaauaaacaggaucagcgcuuuacagaucuaaaaaaaaaaaaaaaaaaaaaaaaaaaaaaaaaaaaaaaaaaaaaaaaaaaaaaaaaaaaaaaaaaaaaaaaaaaaaaaaaaaaaaaaaaaaaaaaaaaa

SEQ ID NO: 25345 - RNA, 4096 nt, Artificial Sequence
  SARS-CoV-2/Wuhan/WIV05/2019__EPI_ISL_402128 spike protein mRNA gc (1-1273)(K986P_V987P_K986P_V987P_L18F_D80A_D215G_L242del_A243del_ L244del_R246I_K417N_E484K_N501Y_D614G_A701V)
aggagacccgugacccggaaguuguacggcuacgcgacuuucccucccacaaacccucgcgcccuuccuuuccuacuugggcccggcagaaagcuuaccauguucguguuccuggugcugcugccccuggugagcagccagugcgugaacuucaccacccggacccagcugcccccugccuacaccaacagcuucacccggggcguguacuaccccgacaagguguuccggagcagcgugcugcacagcacccaggaccuguuccugcccuucuucagcaacgugaccugguuccacgccauccacgugagcggcaccaacggcaccaagcgguucgccaacccagugcugcccuucaacgacggcguguacuucgccagcaccgagaagucaaacaucauccggggcuggaucuuuggcaccacccuggacagcaagacacagagccugcugaucgugaacaacgcuaccaacguggugaucaaggugugcgaguuccaguucugcaacgaccccuuccugggcguguacuaccacaagaacaacaagagcuggauggagagcgaguuccgggucuacagcagcgccaacaauugcaccuucgaguacgugagccagcccuuccugauggaccuggagggcaagcagggcaacuucaagaaccuccgggaguucguguucaagaacaucgacggcuacuucaagaucuacagcaagcacacccccaucaaccuggugcggggacugccccagggcuucagcgcccuggagccucugguggaucugcccaucggcaucaacaucaccagguuccagacccugcacaucagcuaccugacccccggcgacagcagcagcggcuggaccgccggcgccgccgcauacuacgugggcuaccugcagccacggaccuuccugcugaaguacaacgagaacggcaccaucaccgacgccguggacugcgcccuggacccccugagcgagaccaagugcacccuuaagagcuucaccguggagaagggcaucuaccagaccagcaacuuccgggugcagcccacugagagcauugugcgguuccccaacaucaccaaccugugucccuucggcgagguguucaacgccacccgguucgccagcguguacgccuggaaccggaagcggaucagcaacugcguggccgacuacagcgugcuguacaacagcgccagcuucagcaccuucaagugcuacggcgugagcccuaccaagcugaacgaccugugcuucaccaacguguacgcugacagcuucgugauccggggcgacgaggugcggcagaucgcccccggccagaccggcaacaucgccgacuacaacuacaagcugcccgacgacuucaccggcugcgugaucgccuggaacagcaacaaccuggacagcaaggugggcggcaacuacaacuaccuguaccggcuauuccguaagagcaaccugaagccauuugagcgggacaucagcaccgagaucuaccaggccgguagcacccccugcaacggcgugaagggcuucaacugcuacuucccccugcagagcuacggcuuccagcccaccuacggcgugggcuaccagcccuaccgggugguggugcugagcuucgagcugcugcacgcccccgccaccgugugcggcccuaaaaagagcaccaaccuggugaagaacaagugcgugaacuucaauuucaacggccugaccggcaccggcgugcugaccgagagcaacaagaaguuccugcccuuccagcaguucggccgggacaucgccgacaccaccgaugcagugcgggacccccagacccuggagauccuggacaucaccccaugcagcuucggcggcgugagcgucaucacccccggaacaaacaccagcaaccagguggccgugcuguaccagggcgugaacugcaccgaggugcccguggccauccacgccgaccagcugacccccaccuggcggguguacagcaccggcagcaacguguuccagacccgggccggcugccugaucggcgccgagcacgugaacaacuccuacgagugcgacauccccaucggcgcuggcaucugcgccagcuaccagacccagaccaacagcccccggcgggcccggagcguggccagccagagcaucaucgccuacaccaugagccugggcguggagaacagcguggccuacagcaacaacagcaucgccaucccuaccaacuucaccauaagcgugaccaccgagauccugcccgugagcaugaccaagaccagcguggacuguaccauguacaucugcggcgacagcaccgagugcagcaaccuguuacugcaguacggcagcuucugcacccagcugaaccgggcgcugaccggcaucgccguggagcaggacaagaacacccaagagguguucgcccaggugaagcagaucuacaagacucccccaaucaaggacuucggcggcuucaacuucagccagauccugcccgaccccagcaagcccagcaagcggagcuucaucgaggaccugcuguucaacaaggugacccuggccgacgccggcuucaucaagcaguacggggacugccugggcgacaucgccgcccgggaccugaucugcgcucagaaguucaacggccugaccgugcugcccccucugcugaccgaugagaugaucgcccaguacaccagcgcccugcuggccggcaccaucaccagcggcuggaccuucggcgccggcgccgcacugcagauccccuucgccaugcagauggccuaccgguucaacggcaucggcgugacccagaacgugcuguacgagaaccagaagcugaucgccaaccaguucaacagcgccaucggcaagauccaggacagccugagcagcaccgccagcgcccugggcaagcugcaggacguggugaaccagaacgcccaggcucugaacacccuggugaagcagcugagcagcaacuuuggcgccaucagcucagugcugaaugacauccugagccggcuggaucccccagaggccgaggugcagaucgacaggcugaucaccggccggcugcagagccugcagaccuacgugacccagcagcugauccgggccgccgagauucgggccagcgccaaccuggccgcaaccaagaugagcgagugcgugcugggccagagcaagcggguggacuucugcggcaagggcuaccaccugaugagcuucccccagagcgcuccccacggcgugguguuccugcacgucacauacgugcccgcccaggagaagaacuucaccaccgcccccgccaucugccacgacggaaaggcccacuucccccgggagggcguguucgugagcaacggcacccacugguucgugacccagcggaacuucuacgagccucagaucaucaccaccgacaacaccuucgugagcggcaacugcgacguggugaucggcaucgugaacaacaccguguacgacccccugcagcccgagcuggacagcuucaaggaggagcucgacaaguacuucaagaaccacaccagcccagacguggaccugggcgacaucagcggcaucaacgccagcguggugaacauccagaaggagaucgaccggcugaacgagguggccaagaaccugaacgagagccugaucgaccugcaggagcugggcaaguacgagcaguacaucaaguggcccugguacaucuggcugggcuucaucgccggccugaucgccaucgugauggugaccaucaugcugugcugcaugaccagcugcuguagcugccugaagggcugcugcagcugcggcagcugcugcaaguucgacgaggacgacagcgagcccgugcugaagggcgugaagcugcacuacaccugaggacuaguguccaccugucccuccugggcugcuggauugucucguuuuccugccaaauaaacaggaucagcgcuuuacagaucuaaaaaaaaaaaaaaaaaaaaaaaaaaaaaaaaaaaaaaaaaaaaaaaaaaaaaaaaaaaaaaaaaaaaaaaaaaaaaaaaaaaaaaaaaaaaaaaaaaaa

SEQ ID NO: 25346 - RNA, 4105 nt, Artificial Sequence
  SARS-CoV-2/Wuhan/WIV05/2019__EPI_ISL_402128 spike protein mRNA gc (1-1273)(K986P_V987P_K986P_V987P_E484K_D614G)
aggagacccgugacccggaaguuguacggcuacgcgacuuucccucccacaaacccucgcgcccuuccuuuccuacuugggcccggcagaaagcuuaccauguucguguuccuggugcugcugccccuggugagcagccagugcgugaaccugaccacccggacccagcugcccccugccuacaccaacagcuucacccggggcguguacuaccccgacaagguguuccggagcagcgugcugcacagcacccaggaccuguuccugcccuucuucagcaacgugaccugguuccacgccauccacgugagcggcaccaacggcaccaagcgguucgacaacccagugcugcccuucaacgacggcguguacuucgccagcaccgagaagucaaacaucauccggggcuggaucuucggcaccacccuggacagcaagacacagagccugcugaucgugaacaacgccaccaacguggugaucaaggugugcgaguuucaguucugcaacgaccccuuccugggcguguacuaccacaagaacaacaagagcuggauggagagcgaguuccgggucuacagcagcgcuaacaauugcaccuucgaguacgugagccagcccuuccugauggaccucgagggcaagcagggcaacuucaagaaccugcgggaguucguguucaagaacaucgauggcuacuucaagaucuacagcaagcacacccccaucaaccuggugcgggaccugccccagggauucagcgcccuggagccucugguggaccugcccaucggcaucaacaucaccagguuccagacccugcuggcccugcaccggagcuaccugacccccggcgacagcagcagcggcuggaccgccggcgccgccgcauacuacgugggcuaccugcagccacggaccuuccugcugaaguacaacgagaacggcaccaucaccgacgccguggacugcgcccuggacccccugagcgagaccaagugcacccuaaagagcuucaccguggagaagggcaucuaccagaccagcaacuuccgggugcagcccacugagagcaucgugcgguuccccaacauuaccaaccugugucccuucggcgagguguucaacgccacccgguucgccagcguguacgccuggaaccggaagcggaucagcaacugcguggccgacuacagcgugcuguacaacagcgccagcuucagcaccuucaagugcuacggcgugagcccuaccaagcugaacgaccugugcuucaccaacguguacgcugacagcuucgugauccggggcgacgaggugcggcagaucgcccccggccagaccggcaagaucgccgacuacaacuacaagcugcccgacgacuucaccggcugcgugaucgccuggaacagcaacaaccuggacagcaaggugggcggcaacuacaacuaccuguaccggcuguuccguaagagcaaccugaagccauucgagcgggacaucagcaccgagaucuaccaggccggcagcacccccugcaacggugugaagggcuuuaacugcuacuucccccugcagagcuacggcuuccagcccaccaacggcgugggcuaccagcccuaccgggugguggugcugagcuucgagcugcugcacgcccccgccaccgugugcggcccuaaaaagagcaccaaccuggugaagaacaagugcgugaacuucaauuucaacggccugaccggcaccggcgugcugaccgagagcaacaagaaguuccugcccuuccagcaguucggccgggauaucgccgacaccaccgacgcagugcgggacccccagacccuggagauccuggacaucaccccaugcagcuucggcggcgugagcgucaucacccccggcacaaacaccagcaaccagguggccgugcuguaccagggagugaacugcaccgaggugcccguggccauccacgccgaccagcugacccccaccuggcggguguacagcaccggcagcaacguguuccagacccgggccggcugccugaucggcgccgagcacgugaacaacuccuacgagugcgacauccccaucggcgcuggcaucugcgccagcuaccagacccagaccaacagcccccggcgggcccggagcguggccagccagagcaucaucgccuacaccaugagcuuaggcgccgagaacagcguggccuacagcaacaacagcaucgcgaucccuaccaacuucaccaucagcgugaccaccgagauacugcccgugagcaugaccaagaccagcguggacuguaccauguacaucugcggcgacagcaccgagugcagcaaccugcugcugcaguacggcagcuucugcacccagcugaaccgggcccugaccggcaucgccguggagcaggacaagaacacccaagagguguucgcccaggugaagcagaucuacaagacucccccaaucaaggacuucggcggcuucaacuucagccagauccugcccgaccccagcaagcccagcaagcggagcuucaucgaggaccugcuguucaacaaggugacccuggccgacgccggcuucaucaagcaguacggcgacugccugggggauaucgccgcucgggaccugaucugcgcccagaaguucaacggccugaccgugcugcccccucugcugaccgacgagaugaucgcccaguacaccagcgcccugcuugccggcaccaucaccagcggcuggaccuucggcgccggcgcagcccugcagauccccuucgccaugcagauggccuaccgguucaacggcaucggcgugacccagaacgugcuguacgagaaccagaagcugaucgccaaccaguucaacagcgccaucggcaagauccaggacagccugagcagcaccgccagcgcccugggcaagcugcaggacguggugaaccagaacgcucaggcccugaacacccuggugaagcagcugagcagcaacuucggcgccaucagcucagugcugaaugacauccugagcaggcuggaucccccagaggccgaggugcagaucgaccggcugaucaccggccggcugcagagccugcagaccuacgugacccagcagcugauccgggccgccgagauccgggccagcgccaaccuggcagccaccaagaugagcgagugcgugcugggccagagcaagcggguggacuuuugcggcaagggcuaccaccugaugagcuucccccagagcgcuccccacggcgugguguuccuccacgugacauacguccccgcccaggagaagaacuucaccaccgcccccgccauuugccacgacggcaaggcccacuucccccgggagggaguguucgugagcaacggcacccacugguucgugacccagcggaacuucuacgagccucagaucaucaccaccgacaacaccuucgugagcggcaacugcgacguggugaucggcaucgugaacaacaccguguacgacccccugcagcccgagcuggacagcuucaaggaggagcuggacaaguacuucaagaaccacaccagcccagacguggaccugggcgacaucagcggcaucaacgccagcguggugaacauccagaaggagaucgaccggcugaacgagguggccaagaaccugaacgagagccugaucgaccugcaggagcugggcaaguacgagcaguacaucaaguggcccugguacaucuggcugggcuucaucgccggccugaucgccaucgugauggugaccaucaugcugugcugcaugaccagcugcuguagcugccugaagggcugcugcagcugcggcagcugcugcaaguucgacgaggacgacagcgagcccgugcugaagggcgugaagcugcacuacaccugaggacuaguguccaccugucccuccugggcugcuggauugucucguuuuccugccaaauaaacaggaucagcgcuuuacagaucuaaaaaaaaaaaaaaaaaaaaaaaaaaaaaaaaaaaaaaaaaaaaaaaaaaaaaaaaaaaaaaaaaaaaaaaaaaaaaaaaaaaaaaaaaaaaaaaaaaaa

SEQ ID NO: 25347 - RNA, 4105 nt, Artificial Sequence
  SARS-CoV-2/Wuhan/WIV05/2019__EPI_ISL_402128 spike protein mRNA gc (1-1273)(K986P_V987P_K986P_V987P_L18F_T20N_P26S_D138Y_R190S_K417T _E484K_N501Y_D614G_H655Y_T1027I)
aggagacccgugacccggaaguuguacggcuacgcgacuuucccucccacaaacccucgcgcccuuccuuuccuacuugggcccggcagaaagcuuaccauguucguguuccuggugcugcugccccuggugagcagccagugcgugaacuucaccaaccggacccagcugcccagcgccuacaccaacagcuucacccggggcguguacuacccugacaagguguuccggagcagcgugcugcacagcacccaggaccuguuccugcccuucuucagcaacgugaccugguuccacgccauccacgugagcggcaccaacggcaccaagcgguucgacaaccccgugcugccauucaacgacggcguguacuucgccagcaccgagaagucaaacaucauccggggcuggaucuuuggcaccacccuggacagcaagacccagagccugcugaucgugaacaacgccacaaacguggugaucaaggugugcgaguuccaguucugcaacuaccccuuccugggcguguacuaccacaagaacaacaagagcuggauggagagcgaguuccgggucuacagcagcgcuaauaacugcaccuucgaguacgugagccagcccuuccugauggaccuggagggcaagcagggcaacuucaagaaccucagcgaguucguguucaagaacaucgacggcuacuucaagaucuacagcaagcacacccccaucaaccuggugcgggaucugccccagggauucagcgcccuggagccccugguggaccugccuaucggcaucaacaucacccgguuccagacccugcuggcccugcacaggagcuaccugacccccggcgacagcagcagcggcuggaccgccggcgccgccgcauacuacgugggcuaccugcagccccggaccuuccugcugaaguacaacgagaacggcaccaucaccgacgccguggacugcgcccuggacccacugagcgagaccaagugcacccuaaagagcuucaccguggagaagggcaucuaccagaccagcaacuuccgggugcagcccaccgagagcaucgugcgguuccccaacauuacuaaccugugucccuucggcgagguguucaacgccacccgguucgccagcguguacgccuggaaccggaagcggaucagcaacugcguggccgacuacagcgugcuguacaacagcgccagcuucagcaccuucaagugcuacggcgugagccccaccaagcugaacgaccugugcuucaccaacguguacgcugacagcuucgugauccggggcgacgaggugcggcagaucgccccuggccagaccggcaccaucgccgacuacaacuacaagcugcccgacgacuucaccggcugcgugaucgccuggaacagcaacaaccuggacagcaaggugggcggcaacuacaacuaccuguaccggcuguuccguaagagcaaccugaagcccuuugagcgggacaucagcaccgagaucuaccaggccggcagcaccccaugcaacggugugaagggcuucaacugcuacuucccccugcagagcuacggcuuccagcccaccuacggcgugggcuaccagcccuaccgggugguggugcugagcuucgagcugcugcacgcccccgccaccgugugcggccccaaaaagagcaccaaccuggugaagaacaagugcgugaacuucaauuucaacggccugaccggcaccggcgugcugaccgagagcaacaagaaguuccugccuuuccagcaguucggccgggacaucgccgauaccaccgacgcagugcgggacccccagacccuggagauccuggacaucacccccugcagcuucggcggcgugagcgucaucaccccaggcacaaacaccagcaaccagguggccgugcuguaccagggagugaacugcaccgaggugcccguggccauccacgccgaccagcugacccccaccuggcggguguacuccaccggcagcaacguguuccagacccgggccggcugccugaucggcgccgaguacgugaacaacagcuacgagugcgacauccccaucggcgcuggcaucugcgccagcuaccagacccagaccaacagcccccggcgggcccggagcguggccagccagagcaucaucgccuacaccaugagccugggcgccgagaacagcguggccuacagcaacaacagcaucgcgauccccaccaacuucaccaucagcgugaccaccgagauauuaccugugagcaugaccaagaccagcguggacuguaccauguacaucugcggcgacagcaccgagugcagcaaccugcugcugcaguacggcagcuucugcacccagcugaaccgggcccugaccggcaucgccguggagcaggacaagaacacccaagagguguucgcccaggugaagcagaucuacaagacuccacccaucaaggacuucggcggcuucaacuucagccagauccugcccgaccccagcaagcccagcaagcggagcuucaucgaggaccugcuguucaacaaggugacccuggccgacgccggcuucaucaagcaguacggcgacugccugggggacaucgccgcucgggaucugaucugcgcccagaaguucaacggccugaccgugcugccuccccugcugaccgacgagaugaucgcccaguacaccagcgcccugcuggccggcaccaucaccagcggcuggaccuucggcgccggcgcagcccuucagauccccuucgccaugcagauggccuaccgguucaacggcaucggcgugacccagaacgugcuguacgagaaccagaagcugaucgccaaccaguucaacagcgccaucggcaagauccaggacagccugagcagcaccgccagcgcccugggcaagcugcaggacguggugaaccagaacgcucaggcccugaacacccuggugaagcagcugagcucaaacuuuggcgccaucagcagcgugcugaaugacauccugagccggcuggacccacccgaggccgaggugcagaucgacaggcugaucaccggccggcugcagagccugcagaccuacgugacccagcagcugauccgggccgccgagauccgggccagcgccaaccuggcagccauuaagaugagcgagugcgugcugggccagagcaagcggguggacuucugcggcaagggcuaccaccugaugagcuucccccagagcgcuccccacggcgugguguuccugcacgugaccuacguccccgcccaggagaagaacuucacaaccgcccccgccaucugccacgacggcaaggcccacuucccccgggagggaguguucgugagcaacggcacccacugguucgugacccagcggaacuucuacgagccccagaucaucaccaccgacaacaccuucgugagcggcaacugcgacguggugaucggcaucgugaacaacaccguguacgacccucuccagcccgagcuggacagcuucaaggaggagcuggacaaguacuucaagaaccacaccagccccgacguggaccugggcgauaucagcggcaucaacgccagcguggugaacauccagaaggagaucgaccggcugaacgagguggccaagaaccugaacgagagccugaucgaccugcaggagcugggcaaguacgagcaguacaucaaguggccaugguacaucuggcugggcuucaucgccggccugaucgccaucgugauggugaccaucaugcugugcugcaugaccagcugcuguagcugccugaagggcugcugcagcugcggcagcugcugcaaguucgacgaggacgacagcgagcccgugcugaagggcgugaagcugcacuacaccugaggacuaguguccaccugucccuccugggcugcuggauugucucguuuuccugccaaauaaacaggaucagcgcuuuacagaucuaaaaaaaaaaaaaaaaaaaaaaaaaaaaaaaaaaaaaaaaaaaaaaaaaaaaaaaaaaaaaaaaaaaaaaaaaaaaaaaaaaaaaaaaaaaaaaaaaaaa

SEQ ID NO: 25348 - RNA, 4105 nt, Artificial Sequence
  SARS-CoV-2/Wuhan/WIV05/2019__EPI_ISL_402128 spike protein mRNA gc (1-1273)(K986P_V987P_K986P_V987P_S13I_W152C_L452R_D614G)
aggagacccgugacccggaaguuguacggcuacgcgacuuucccucccacaaacccucgcgcccuuccuuuccuacuugggcccggcagaaagcuuaccauguucguguuccuggugcugcugccccuggugagcauccagugcgugaaccugaccacccggacccagcugcccccugccuacaccaacagcuucacccggggcguguacuaccccgacaagguguuccggagcagcgugcugcacagcacccaggaccuguuccugcccuucuucagcaacgugaccugguuccacgccauccacgugagcggcaccaacggcaccaagcgguucgacaacccagugcugcccuucaacgacggcguguacuucgccagcaccgagaagucaaacaucauccggggcuggaucuucggcaccacccuggacagcaagacacagagccugcugaucgugaacaacgccaccaacguggugaucaaggugugcgaguuucaguucugcaacgaccccuuccugggcguguacuaccacaagaacaacaagagcugcauggagagcgaguuccgggucuacagcagcgcuaacaauugcaccuucgaguacgugagccagcccuuccugauggaccucgagggcaagcagggcaacuucaagaaccugcgggaguucguguucaagaacaucgauggcuacuucaagaucuacagcaagcacacccccaucaaccuggugcgggaccugccccagggauucagcgcccuggagccucugguggaccugcccaucggcaucaacaucaccagguuccagacccugcuggcccugcaccggagcuaccugacccccggcgacagcagcagcggcuggaccgccggcgccgccgcauacuacgugggcuaccugcagccacggaccuuccugcugaaguacaacgagaacggcaccaucaccgacgccguggacugcgcccuggacccccugagcgagaccaaguguacccuaaagagcuucaccguggagaagggcaucuaccagaccagcaacuuccgggugcagcccacugagagcauugugcgguuccccaacaucaccaaccugugccccuucggcgagguguucaacgccacccgguucgccagcguguacgccuggaaccggaagcggaucagcaacugcguggccgacuacagcgugcuguacaacagcgccagcuucagcaccuucaagugcuacggcgugagcccuaccaagcugaacgaccugugcuucaccaacguguacgcugacagcuucgugauccggggcgacgaggugcggcagaucgcccccggccagaccggcaagaucgccgacuacaacuacaagcugcccgacgacuucaccggcugcgugaucgccuggaacagcaacaaccuggacagcaaggugggcggcaacuacaacuaccgguaccggcuguuccguaagagcaaccugaagccauucgagcgggacaucagcaccgagaucuaccaggccggcagcacccccugcaacgguguggagggcuuuaacugcuacuucccccugcagagcuacggcuuccagcccaccaacggcgugggcuaccagcccuaccgggugguggugcugagcuucgagcugcugcacgcccccgccaccgugugcggcccuaaaaagagcaccaaccuggugaagaacaagugcgugaacuucaauuucaacggccugaccggcaccggcgugcugaccgagagcaacaagaaguuccugcccuuccagcaguucggccgggauaucgccgacaccaccgacgcagugcgggacccccagacccuggagauccuggacaucaccccaugcagcuucggcggcgugagcgucaucacccccggcacaaacaccagcaaccagguggccgugcuguaccagggagugaacugcaccgaggugcccguggccauccacgccgaccagcugacccccaccuggcggguguacagcaccggcagcaacguguuccagacccgggccggcugccugaucggcgccgagcacgugaacaacagcuacgagugcgacauccccaucggcgcuggcaucugugccuccuaccagacccagaccaacagcccccggcgggcccggagcguggccagccagagcaucaucgccuacaccaugagccugggcgccgagaacagcguggccuacagcaacaacagcaucgcgaucccuaccaacuucaccauaagcgugaccaccgagaucuuacccgugagcaugaccaagaccagcguggacugcaccauguacaucugcggcgacagcaccgagugcagcaaccugcugcugcaguacggcagcuucugcacccagcugaaccgggcccugaccggcaucgccguggagcaggacaagaacacccaagagguguucgcccaggugaagcagaucuacaagacucccccaaucaaggacuucggcggcuucaacuucagccagauccugcccgaccccagcaagcccagcaagcggagcuucaucgaggaccugcuguucaacaaggugacccuggccgacgccggcuucaucaagcaguacggcgacugccugggggauaucgccgcucgggaccugaucugcgcccagaaguucaacggccugaccgugcugcccccucugcugaccgacgagaugaucgcccaguacaccagcgcccugcuggccggcaccaucaccagcggcuggaccuucggcgccggcgcagcccuucagauccccuucgccaugcagauggccuacagguucaacggcaucggcgugacccagaacgugcuguacgagaaccagaagcugaucgccaaccaguucaacagcgccaucggcaagauccaggacagccugagcagcaccgccagcgcccugggcaagcugcaggacguggugaaccagaacgcucaggcccugaacacccuggugaagcagcugagcagcaacuucggcgccaucagcagcgugcugaaugacauccugucacggcuggaucccccagaggccgaggugcagaucgaccggcugaucaccggccggcugcagagccugcagaccuacgugacccagcagcugauccgggccgccgagauucgggccagcgccaaccuggcagccaccaagaugagcgagugcgugcugggccagagcaagcggguggacuuuugcggcaagggcuaccaccugaugagcuucccccagagcgcuccccacggcgugguguuccugcacgugacauacguccccgcccaggagaagaacuucaccaccgcccccgccaucugccacgacggcaaggcccacuucccccgggagggaguguucgugagcaacggcacccacugguucgugacccagcggaacuucuacgagccucagaucaucaccaccgacaacaccuucgugagcggcaacugcgacguggugaucggcaucgugaacaacaccguguacgacccccuccagcccgagcuggacagcuucaaggaggagcuggacaaguacuucaagaaccacaccagcccagacguggaccugggcgacaucagcggcaucaacgccagcguggugaacauccagaaggagaucgaccggcugaacgagguggccaagaaccugaacgagagccugaucgaccugcaggagcugggcaaguacgagcaguacaucaaguggcccugguacaucuggcugggcuucaucgccggccugaucgccaucgugauggugaccaucaugcugugcugcaugaccagcuguugcagcugccugaagggcugcugcagcugcggcagcugcugcaaguucgacgaggacgacagcgagcccgugcugaagggcgugaagcugcacuacaccugaggacuaguguccaccugucccuccugggcugcuggauugucucguuuuccugccaaauaaacaggaucagcgcuuuacagaucuaaaaaaaaaaaaaaaaaaaaaaaaaaaaaaaaaaaaaaaaaaaaaaaaaaaaaaaaaaaaaaaaaaaaaaaaaaaaaaaaaaaaaaaaaaaaaaaaaaaa

SEQ ID NO: 25349 - RNA, 4105 nt, Artificial Sequence
  SARS-CoV-2/Wuhan/WIV05/2019__EPI_ISL_402128 spike protein mRNA gc mod (1-1273)(K986P_V987P)
aggagacccgugacccggaaguuguacggcuacgcgacuuucccucccacaaacccucgcgcccuuccuuuccuacuugggcccggcagaaagcuuaccauguucguguuucuggugcugcugccccugguguccagccagugugugaaccugaccaccagaacacagcugccuccagccuacaccaacagcuucaccagaggcguguacuaccccgacaagguguucagauccagcgugcugcacucuacccaggaccuguuccugccuuucuucagcaacgugaccugguuccacgccauccacguguccggcaccaauggcaccaagagauucgacaaccccgugcugcccuucaacgacgggguguacuuugccagcaccgagaaguccaacaucaucagaggcuggaucuucggcaccacacuggacagcaagacccagagccugcugaucgugaacaacgccaccaacguggucaucaaagugugcgaguuccaguucugcaacgaccccuuccugggcgucuacuaccacaagaacaacaagagcuggauggaaagcgaguuccggguguacagcagcgccaacaacugcaccuucgaguacgugucccagccuuuccugauggaccuggaaggcaagcagggcaacuucaagaaccugcgcgaguucguguucaagaacaucgacggcuacuucaaaaucuacagcaagcacaccccuaucaaccucgugcgggaucugccucagggcuucucugcucuggaaccccugguggaucugcccaucggcaucaacaucacccgguuucagacacugcuggcccugcacagaagcuaccugacaccuggcgauagcagcagcggauggacagcuggugccgccgcuuacuaugugggcuaccugcagccuagaaccuuccugcugaaguacaacgagaacggcaccaucaccgacgccguggauugugcucuggauccucugagcgagacaaagugcacccugaaguccuucaccguggaaaagggcaucuaccagaccagcaacuuccgggugcagcccaccgaauccaucgugcgguuccccaauaucaccaaucugugccccuucggcgagguguucaaugccaccagauucgccucuguguacgccuggaaccggaagcggaucagcaauugcguggccgacuacuccgugcuguacaacuccgccagcuucagcaccuucaagugcuacggcguguccccuaccaagcugaacgaccugugcuucacaaacguguacgccgacagcuucgugauccggggagaugaagugcggcagauugccccuggacagacaggcaagaucgccgacuacaacuacaagcugcccgacgacuucaccggcugugugauugccuggaacagcaacaaccuggacuccaaagucggcggcaacuacaauuaccuguaccggcuguuccggaaguccaaucugaagcccuucgagcgggacaucagcaccgaaaucuaucaggccggcagcaccccuugcaacggcguggaaggcuucaacugcuacuucccacugcaguccuacggcuuucagcccacaaauggcgugggcuaucagcccuacagagugguggugcugagcuucgaacugcugcaugcuccugccacagugugcggcccuaagaaaagcaccaaucucgugaagaacaaaugcgugaacuucaacuucaacggccugaccggcaccggcgugcugacagagagcaacaagaaguuccugccauuccagcaguuuggccgggauaucgccgauaccacagacgccguuagagauccccagacacuggaaauccuggacaucaccccaugcagcuucggcggagugucugugaucaccccuggcaccaacaccagcaaucagguggcagugcuguaccaggacgugaacuguaccgaagugcccguggccauucacgccgaucagcugacaccuacauggcggguguacuccaccggcagcaauguguuucagaccagagccggcugucugaucggagccgagcacgugaacaauagcuacgagugcgacauccccaucggcgcuggcaucugugccagcuaccagacacagacaaacagccccagacgggcuagaagcguggccagccagagcaucauugccuacacaaugucucugggcgccgagaacagcguggccuacuccaacaacucuaucgcuauccccaccaacuucaccaucagcgugaccaccgagauccugccuguguccaugaccaagaccagcguggacugcaccauguacaucugcggcgauuccaccgagugcuccaaccugcugcugcaguacggcagcuucugcacccagcugaauagagcccugacagggaucgccguggaacaggacaagaacacccaagagguguucgcccaagugaagcaaaucuacaagaccccuccuaucaaggacuucggcggcuucaauuucagccagauucugcccgauccuagcaagcccagcaagcggagcuucaucgaggaccugcuguucaacaaagugacacuggccgacgccggcuucaucaagcaguauggcgauugucugggcgacauugccgccagggaucugauuugcgcccagaaguuuaacggacugacagugcugccuccucugcugaccgaugagaugaucgcccaguacacaucugcccugcuggccggcacaaucacaagcggcuggacauuuggagcuggcgccgcucugcagauccccuuugcuaugcagauggccuaccgguucaacggcaucggagugacccagaaugugcuguacgagaaccagaagcugaucgccaaccaguucaacagcgccaucggcaagauccaggacagccugagcagcacagcaagcgcccugggaaagcugcaggacguggucaaccagaaugcccaggcacugaacacccuggucaagcagcuguccuccaacuucggcgccaucagcucugugcugaacgauauccugagcagacuggacccuccugaggccgaggugcagaucgacagacugaucacaggcagacugcagagccuccagacauacgugacccagcagcugaucagagccgccgagauuagagccucugccaaucuggccgccaccaagaugucugagugugugcugggccagagcaagagaguggacuuuugcggcaagggcuaccaccugaugagcuucccucagucugccccucacggcgugguguuucugcacgugacauaugugcccgcucaagagaagaauuucaccaccgcuccagccaucugccacgacggcaaagcccacuuuccuagagaaggcguguucguguccaacggcacccauugguucgugacacagcggaacuucuacgagccccagaucaucaccaccgacaacaccuucgugucuggcaacugcgacguugugaucggcauugugaacaauaccguguacgacccucugcagcccgagcuggacagcuucaaagaggaacuggacaaguacuuuaagaaccacacaagccccgacguggaccugggcgauaucagcggaaucaaugccagcgucgugaacauccagaaagagaucgaccggcugaacgagguggccaagaaucugaacgagagccugaucgaccugcaagaacuggggaaguacgagcaguacaucaaguggcccugguacaucuggcugggcuuuaucgccggacugauugccaucgugauggucacaaucaugcuguguugcaugaccagcugcuguagcugccugaagggcuguuguagcuguggcagcugcugcaaguucgacgaggacgauucugagcccgugcugaagggcgugaaacugcacuacaccugaggacuaguguccaccugucccuccugggcugcuggauugucucguuuuccugccaaauaaacaggaucagcgcuuuacagaucuaaaaaaaaaaaaaaaaaaaaaaaaaaaaaaaaaaaaaaaaaaaaaaaaaaaaaaaaaaaaaaaaaaaaaaaaaaaaaaaaaaaaaaaaaaaaaaaaaaaa

SEQ ID NO: 25350 - RNA, 4105 nt, Artificial Sequence
  SARS-CoV-2/Wuhan/WIV05/2019__EPI_ISL_402128 spike protein mRNA gc mod (1-1273)(K986P_V987P_ D614G)
aggagacccgugacccggaaguuguacggcuacgcgacuuucccucccacaaacccucgcgcccuuccuuuccuacuugggcccggcagaaagcuuaccauguucguguuucuggugcugcugccccugguguccagccagugugugaaccugaccaccagaacacagcugccuccagccuacaccaacagcuucaccagaggcguguacuaccccgacaagguguucagauccagcgugcugcacucuacccaggaccuguuccugccuuucuucagcaacgugaccugguuccacgccauccacguguccggcaccaauggcaccaagagauucgacaaccccgugcugcccuucaacgacgggguguacuuugccagcaccgagaaguccaacaucaucagaggcuggaucuucggcaccacacuggacagcaagacccagagccugcugaucgugaacaacgccaccaacguggucaucaaagugugcgaguuccaguucugcaacgaccccuuccugggcgucuacuaccacaagaacaacaagagcuggauggaaagcgaguuccggguguacagcagcgccaacaacugcaccuucgaguacgugucccagccuuuccugauggaccuggaaggcaagcagggcaacuucaagaaccugcgcgaguucguguucaagaacaucgacggcuacuucaaaaucuacagcaagcacaccccuaucaaccucgugcgggaucugccucagggcuucucugcucuggaaccccugguggaucugcccaucggcaucaacaucacccgguuucagacacugcuggcccugcacagaagcuaccugacaccuggcgauagcagcagcggauggacagcuggugccgccgcuuacuaugugggcuaccugcagccuagaaccuuccugcugaaguacaacgagaacggcaccaucaccgacgccguggauugugcucuggauccucugagcgagacaaagugcacccugaaguccuucaccguggaaaagggcaucuaccagaccagcaacuuccgggugcagcccaccgaauccaucgugcgguuccccaauaucaccaaucugugccccuucggcgagguguucaaugccaccagauucgccucuguguacgccuggaaccggaagcggaucagcaauugcguggccgacuacuccgugcuguacaacuccgccagcuucagcaccuucaagugcuacggcguguccccuaccaagcugaacgaccugugcuucacaaacguguacgccgacagcuucgugauccggggagaugaagugcggcagauugccccuggacagacaggcaagaucgccgacuacaacuacaagcugcccgacgacuucaccggcugugugauugccuggaacagcaacaaccuggacuccaaagucggcggcaacuacaauuaccuguaccggcuguuccggaaguccaaucugaagcccuucgagcgggacaucagcaccgaaaucuaucaggccggcagcaccccuugcaacggcguggaaggcuucaacugcuacuucccacugcaguccuacggcuuucagcccacaaauggcgugggcuaucagcccuacagagugguggugcugagcuucgaacugcugcaugcuccugccacagugugcggcccuaagaaaagcaccaaucucgugaagaacaaaugcgugaacuucaacuucaacggccugaccggcaccggcgugcugacagagagcaacaagaaguuccugccauuccagcaguuuggccgggauaucgccgauaccacagacgccguuagagauccccagacacuggaaauccuggacaucaccccaugcagcuucggcggagugucugugaucaccccuggcaccaacaccagcaaucagguggcagugcuguaccagggcgugaacuguaccgaagugcccguggccauucacgccgaucagcugacaccuacauggcggguguacuccaccggcagcaauguguuucagaccagagccggcugucugaucggagccgagcacgugaacaauagcuacgagugcgacauccccaucggcgcuggcaucugugccagcuaccagacacagacaaacagccccagacgggcuagaagcguggccagccagagcaucauugccuacacaaugucucugggcgccgagaacagcguggccuacuccaacaacucuaucgcuauccccaccaacuucaccaucagcgugaccaccgagauccugccuguguccaugaccaagaccagcguggacugcaccauguacaucugcggcgauuccaccgagugcuccaaccugcugcugcaguacggcagcuucugcacccagcugaauagagcccugacagggaucgccguggaacaggacaagaacacccaagagguguucgcccaagugaagcaaaucuacaagaccccuccuaucaaggacuucggcggcuucaauuucagccagauucugcccgauccuagcaagcccagcaagcggagcuucaucgaggaccugcuguucaacaaagugacacuggccgacgccggcuucaucaagcaguauggcgauugucugggcgacauugccgccagggaucugauuugcgcccagaaguuuaacggacugacagugcugccuccucugcugaccgaugagaugaucgcccaguacacaucugcccugcuggccggcacaaucacaagcggcuggacauuuggagcuggcgccgcucugcagauccccuuugcuaugcagauggccuaccgguucaacggcaucggagugacccagaaugugcuguacgagaaccagaagcugaucgccaaccaguucaacagcgccaucggcaagauccaggacagccugagcagcacagcaagcgcccugggaaagcugcaggacguggucaaccagaaugcccaggcacugaacacccuggucaagcagcuguccuccaacuucggcgccaucagcucugugcugaacgauauccugagcagacuggacccuccugaggccgaggugcagaucgacagacugaucacaggcagacugcagagccuccagacauacgugacccagcagcugaucagagccgccgagauuagagccucugccaaucuggccgccaccaagaugucugagugugugcugggccagagcaagagaguggacuuuugcggcaagggcuaccaccugaugagcuucccucagucugccccucacggcgugguguuucugcacgugacauaugugcccgcucaagagaagaauuucaccaccgcuccagccaucugccacgacggcaaagcccacuuuccuagagaaggcguguucguguccaacggcacccauugguucgugacacagcggaacuucuacgagccccagaucaucaccaccgacaacaccuucgugucuggcaacugcgacguugugaucggcauugugaacaauaccguguacgacccucugcagcccgagcuggacagcuucaaagaggaacuggacaaguacuuuaagaaccacacaagccccgacguggaccugggcgauaucagcggaaucaaugccagcgucgugaacauccagaaagagaucgaccggcugaacgagguggccaagaaucugaacgagagccugaucgaccugcaagaacuggggaaguacgagcaguacaucaaguggcccugguacaucuggcugggcuuuaucgccggacugauugccaucgugauggucacaaucaugcuguguugcaugaccagcugcuguagcugccugaagggcuguuguagcuguggcagcugcugcaaguucgacgaggacgauucugagcccgugcugaagggcgugaaacugcacuacaccugaggacuaguguccaccugucccuccugggcugcuggauugucucguuuuccugccaaauaaacaggaucagcgcuuuacagaucuaaaaaaaaaaaaaaaaaaaaaaaaaaaaaaaaaaaaaaaaaaaaaaaaaaaaaaaaaaaaaaaaaaaaaaaaaaaaaaaaaaaaaaaaaaaaaaaaaaaa

SEQ ID NO: 25351 - RNA, 4105 nt, Artificial Sequence
  SARS-CoV-2/Wuhan/WIV05/2019__EPI_ISL_402128 spike protein mRNA gc mod (1-1273)(K986P_V987P_A222V_D614G)
aggagacccgugacccggaaguuguacggcuacgcgacuuucccucccacaaacccucgcgcccuuccuuuccuacuugggcccggcagaaagcuuaccauguucguguuucuggugcugcugccccugguguccagccagugugugaaccugaccaccagaacacagcugccuccagccuacaccaacagcuucaccagaggcguguacuaccccgacaagguguucagauccagcgugcugcacucuacccaggaccuguuccugccuuucuucagcaacgugaccugguuccacgccauccacguguccggcaccaauggcaccaagagauucgacaaccccgugcugcccuucaacgacgggguguacuuugccagcaccgagaaguccaacaucaucagaggcuggaucuucggcaccacacuggacagcaagacccagagccugcugaucgugaacaacgccaccaacguggucaucaaagugugcgaguuccaguucugcaacgaccccuuccugggcgucuacuaccacaagaacaacaagagcuggauggaaagcgaguuccggguguacagcagcgccaacaacugcaccuucgaguacgugucccagccuuuccugauggaccuggaaggcaagcagggcaacuucaagaaccugcgcgaguucguguucaagaacaucgacggcuacuucaaaaucuacagcaagcacaccccuaucaaccucgugcgggaucugccucagggcuucucugugcuggaaccccugguggaucugcccaucggcaucaacaucacccgguuucagacacugcuggcccugcacagaagcuaccugacaccuggcgauagcagcagcggauggacagcuggugccgccgcuuacuaugugggcuaccugcagccuagaaccuuccugcugaaguacaacgagaacggcaccaucaccgacgccguggauugugcucuggauccucugagcgagacaaagugcacccugaaguccuucaccguggaaaagggcaucuaccagaccagcaacuuccgggugcagcccaccgaauccaucgugcgguuccccaauaucaccaaucugugccccuucggcgagguguucaaugccaccagauucgccucuguguacgccuggaaccggaagcggaucagcaauugcguggccgacuacuccgugcuguacaacuccgccagcuucagcaccuucaagugcuacggcguguccccuaccaagcugaacgaccugugcuucacaaacguguacgccgacagcuucgugauccggggagaugaagugcggcagauugccccuggacagacaggcaagaucgccgacuacaacuacaagcugcccgacgacuucaccggcugugugauugccuggaacagcaacaaccuggacuccaaagucggcggcaacuacaauuaccuguaccggcuguuccggaaguccaaucugaagcccuucgagcgggacaucagcaccgaaaucuaucaggccggcagcaccccuugcaacggcguggaaggcuucaacugcuacuucccacugcaguccuacggcuuucagcccacaaauggcgugggcuaucagcccuacagagugguggugcugagcuucgaacugcugcaugcuccugccacagugugcggcccuaagaaaagcaccaaucucgugaagaacaaaugcgugaacuucaacuucaacggccugaccggcaccggcgugcugacagagagcaacaagaaguuccugccauuccagcaguuuggccgggauaucgccgauaccacagacgccguuagagauccccagacacuggaaauccuggacaucaccccaugcagcuucggcggagugucugugaucaccccuggcaccaacaccagcaaucagguggcagugcuguaccagggcgugaacuguaccgaagugcccguggccauucacgccgaucagcugacaccuacauggcggguguacuccaccggcagcaauguguuucagaccagagccggcugucugaucggagccgagcacgugaacaauagcuacgagugcgacauccccaucggcgcuggcaucugugccagcuaccagacacagacaaacagccccagacgggcuagaagcguggccagccagagcaucauugccuacacaaugucucugggcgccgagaacagcguggccuacuccaacaacucuaucgcuauccccaccaacuucaccaucagcgugaccaccgagauccugccuguguccaugaccaagaccagcguggacugcaccauguacaucugcggcgauuccaccgagugcuccaaccugcugcugcaguacggcagcuucugcacccagcugaauagagcccugacagggaucgccguggaacaggacaagaacacccaagagguguucgcccaagugaagcaaaucuacaagaccccuccuaucaaggacuucggcggcuucaauuucagccagauucugcccgauccuagcaagcccagcaagcggagcuucaucgaggaccugcuguucaacaaagugacacuggccgacgccggcuucaucaagcaguauggcgauugucugggcgacauugccgccagggaucugauuugcgcccagaaguuuaacggacugacagugcugccuccucugcugaccgaugagaugaucgcccaguacacaucugcccugcuggccggcacaaucacaagcggcuggacauuuggagcuggcgccgcucugcagauccccuuugcuaugcagauggccuaccgguucaacggcaucggagugacccagaaugugcuguacgagaaccagaagcugaucgccaaccaguucaacagcgccaucggcaagauccaggacagccugagcagcacagcaagcgcccugggaaagcugcaggacguggucaaccagaaugcccaggcacugaacacccuggucaagcagcuguccuccaacuucggcgccaucagcucugugcugaacgauauccugagcagacuggacccuccugaggccgaggugcagaucgacagacugaucacaggcagacugcagagccuccagacauacgugacccagcagcugaucagagccgccgagauuagagccucugccaaucuggccgccaccaagaugucugagugugugcugggccagagcaagagaguggacuuuugcggcaagggcuaccaccugaugagcuucccucagucugccccucacggcgugguguuucugcacgugacauaugugcccgcucaagagaagaauuucaccaccgcuccagccaucugccacgacggcaaagcccacuuuccuagagaaggcguguucguguccaacggcacccauugguucgugacacagcggaacuucuacgagccccagaucaucaccaccgacaacaccuucgugucuggcaacugcgacguugugaucggcauugugaacaauaccguguacgacccucugcagcccgagcuggacagcuucaaagaggaacuggacaaguacuuuaagaaccacacaagccccgacguggaccugggcgauaucagcggaaucaaugccagcgucgugaacauccagaaagagaucgaccggcugaacgagguggccaagaaucugaacgagagccugaucgaccugcaagaacuggggaaguacgagcaguacaucaaguggcccugguacaucuggcugggcuuuaucgccggacugauugccaucgugauggucacaaucaugcuguguugcaugaccagcugcuguagcugccugaagggcuguuguagcuguggcagcugcugcaaguucgacgaggacgauucugagcccgugcugaagggcgugaaacugcacuacaccugaggacuaguguccaccugucccuccugggcugcuggauugucucguuuuccugccaaauaaacaggaucagcgcuuuacagaucuaaaaaaaaaaaaaaaaaaaaaaaaaaaaaaaaaaaaaaaaaaaaaaaaaaaaaaaaaaaaaaaaaaaaaaaaaaaaaaaaaaaaaaaaaaaaaaaaaaaa

SEQ ID NO: 25352 - RNA, 4105 nt, Artificial Sequence
  SARS-CoV-2/Wuhan/WIV05/2019__EPI_ISL_402128 spike protein mRNA gc mod (1-1273)(K986P_V987P_N439K_D614G)
aggagacccgugacccggaaguuguacggcuacgcgacuuucccucccacaaacccucgcgcccuuccuuuccuacuugggcccggcagaaagcuuaccauguucguguuucuggugcugcugccccugguguccagccagugugugaaccugaccaccagaacacagcugccuccagccuacaccaacagcuucaccagaggcguguacuaccccgacaagguguucagauccagcgugcugcacucuacccaggaccuguuccugccuuucuucagcaacgugaccugguuccacgccauccacguguccggcaccaauggcaccaagagauucgacaaccccgugcugcccuucaacgacgggguguacuuugccagcaccgagaaguccaacaucaucagaggcuggaucuucggcaccacacuggacagcaagacccagagccugcugaucgugaacaacgccaccaacguggucaucaaagugugcgaguuccaguucugcaacgaccccuuccugggcgucuacuaccacaagaacaacaagagcuggauggaaagcgaguuccggguguacagcagcgccaacaacugcaccuucgaguacgugucccagccuuuccugauggaccuggaaggcaagcagggcaacuucaagaaccugcgcgaguucguguucaagaacaucgacggcuacuucaaaaucuacagcaagcacaccccuaucaaccucgugcgggaucugccucagggcuucucugcucuggaaccccugguggaucugcccaucggcaucaacaucacccgguuucagacacugcuggcccugcacagaagcuaccugacaccuggcgauagcagcagcggauggacagcuggugccgccgcuuacuaugugggcuaccugcagccuagaaccuuccugcugaaguacaacgagaacggcaccaucaccgacgccguggauugugcucuggauccucugagcgagacaaagugcacccugaaguccuucaccguggaaaagggcaucuaccagaccagcaacuuccgggugcagcccaccgaauccaucgugcgguuccccaauaucaccaaucugugccccuucggcgagguguucaaugccaccagauucgccucuguguacgccuggaaccggaagcggaucagcaauugcguggccgacuacuccgugcuguacaacuccgccagcuucagcaccuucaagugcuacggcguguccccuaccaagcugaacgaccugugcuucacaaacguguacgccgacagcuucgugauccggggagaugaagugcggcagauugccccuggacagacaggcaagaucgccgacuacaacuacaagcugcccgacgacuucaccggcugugugauugccuggaacagcaagaaccuggacuccaaagucggcggcaacuacaauuaccuguaccggcuguuccggaaguccaaucugaagcccuucgagcgggacaucagcaccgaaaucuaucaggccggcagcaccccuugcaacggcguggaaggcuucaacugcuacuucccacugcaguccuacggcuuucagcccacaaauggcgugggcuaucagcccuacagagugguggugcugagcuucgaacugcugcaugcuccugccacagugugcggcccuaagaaaagcaccaaucucgugaagaacaaaugcgugaacuucaacuucaacggccugaccggcaccggcgugcugacagagagcaacaagaaguuccugccauuccagcaguuuggccgggauaucgccgauaccacagacgccguuagagauccccagacacuggaaauccuggacaucaccccaugcagcuucggcggagugucugugaucaccccuggcaccaacaccagcaaucagguggcagugcuguaccagggcgugaacuguaccgaagugcccguggccauucacgccgaucagcugacaccuacauggcggguguacuccaccggcagcaauguguuucagaccagagccggcugucugaucggagccgagcacgugaacaauagcuacgagugcgacauccccaucggcgcuggcaucugugccagcuaccagacacagacaaacagccccagacgggcuagaagcguggccagccagagcaucauugccuacacaaugucucugggcgccgagaacagcguggccuacuccaacaacucuaucgcuauccccaccaacuucaccaucagcgugaccaccgagauccugccuguguccaugaccaagaccagcguggacugcaccauguacaucugcggcgauuccaccgagugcuccaaccugcugcugcaguacggcagcuucugcacccagcugaauagagcccugacagggaucgccguggaacaggacaagaacacccaagagguguucgcccaagugaagcaaaucuacaagaccccuccuaucaaggacuucggcggcuucaauuucagccagauucugcccgauccuagcaagcccagcaagcggagcuucaucgaggaccugcuguucaacaaagugacacuggccgacgccggcuucaucaagcaguauggcgauugucugggcgacauugccgccagggaucugauuugcgcccagaaguuuaacggacugacagugcugccuccucugcugaccgaugagaugaucgcccaguacacaucugcccugcuggccggcacaaucacaagcggcuggacauuuggagcuggcgccgcucugcagauccccuuugcuaugcagauggccuaccgguucaacggcaucggagugacccagaaugugcuguacgagaaccagaagcugaucgccaaccaguucaacagcgccaucggcaagauccaggacagccugagcagcacagcaagcgcccugggaaagcugcaggacguggucaaccagaaugcccaggcacugaacacccuggucaagcagcuguccuccaacuucggcgccaucagcucugugcugaacgauauccugagcagacuggacccuccugaggccgaggugcagaucgacagacugaucacaggcagacugcagagccuccagacauacgugacccagcagcugaucagagccgccgagauuagagccucugccaaucuggccgccaccaagaugucugagugugugcugggccagagcaagagaguggacuuuugcggcaagggcuaccaccugaugagcuucccucagucugccccucacggcgugguguuucugcacgugacauaugugcccgcucaagagaagaauuucaccaccgcuccagccaucugccacgacggcaaagcccacuuuccuagagaaggcguguucguguccaacggcacccauugguucgugacacagcggaacuucuacgagccccagaucaucaccaccgacaacaccuucgugucuggcaacugcgacguugugaucggcauugugaacaauaccguguacgacccucugcagcccgagcuggacagcuucaaagaggaacuggacaaguacuuuaagaaccacacaagccccgacguggaccugggcgauaucagcggaaucaaugccagcgucgugaacauccagaaagagaucgaccggcugaacgagguggccaagaaucugaacgagagccugaucgaccugcaagaacuggggaaguacgagcaguacaucaaguggcccugguacaucuggcugggcuuuaucgccggacugauugccaucgugauggucacaaucaugcuguguugcaugaccagcugcuguagcugccugaagggcuguuguagcuguggcagcugcugcaaguucgacgaggacgauucugagcccgugcugaagggcgugaaacugcacuacaccugaggacuaguguccaccugucccuccugggcugcuggauugucucguuuuccugccaaauaaacaggaucagcgcuuuacagaucuaaaaaaaaaaaaaaaaaaaaaaaaaaaaaaaaaaaaaaaaaaaaaaaaaaaaaaaaaaaaaaaaaaaaaaaaaaaaaaaaaaaaaaaaaaaaaaaaaaaa

SEQ ID NO: 25353 - RNA, 4105 nt, Artificial Sequence
  SARS-CoV-2/Wuhan/WIV05/2019__EPI_ISL_402128 spike protein mRNA gc mod (1-1273)(K986P_V987P_S477N_D614G)
aggagacccgugacccggaaguuguacggcuacgcgacuuucccucccacaaacccucgcgcccuuccuuuccuacuugggcccggcagaaagcuuaccauguucguguuucuggugcugcugccccugguguccagccagugugugaaccugaccaccagaacacagcugccuccagccuacaccaacagcuucaccagaggcguguacuaccccgacaagguguucagauccagcgugcugcacucuacccaggaccuguuccugccuuucuucagcaacgugaccugguuccacgccauccacguguccggcaccaauggcaccaagagauucgacaaccccgugcugcccuucaacgacgggguguacuuugccagcaccgagaaguccaacaucaucagaggcuggaucuucggcaccacacuggacagcaagacccagagccugcugaucgugaacaacgccaccaacguggucaucaaagugugcgaguuccaguucugcaacgaccccuuccugggcgucuacuaccacaagaacaacaagagcuggauggaaagcgaguuccggguguacagcagcgccaacaacugcaccuucgaguacgugucccagccuuuccugauggaccuggaaggcaagcagggcaacuucaagaaccugcgcgaguucguguucaagaacaucgacggcuacuucaaaaucuacagcaagcacaccccuaucaaccucgugcgggaucugccucagggcuucucugcucuggaaccccugguggaucugcccaucggcaucaacaucacccgguuucagacacugcuggcccugcacagaagcuaccugacaccuggcgauagcagcagcggauggacagcuggugccgccgcuuacuaugugggcuaccugcagccuagaaccuuccugcugaaguacaacgagaacggcaccaucaccgacgccguggauugugcucuggauccucugagcgagacaaagugcacccugaaguccuucaccguggaaaagggcaucuaccagaccagcaacuuccgggugcagcccaccgaauccaucgugcgguuccccaauaucaccaaucugugccccuucggcgagguguucaaugccaccagauucgccucuguguacgccuggaaccggaagcggaucagcaauugcguggccgacuacuccgugcuguacaacuccgccagcuucagcaccuucaagugcuacggcguguccccuaccaagcugaacgaccugugcuucacaaacguguacgccgacagcuucgugauccggggagaugaagugcggcagauugccccuggacagacaggcaagaucgccgacuacaacuacaagcugcccgacgacuucaccggcugugugauugccuggaacagcaacaaccuggacuccaaagucggcggcaacuacaauuaccuguaccggcuguuccggaaguccaaucugaagcccuucgagcgggacaucagcaccgaaaucuaucaggccggcaacaccccuugcaacggcguggaaggcuucaacugcuacuucccacugcaguccuacggcuuucagcccacaaauggcgugggcuaucagcccuacagagugguggugcugagcuucgaacugcugcaugcuccugccacagugugcggcccuaagaaaagcaccaaucucgugaagaacaaaugcgugaacuucaacuucaacggccugaccggcaccggcgugcugacagagagcaacaagaaguuccugccauuccagcaguuuggccgggauaucgccgauaccacagacgccguuagagauccccagacacuggaaauccuggacaucaccccaugcagcuucggcggagugucugugaucaccccuggcaccaacaccagcaaucagguggcagugcuguaccagggcgugaacuguaccgaagugcccguggccauucacgccgaucagcugacaccuacauggcggguguacuccaccggcagcaauguguuucagaccagagccggcugucugaucggagccgagcacgugaacaauagcuacgagugcgacauccccaucggcgcuggcaucugugccagcuaccagacacagacaaacagccccagacgggcuagaagcguggccagccagagcaucauugccuacacaaugucucugggcgccgagaacagcguggccuacuccaacaacucuaucgcuauccccaccaacuucaccaucagcgugaccaccgagauccugccuguguccaugaccaagaccagcguggacugcaccauguacaucugcggcgauuccaccgagugcuccaaccugcugcugcaguacggcagcuucugcacccagcugaauagagcccugacagggaucgccguggaacaggacaagaacacccaagagguguucgcccaagugaagcaaaucuacaagaccccuccuaucaaggacuucggcggcuucaauuucagccagauucugcccgauccuagcaagcccagcaagcggagcuucaucgaggaccugcuguucaacaaagugacacuggccgacgccggcuucaucaagcaguauggcgauugucugggcgacauugccgccagggaucugauuugcgcccagaaguuuaacggacugacagugcugccuccucugcugaccgaugagaugaucgcccaguacacaucugcccugcuggccggcacaaucacaagcggcuggacauuuggagcuggcgccgcucugcagauccccuuugcuaugcagauggccuaccgguucaacggcaucggagugacccagaaugugcuguacgagaaccagaagcugaucgccaaccaguucaacagcgccaucggcaagauccaggacagccugagcagcacagcaagcgcccugggaaagcugcaggacguggucaaccagaaugcccaggcacugaacacccuggucaagcagcuguccuccaacuucggcgccaucagcucugugcugaacgauauccugagcagacuggacccuccugaggccgaggugcagaucgacagacugaucacaggcagacugcagagccuccagacauacgugacccagcagcugaucagagccgccgagauuagagccucugccaaucuggccgccaccaagaugucugagugugugcugggccagagcaagagaguggacuuuugcggcaagggcuaccaccugaugagcuucccucagucugccccucacggcgugguguuucugcacgugacauaugugcccgcucaagagaagaauuucaccaccgcuccagccaucugccacgacggcaaagcccacuuuccuagagaaggcguguucguguccaacggcacccauugguucgugacacagcggaacuucuacgagccccagaucaucaccaccgacaacaccuucgugucuggcaacugcgacguugugaucggcauugugaacaauaccguguacgacccucugcagcccgagcuggacagcuucaaagaggaacuggacaaguacuuuaagaaccacacaagccccgacguggaccugggcgauaucagcggaaucaaugccagcgucgugaacauccagaaagagaucgaccggcugaacgagguggccaagaaucugaacgagagccugaucgaccugcaagaacuggggaaguacgagcaguacaucaaguggcccugguacaucuggcugggcuuuaucgccggacugauugccaucgugauggucacaaucaugcuguguugcaugaccagcugcuguagcugccugaagggcuguuguagcuguggcagcugcugcaaguucgacgaggacgauucugagcccgugcugaagggcgugaaacugcacuacaccugaggacuaguguccaccugucccuccugggcugcuggauugucucguuuuccugccaaauaaacaggaucagcgcuuuacagaucuaaaaaaaaaaaaaaaaaaaaaaaaaaaaaaaaaaaaaaaaaaaaaaaaaaaaaaaaaaaaaaaaaaaaaaaaaaaaaaaaaaaaaaaaaaaaaaaaaaaa

SEQ ID NO: 25354 - RNA, 4105 nt, Artificial Sequence
  SARS-CoV-2/Wuhan/WIV05/2019__EPI_ISL_402128 spike protein mRNA gc mod (1-1273)(K986P_V987P_N501Y_D614G)
aggagacccgugacccggaaguuguacggcuacgcgacuuucccucccacaaacccucgcgcccuuccuuuccuacuugggcccggcagaaagcuuaccauguucguguuucuggugcugcugccccugguguccagccagugugugaaccugaccaccagaacacagcugccuccagccuacaccaacagcuucaccagaggcguguacuaccccgacaagguguucagauccagcgugcugcacucuacccaggaccuguuccugccuuucuucagcaacgugaccugguuccacgccauccacguguccggcaccaauggcaccaagagauucgacaaccccgugcugcccuucaacgacgggguguacuuugccagcaccgagaaguccaacaucaucagaggcuggaucuucggcaccacacuggacagcaagacccagagccugcugaucgugaacaacgccaccaacguggucaucaaagugugcgaguuccaguucugcaacgaccccuuccugggcgucuacuaccacaagaacaacaagagcuggauggaaagcgaguuccggguguacagcagcgccaacaacugcaccuucgaguacgugucccagccuuuccugauggaccuggaaggcaagcagggcaacuucaagaaccugcgcgaguucguguucaagaacaucgacggcuacuucaaaaucuacagcaagcacaccccuaucaaccucgugcgggaucugccucagggcuucucugcucuggaaccccugguggaucugcccaucggcaucaacaucacccgguuucagacacugcuggcccugcacagaagcuaccugacaccuggcgauagcagcagcggauggacagcuggugccgccgcuuacuaugugggcuaccugcagccuagaaccuuccugcugaaguacaacgagaacggcaccaucaccgacgccguggauugugcucuggauccucugagcgagacaaagugcacccugaaguccuucaccguggaaaagggcaucuaccagaccagcaacuuccgggugcagcccaccgaauccaucgugcgguuccccaauaucaccaaucugugccccuucggcgagguguucaaugccaccagauucgccucuguguacgccuggaaccggaagcggaucagcaauugcguggccgacuacuccgugcuguacaacuccgccagcuucagcaccuucaagugcuacggcguguccccuaccaagcugaacgaccugugcuucacaaacguguacgccgacagcuucgugauccggggagaugaagugcggcagauugccccuggacagacaggcaagaucgccgacuacaacuacaagcugcccgacgacuucaccggcugugugauugccuggaacagcaacaaccuggacuccaaagucggcggcaacuacaauuaccuguaccggcuguuccggaaguccaaucugaagcccuucgagcgggacaucagcaccgaaaucuaucaggccggcagcaccccuugcaacggcguggaaggcuucaacugcuacuucccacugcaguccuacggcuuucagcccacauacggcgugggcuaucagcccuacagagugguggugcugagcuucgaacugcugcaugcuccugccacagugugcggcccuaagaaaagcaccaaucucgugaagaacaaaugcgugaacuucaacuucaacggccugaccggcaccggcgugcugacagagagcaacaagaaguuccugccauuccagcaguuuggccgggauaucgccgauaccacagacgccguuagagauccccagacacuggaaauccuggacaucaccccaugcagcuucggcggagugucugugaucaccccuggcaccaacaccagcaaucagguggcagugcuguaccagggcgugaacuguaccgaagugcccguggccauucacgccgaucagcugacaccuacauggcggguguacuccaccggcagcaauguguuucagaccagagccggcugucugaucggagccgagcacgugaacaauagcuacgagugcgacauccccaucggcgcuggcaucugugccagcuaccagacacagacaaacagccccagacgggcuagaagcguggccagccagagcaucauugccuacacaaugucucugggcgccgagaacagcguggccuacuccaacaacucuaucgcuauccccaccaacuucaccaucagcgugaccaccgagauccugccuguguccaugaccaagaccagcguggacugcaccauguacaucugcggcgauuccaccgagugcuccaaccugcugcugcaguacggcagcuucugcacccagcugaauagagcccugacagggaucgccguggaacaggacaagaacacccaagagguguucgcccaagugaagcaaaucuacaagaccccuccuaucaaggacuucggcggcuucaauuucagccagauucugcccgauccuagcaagcccagcaagcggagcuucaucgaggaccugcuguucaacaaagugacacuggccgacgccggcuucaucaagcaguauggcgauugucugggcgacauugccgccagggaucugauuugcgcccagaaguuuaacggacugacagugcugccuccucugcugaccgaugagaugaucgcccaguacacaucugcccugcuggccggcacaaucacaagcggcuggacauuuggagcuggcgccgcucugcagauccccuuugcuaugcagauggccuaccgguucaacggcaucggagugacccagaaugugcuguacgagaaccagaagcugaucgccaaccaguucaacagcgccaucggcaagauccaggacagccugagcagcacagcaagcgcccugggaaagcugcaggacguggucaaccagaaugcccaggcacugaacacccuggucaagcagcuguccuccaacuucggcgccaucagcucugugcugaacgauauccugagcagacuggacccuccugaggccgaggugcagaucgacagacugaucacaggcagacugcagagccuccagacauacgugacccagcagcugaucagagccgccgagauuagagccucugccaaucuggccgccaccaagaugucugagugugugcugggccagagcaagagaguggacuuuugcggcaagggcuaccaccugaugagcuucccucagucugccccucacggcgugguguuucugcacgugacauaugugcccgcucaagagaagaauuucaccaccgcuccagccaucugccacgacggcaaagcccacuuuccuagagaaggcguguucguguccaacggcacccauugguucgugacacagcggaacuucuacgagccccagaucaucaccaccgacaacaccuucgugucuggcaacugcgacguugugaucggcauugugaacaauaccguguacgacccucugcagcccgagcuggacagcuucaaagaggaacuggacaaguacuuuaagaaccacacaagccccgacguggaccugggcgauaucagcggaaucaaugccagcgucgugaacauccagaaagagaucgaccggcugaacgagguggccaagaaucugaacgagagccugaucgaccugcaagaacuggggaaguacgagcaguacaucaaguggcccugguacaucuggcugggcuuuaucgccggacugauugccaucgugauggucacaaucaugcuguguugcaugaccagcugcuguagcugccugaagggcuguuguagcuguggcagcugcugcaaguucgacgaggacgauucugagcccgugcugaagggcgugaaacugcacuacaccugaggacuaguguccaccugucccuccugggcugcuggauugucucguuuuccugccaaauaaacaggaucagcgcuuuacagaucuaaaaaaaaaaaaaaaaaaaaaaaaaaaaaaaaaaaaaaaaaaaaaaaaaaaaaaaaaaaaaaaaaaaaaaaaaaaaaaaaaaaaaaaaaaaaaaaaaaaa

SEQ ID NO: 25355 - RNA, 4099 nt, Artificial Sequence
  SARS-CoV-2/Wuhan/WIV05/2019__EPI_ISL_402128 spike protein mRNA gc mod (1-1273)(K986P_V987P_H69del_V70del_D614G)
aggagacccgugacccggaaguuguacggcuacgcgacuuucccucccacaaacccucgcgcccuuccuuuccuacuugggcccggcagaaagcuuaccauguucguguuucuggugcugcugccccugguguccagccagugugugaaccugaccaccagaacacagcugccuccagccuacaccaacagcuucaccagaggcguguacuaccccgacaagguguucagauccagcgugcugcacucuacccaggaccuguuccugccuuucuucagcaacgugaccugguuccacgccaucuccggcaccaauggcaccaagagauucgacaaccccgugcugcccuucaacgacgggguguacuuugccagcaccgagaaguccaacaucaucagaggcuggaucuucggcaccacacuggacagcaagacccagagccugcugaucgugaacaacgccaccaacguggucaucaaagugugcgaguuccaguucugcaacgaccccuuccugggcgucuacuaccacaagaacaacaagagcuggauggaaagcgaguuccggguguacagcagcgccaacaacugcaccuucgaguacgugucccagccuuuccugauggaccuggaaggcaagcagggcaacuucaagaaccugcgcgaguucguguucaagaacaucgacggcuacuucaaaaucuacagcaagcacaccccuaucaaccucgugcgggaucugccucagggcuucucugcucuggaaccccugguggaucugcccaucggcaucaacaucacccgguuucagacacugcuggcccugcacagaagcuaccugacaccuggcgauagcagcagcggauggacagcuggugccgccgcuuacuaugugggcuaccugcagccuagaaccuuccugcugaaguacaacgagaacggcaccaucaccgacgccguggauugugcucuggauccucugagcgagacaaagugcacccugaaguccuucaccguggaaaagggcaucuaccagaccagcaacuuccgggugcagcccaccgaauccaucgugcgguuccccaauaucaccaaucugugccccuucggcgagguguucaaugccaccagauucgccucuguguacgccuggaaccggaagcggaucagcaauugcguggccgacuacuccgugcuguacaacuccgccagcuucagcaccuucaagugcuacggcguguccccuaccaagcugaacgaccugugcuucacaaacguguacgccgacagcuucgugauccggggagaugaagugcggcagauugccccuggacagacaggcaagaucgccgacuacaacuacaagcugcccgacgacuucaccggcugugugauugccuggaacagcaacaaccuggacuccaaagucggcggcaacuacaauuaccuguaccggcuguuccggaaguccaaucugaagcccuucgagcgggacaucagcaccgaaaucuaucaggccggcagcaccccuugcaacggcguggaaggcuucaacugcuacuucccacugcaguccuacggcuuucagcccacaaauggcgugggcuaucagcccuacagagugguggugcugagcuucgaacugcugcaugcuccugccacagugugcggcccuaagaaaagcaccaaucucgugaagaacaaaugcgugaacuucaacuucaacggccugaccggcaccggcgugcugacagagagcaacaagaaguuccugccauuccagcaguuuggccgggauaucgccgauaccacagacgccguuagagauccccagacacuggaaauccuggacaucaccccaugcagcuucggcggagugucugugaucaccccuggcaccaacaccagcaaucagguggcagugcuguaccagggcgugaacuguaccgaagugcccguggccauucacgccgaucagcugacaccuacauggcggguguacuccaccggcagcaauguguuucagaccagagccggcugucugaucggagccgagcacgugaacaauagcuacgagugcgacauccccaucggcgcuggcaucugugccagcuaccagacacagacaaacagccccagacgggcuagaagcguggccagccagagcaucauugccuacacaaugucucugggcgccgagaacagcguggccuacuccaacaacucuaucgcuauccccaccaacuucaccaucagcgugaccaccgagauccugccuguguccaugaccaagaccagcguggacugcaccauguacaucugcggcgauuccaccgagugcuccaaccugcugcugcaguacggcagcuucugcacccagcugaauagagcccugacagggaucgccguggaacaggacaagaacacccaagagguguucgcccaagugaagcaaaucuacaagaccccuccuaucaaggacuucggcggcuucaauuucagccagauucugcccgauccuagcaagcccagcaagcggagcuucaucgaggaccugcuguucaacaaagugacacuggccgacgccggcuucaucaagcaguauggcgauugucugggcgacauugccgccagggaucugauuugcgcccagaaguuuaacggacugacagugcugccuccucugcugaccgaugagaugaucgcccaguacacaucugcccugcuggccggcacaaucacaagcggcuggacauuuggagcuggcgccgcucugcagauccccuuugcuaugcagauggccuaccgguucaacggcaucggagugacccagaaugugcuguacgagaaccagaagcugaucgccaaccaguucaacagcgccaucggcaagauccaggacagccugagcagcacagcaagcgcccugggaaagcugcaggacguggucaaccagaaugcccaggcacugaacacccuggucaagcagcuguccuccaacuucggcgccaucagcucugugcugaacgauauccugagcagacuggacccuccugaggccgaggugcagaucgacagacugaucacaggcagacugcagagccuccagacauacgugacccagcagcugaucagagccgccgagauuagagccucugccaaucuggccgccaccaagaugucugagugugugcugggccagagcaagagaguggacuuuugcggcaagggcuaccaccugaugagcuucccucagucugccccucacggcgugguguuucugcacgugacauaugugcccgcucaagagaagaauuucaccaccgcuccagccaucugccacgacggcaaagcccacuuuccuagagaaggcguguucguguccaacggcacccauugguucgugacacagcggaacuucuacgagccccagaucaucaccaccgacaacaccuucgugucuggcaacugcgacguugugaucggcauugugaacaauaccguguacgacccucugcagcccgagcuggacagcuucaaagaggaacuggacaaguacuuuaagaaccacacaagccccgacguggaccugggcgauaucagcggaaucaaugccagcgucgugaacauccagaaagagaucgaccggcugaacgagguggccaagaaucugaacgagagccugaucgaccugcaagaacuggggaaguacgagcaguacaucaaguggcccugguacaucuggcugggcuuuaucgccggacugauugccaucgugauggucacaaucaugcuguguugcaugaccagcugcuguagcugccugaagggcuguuguagcuguggcagcugcugcaaguucgacgaggacgauucugagcccgugcugaagggcgugaaacugcacuacaccugaggacuaguguccaccugucccuccugggcugcuggauugucucguuuuccugccaaauaaacaggaucagcgcuuuacagaucuaaaaaaaaaaaaaaaaaaaaaaaaaaaaaaaaaaaaaaaaaaaaaaaaaaaaaaaaaaaaaaaaaaaaaaaaaaaaaaaaaaaaaaaaaaaaaaaaaaaa

SEQ ID NO: 25356 - RNA, 4105 nt, Artificial Sequence
  SARS-CoV-2/Wuhan/WIV05/2019__EPI_ISL_402128 spike protein mRNA gc mod (1-1273)(K986P_V987P_Y453F_D614G)
aggagacccgugacccggaaguuguacggcuacgcgacuuucccucccacaaacccucgcgcccuuccuuuccuacuugggcccggcagaaagcuuaccauguucguguuucuggugcugcugccccugguguccagccagugugugaaccugaccaccagaacacagcugccuccagccuacaccaacagcuucaccagaggcguguacuaccccgacaagguguucagauccagcgugcugcacucuacccaggaccuguuccugccuuucuucagcaacgugaccugguuccacgccauccacguguccggcaccaauggcaccaagagauucgacaaccccgugcugcccuucaacgacgggguguacuuugccagcaccgagaaguccaacaucaucagaggcuggaucuucggcaccacacuggacagcaagacccagagccugcugaucgugaacaacgccaccaacguggucaucaaagugugcgaguuccaguucugcaacgaccccuuccugggcgucuacuaccacaagaacaacaagagcuggauggaaagcgaguuccggguguacagcagcgccaacaacugcaccuucgaguacgugucccagccuuuccugauggaccuggaaggcaagcagggcaacuucaagaaccugcgcgaguucguguucaagaacaucgacggcuacuucaaaaucuacagcaagcacaccccuaucaaccucgugcgggaucugccucagggcuucucugcucuggaaccccugguggaucugcccaucggcaucaacaucacccgguuucagacacugcuggcccugcacagaagcuaccugacaccuggcgauagcagcagcggauggacagcuggugccgccgcuuacuaugugggcuaccugcagccuagaaccuuccugcugaaguacaacgagaacggcaccaucaccgacgccguggauugugcucuggauccucugagcgagacaaagugcacccugaaguccuucaccguggaaaagggcaucuaccagaccagcaacuuccgggugcagcccaccgaauccaucgugcgguuccccaauaucaccaaucugugccccuucggcgagguguucaaugccaccagauucgccucuguguacgccuggaaccggaagcggaucagcaauugcguggccgacuacuccgugcuguacaacuccgccagcuucagcaccuucaagugcuacggcguguccccuaccaagcugaacgaccugugcuucacaaacguguacgccgacagcuucgugauccggggagaugaagugcggcagauugccccuggacagacaggcaagaucgccgacuacaacuacaagcugcccgacgacuucaccggcugugugauugccuggaacagcaacaaccuggacuccaaagucggcggcaacuacaauuaccuguuccggcuguuccggaaguccaaucugaagcccuucgagcgggacaucagcaccgaaaucuaucaggccggcagcaccccuugcaacggcguggaaggcuucaacugcuacuucccacugcaguccuacggcuuucagcccacaaauggcgugggcuaucagcccuacagagugguggugcugagcuucgaacugcugcaugcuccugccacagugugcggcccuaagaaaagcaccaaucucgugaagaacaaaugcgugaacuucaacuucaacggccugaccggcaccggcgugcugacagagagcaacaagaaguuccugccauuccagcaguuuggccgggauaucgccgauaccacagacgccguuagagauccccagacacuggaaauccuggacaucaccccaugcagcuucggcggagugucugugaucaccccuggcaccaacaccagcaaucagguggcagugcuguaccagggcgugaacuguaccgaagugcccguggccauucacgccgaucagcugacaccuacauggcggguguacuccaccggcagcaauguguuucagaccagagccggcugucugaucggagccgagcacgugaacaauagcuacgagugcgacauccccaucggcgcuggcaucugugccagcuaccagacacagacaaacagccccagacgggcuagaagcguggccagccagagcaucauugccuacacaaugucucugggcgccgagaacagcguggccuacuccaacaacucuaucgcuauccccaccaacuucaccaucagcgugaccaccgagauccugccuguguccaugaccaagaccagcguggacugcaccauguacaucugcggcgauuccaccgagugcuccaaccugcugcugcaguacggcagcuucugcacccagcugaauagagcccugacagggaucgccguggaacaggacaagaacacccaagagguguucgcccaagugaagcaaaucuacaagaccccuccuaucaaggacuucggcggcuucaauuucagccagauucugcccgauccuagcaagcccagcaagcggagcuucaucgaggaccugcuguucaacaaagugacacuggccgacgccggcuucaucaagcaguauggcgauugucugggcgacauugccgccagggaucugauuugcgcccagaaguuuaacggacugacagugcugccuccucugcugaccgaugagaugaucgcccaguacacaucugcccugcuggccggcacaaucacaagcggcuggacauuuggagcuggcgccgcucugcagauccccuuugcuaugcagauggccuaccgguucaacggcaucggagugacccagaaugugcuguacgagaaccagaagcugaucgccaaccaguucaacagcgccaucggcaagauccaggacagccugagcagcacagcaagcgcccugggaaagcugcaggacguggucaaccagaaugcccaggcacugaacacccuggucaagcagcuguccuccaacuucggcgccaucagcucugugcugaacgauauccugagcagacuggacccuccugaggccgaggugcagaucgacagacugaucacaggcagacugcagagccuccagacauacgugacccagcagcugaucagagccgccgagauuagagccucugccaaucuggccgccaccaagaugucugagugugugcugggccagagcaagagaguggacuuuugcggcaagggcuaccaccugaugagcuucccucagucugccccucacggcgugguguuucugcacgugacauaugugcccgcucaagagaagaauuucaccaccgcuccagccaucugccacgacggcaaagcccacuuuccuagagaaggcguguucguguccaacggcacccauugguucgugacacagcggaacuucuacgagccccagaucaucaccaccgacaacaccuucgugucuggcaacugcgacguugugaucggcauugugaacaauaccguguacgacccucugcagcccgagcuggacagcuucaaagaggaacuggacaaguacuuuaagaaccacacaagccccgacguggaccugggcgauaucagcggaaucaaugccagcgucgugaacauccagaaagagaucgaccggcugaacgagguggccaagaaucugaacgagagccugaucgaccugcaagaacuggggaaguacgagcaguacaucaaguggcccugguacaucuggcugggcuuuaucgccggacugauugccaucgugauggucacaaucaugcuguguugcaugaccagcugcuguagcugccugaagggcuguuguagcuguggcagcugcugcaaguucgacgaggacgauucugagcccgugcugaagggcgugaaacugcacuacaccugaggacuaguguccaccugucccuccugggcugcuggauugucucguuuuccugccaaauaaacaggaucagcgcuuuacagaucuaaaaaaaaaaaaaaaaaaaaaaaaaaaaaaaaaaaaaaaaaaaaaaaaaaaaaaaaaaaaaaaaaaaaaaaaaaaaaaaaaaaaaaaaaaaaaaaaaaaa

SEQ ID NO: 25357 - RNA, 4105 nt, Artificial Sequence
  SARS-CoV-2/Wuhan/WIV05/2019__EPI_ISL_402128 spike protein mRNA gc mod (1-1273)(K986P_V987P_D614G_I692V)
aggagacccgugacccggaaguuguacggcuacgcgacuuucccucccacaaacccucgcgcccuuccuuuccuacuugggcccggcagaaagcuuaccauguucguguuucuggugcugcugccccugguguccagccagugugugaaccugaccaccagaacacagcugccuccagccuacaccaacagcuucaccagaggcguguacuaccccgacaagguguucagauccagcgugcugcacucuacccaggaccuguuccugccuuucuucagcaacgugaccugguuccacgccauccacguguccggcaccaauggcaccaagagauucgacaaccccgugcugcccuucaacgacgggguguacuuugccagcaccgagaaguccaacaucaucagaggcuggaucuucggcaccacacuggacagcaagacccagagccugcugaucgugaacaacgccaccaacguggucaucaaagugugcgaguuccaguucugcaacgaccccuuccugggcgucuacuaccacaagaacaacaagagcuggauggaaagcgaguuccggguguacagcagcgccaacaacugcaccuucgaguacgugucccagccuuuccugauggaccuggaaggcaagcagggcaacuucaagaaccugcgcgaguucguguucaagaacaucgacggcuacuucaaaaucuacagcaagcacaccccuaucaaccucgugcgggaucugccucagggcuucucugcucuggaaccccugguggaucugcccaucggcaucaacaucacccgguuucagacacugcuggcccugcacagaagcuaccugacaccuggcgauagcagcagcggauggacagcuggugccgccgcuuacuaugugggcuaccugcagccuagaaccuuccugcugaaguacaacgagaacggcaccaucaccgacgccguggauugugcucuggauccucugagcgagacaaagugcacccugaaguccuucaccguggaaaagggcaucuaccagaccagcaacuuccgggugcagcccaccgaauccaucgugcgguuccccaauaucaccaaucugugccccuucggcgagguguucaaugccaccagauucgccucuguguacgccuggaaccggaagcggaucagcaauugcguggccgacuacuccgugcuguacaacuccgccagcuucagcaccuucaagugcuacggcguguccccuaccaagcugaacgaccugugcuucacaaacguguacgccgacagcuucgugauccggggagaugaagugcggcagauugccccuggacagacaggcaagaucgccgacuacaacuacaagcugcccgacgacuucaccggcugugugauugccuggaacagcaacaaccuggacuccaaagucggcggcaacuacaauuaccuguaccggcuguuccggaaguccaaucugaagcccuucgagcgggacaucagcaccgaaaucuaucaggccggcagcaccccuugcaacggcguggaaggcuucaacugcuacuucccacugcaguccuacggcuuucagcccacaaauggcgugggcuaucagcccuacagagugguggugcugagcuucgaacugcugcaugcuccugccacagugugcggcccuaagaaaagcaccaaucucgugaagaacaaaugcgugaacuucaacuucaacggccugaccggcaccggcgugcugacagagagcaacaagaaguuccugccauuccagcaguuuggccgggauaucgccgauaccacagacgccguuagagauccccagacacuggaaauccuggacaucaccccaugcagcuucggcggagugucugugaucaccccuggcaccaacaccagcaaucagguggcagugcuguaccagggcgugaacuguaccgaagugcccguggccauucacgccgaucagcugacaccuacauggcggguguacuccaccggcagcaauguguuucagaccagagccggcugucugaucggagccgagcacgugaacaauagcuacgagugcgacauccccaucggcgcuggcaucugugccagcuaccagacacagacaaacagccccagacgggcuagaagcguggccagccagagcgugauugccuacacaaugucucugggcgccgagaacagcguggccuacuccaacaacucuaucgcuauccccaccaacuucaccaucagcgugaccaccgagauccugccuguguccaugaccaagaccagcguggacugcaccauguacaucugcggcgauuccaccgagugcuccaaccugcugcugcaguacggcagcuucugcacccagcugaauagagcccugacagggaucgccguggaacaggacaagaacacccaagagguguucgcccaagugaagcaaaucuacaagaccccuccuaucaaggacuucggcggcuucaauuucagccagauucugcccgauccuagcaagcccagcaagcggagcuucaucgaggaccugcuguucaacaaagugacacuggccgacgccggcuucaucaagcaguauggcgauugucugggcgacauugccgccagggaucugauuugcgcccagaaguuuaacggacugacagugcugccuccucugcugaccgaugagaugaucgcccaguacacaucugcccugcuggccggcacaaucacaagcggcuggacauuuggagcuggcgccgcucugcagauccccuuugcuaugcagauggccuaccgguucaacggcaucggagugacccagaaugugcuguacgagaaccagaagcugaucgccaaccaguucaacagcgccaucggcaagauccaggacagccugagcagcacagcaagcgcccugggaaagcugcaggacguggucaaccagaaugcccaggcacugaacacccuggucaagcagcuguccuccaacuucggcgccaucagcucugugcugaacgauauccugagcagacuggacccuccugaggccgaggugcagaucgacagacugaucacaggcagacugcagagccuccagacauacgugacccagcagcugaucagagccgccgagauuagagccucugccaaucuggccgccaccaagaugucugagugugugcugggccagagcaagagaguggacuuuugcggcaagggcuaccaccugaugagcuucccucagucugccccucacggcgugguguuucugcacgugacauaugugcccgcucaagagaagaauuucaccaccgcuccagccaucugccacgacggcaaagcccacuuuccuagagaaggcguguucguguccaacggcacccauugguucgugacacagcggaacuucuacgagccccagaucaucaccaccgacaacaccuucgugucuggcaacugcgacguugugaucggcauugugaacaauaccguguacgacccucugcagcccgagcuggacagcuucaaagaggaacuggacaaguacuuuaagaaccacacaagccccgacguggaccugggcgauaucagcggaaucaaugccagcgucgugaacauccagaaagagaucgaccggcugaacgagguggccaagaaucugaacgagagccugaucgaccugcaagaacuggggaaguacgagcaguacaucaaguggcccugguacaucuggcugggcuuuaucgccggacugauugccaucgugauggucacaaucaugcuguguugcaugaccagcugcuguagcugccugaagggcuguuguagcuguggcagcugcugcaaguucgacgaggacgauucugagcccgugcugaagggcgugaaacugcacuacaccugaggacuaguguccaccugucccuccugggcugcuggauugucucguuuuccugccaaauaaacaggaucagcgcuuuacagaucuaaaaaaaaaaaaaaaaaaaaaaaaaaaaaaaaaaaaaaaaaaaaaaaaaaaaaaaaaaaaaaaaaaaaaaaaaaaaaaaaaaaaaaaaaaaaaaaaaaaa

SEQ ID NO: 25358 - RNA, 4105 nt, Artificial Sequence
  SARS-CoV-2/Wuhan/WIV05/2019__EPI_ISL_402128 spike protein mRNA gc mod (1-1273)(K986P_V987P_D614G_M1229I)
aggagacccgugacccggaaguuguacggcuacgcgacuuucccucccacaaacccucgcgcccuuccuuuccuacuugggcccggcagaaagcuuaccauguucguguuucuggugcugcugccccugguguccagccagugugugaaccugaccaccagaacacagcugccuccagccuacaccaacagcuucaccagaggcguguacuaccccgacaagguguucagauccagcgugcugcacucuacccaggaccuguuccugccuuucuucagcaacgugaccugguuccacgccauccacguguccggcaccaauggcaccaagagauucgacaaccccgugcugcccuucaacgacgggguguacuuugccagcaccgagaaguccaacaucaucagaggcuggaucuucggcaccacacuggacagcaagacccagagccugcugaucgugaacaacgccaccaacguggucaucaaagugugcgaguuccaguucugcaacgaccccuuccugggcgucuacuaccacaagaacaacaagagcuggauggaaagcgaguuccggguguacagcagcgccaacaacugcaccuucgaguacgugucccagccuuuccugauggaccuggaaggcaagcagggcaacuucaagaaccugcgcgaguucguguucaagaacaucgacggcuacuucaaaaucuacagcaagcacaccccuaucaaccucgugcgggaucugccucagggcuucucugcucuggaaccccugguggaucugcccaucggcaucaacaucacccgguuucagacacugcuggcccugcacagaagcuaccugacaccuggcgauagcagcagcggauggacagcuggugccgccgcuuacuaugugggcuaccugcagccuagaaccuuccugcugaaguacaacgagaacggcaccaucaccgacgccguggauugugcucuggauccucugagcgagacaaagugcacccugaaguccuucaccguggaaaagggcaucuaccagaccagcaacuuccgggugcagcccaccgaauccaucgugcgguuccccaauaucaccaaucugugccccuucggcgagguguucaaugccaccagauucgccucuguguacgccuggaaccggaagcggaucagcaauugcguggccgacuacuccgugcuguacaacuccgccagcuucagcaccuucaagugcuacggcguguccccuaccaagcugaacgaccugugcuucacaaacguguacgccgacagcuucgugauccggggagaugaagugcggcagauugccccuggacagacaggcaagaucgccgacuacaacuacaagcugcccgacgacuucaccggcugugugauugccuggaacagcaacaaccuggacuccaaagucggcggcaacuacaauuaccuguaccggcuguuccggaaguccaaucugaagcccuucgagcgggacaucagcaccgaaaucuaucaggccggcagcaccccuugcaacggcguggaaggcuucaacugcuacuucccacugcaguccuacggcuuucagcccacaaauggcgugggcuaucagcccuacagagugguggugcugagcuucgaacugcugcaugcuccugccacagugugcggcccuaagaaaagcaccaaucucgugaagaacaaaugcgugaacuucaacuucaacggccugaccggcaccggcgugcugacagagagcaacaagaaguuccugccauuccagcaguuuggccgggauaucgccgauaccacagacgccguuagagauccccagacacuggaaauccuggacaucaccccaugcagcuucggcggagugucugugaucaccccuggcaccaacaccagcaaucagguggcagugcuguaccagggcgugaacuguaccgaagugcccguggccauucacgccgaucagcugacaccuacauggcggguguacuccaccggcagcaauguguuucagaccagagccggcugucugaucggagccgagcacgugaacaauagcuacgagugcgacauccccaucggcgcuggcaucugugccagcuaccagacacagacaaacagccccagacgggcuagaagcguggccagccagagcaucauugccuacacaaugucucugggcgccgagaacagcguggccuacuccaacaacucuaucgcuauccccaccaacuucaccaucagcgugaccaccgagauccugccuguguccaugaccaagaccagcguggacugcaccauguacaucugcggcgauuccaccgagugcuccaaccugcugcugcaguacggcagcuucugcacccagcugaauagagcccugacagggaucgccguggaacaggacaagaacacccaagagguguucgcccaagugaagcaaaucuacaagaccccuccuaucaaggacuucggcggcuucaauuucagccagauucugcccgauccuagcaagcccagcaagcggagcuucaucgaggaccugcuguucaacaaagugacacuggccgacgccggcuucaucaagcaguauggcgauugucugggcgacauugccgccagggaucugauuugcgcccagaaguuuaacggacugacagugcugccuccucugcugaccgaugagaugaucgcccaguacacaucugcccugcuggccggcacaaucacaagcggcuggacauuuggagcuggcgccgcucugcagauccccuuugcuaugcagauggccuaccgguucaacggcaucggagugacccagaaugugcuguacgagaaccagaagcugaucgccaaccaguucaacagcgccaucggcaagauccaggacagccugagcagcacagcaagcgcccugggaaagcugcaggacguggucaaccagaaugcccaggcacugaacacccuggucaagcagcuguccuccaacuucggcgccaucagcucugugcugaacgauauccugagcagacuggacccuccugaggccgaggugcagaucgacagacugaucacaggcagacugcagagccuccagacauacgugacccagcagcugaucagagccgccgagauuagagccucugccaaucuggccgccaccaagaugucugagugugugcugggccagagcaagagaguggacuuuugcggcaagggcuaccaccugaugagcuucccucagucugccccucacggcgugguguuucugcacgugacauaugugcccgcucaagagaagaauuucaccaccgcuccagccaucugccacgacggcaaagcccacuuuccuagagaaggcguguucguguccaacggcacccauugguucgugacacagcggaacuucuacgagccccagaucaucaccaccgacaacaccuucgugucuggcaacugcgacguugugaucggcauugugaacaauaccguguacgacccucugcagcccgagcuggacagcuucaaagaggaacuggacaaguacuuuaagaaccacacaagccccgacguggaccugggcgauaucagcggaaucaaugccagcgucgugaacauccagaaagagaucgaccggcugaacgagguggccaagaaucugaacgagagccugaucgaccugcaagaacuggggaaguacgagcaguacaucaaguggcccugguacaucuggcugggcuuuaucgccggacugauugccaucgugaucgucacaaucaugcuguguugcaugaccagcugcuguagcugccugaagggcuguuguagcuguggcagcugcugcaaguucgacgaggacgauucugagcccgugcugaagggcgugaaacugcacuacaccugaggacuaguguccaccugucccuccugggcugcuggauugucucguuuuccugccaaauaaacaggaucagcgcuuuacagaucuaaaaaaaaaaaaaaaaaaaaaaaaaaaaaaaaaaaaaaaaaaaaaaaaaaaaaaaaaaaaaaaaaaaaaaaaaaaaaaaaaaaaaaaaaaaaaaaaaaaa

SEQ ID NO: 25359 - RNA, 4099 nt, Artificial Sequence
  SARS-CoV-2/Wuhan/WIV05/2019__EPI_ISL_402128 spike protein mRNA gc mod (1-1273)(K986P_V987P_H69del_V70del_A222V_Y453F_S477N_D614G_I692V)
aggagacccgugacccggaaguuguacggcuacgcgacuuucccucccacaaacccucgcgcccuuccuuuccuacuugggcccggcagaaagcuuaccauguucguguuucuggugcugcugccccugguguccagccagugugugaaccugaccaccagaacacagcugccuccagccuacaccaacagcuucaccagaggcguguacuaccccgacaagguguucagauccagcgugcugcacucuacccaggaccuguuccugccuuucuucagcaacgugaccugguuccacgccaucuccggcaccaauggcaccaagagauucgacaaccccgugcugcccuucaacgacgggguguacuuugccagcaccgagaaguccaacaucaucagaggcuggaucuucggcaccacacuggacagcaagacccagagccugcugaucgugaacaacgccaccaacguggucaucaaagugugcgaguuccaguucugcaacgaccccuuccugggcgucuacuaccacaagaacaacaagagcuggauggaaagcgaguuccggguguacagcagcgccaacaacugcaccuucgaguacgugucccagccuuuccugauggaccuggaaggcaagcagggcaacuucaagaaccugcgcgaguucguguucaagaacaucgacggcuacuucaaaaucuacagcaagcacaccccuaucaaccucgugcgggaucugccucagggcuucucugugcuggaaccccugguggaucugcccaucggcaucaacaucacccgguuucagacacugcuggcccugcacagaagcuaccugacaccuggcgauagcagcagcggauggacagcuggugccgccgcuuacuaugugggcuaccugcagccuagaaccuuccugcugaaguacaacgagaacggcaccaucaccgacgccguggauugugcucuggauccucugagcgagacaaagugcacccugaaguccuucaccguggaaaagggcaucuaccagaccagcaacuuccgggugcagcccaccgaauccaucgugcgguuccccaauaucaccaaucugugccccuucggcgagguguucaaugccaccagauucgccucuguguacgccuggaaccggaagcggaucagcaauugcguggccgacuacuccgugcuguacaacuccgccagcuucagcaccuucaagugcuacggcguguccccuaccaagcugaacgaccugugcuucacaaacguguacgccgacagcuucgugauccggggagaugaagugcggcagauugccccuggacagacaggcaagaucgccgacuacaacuacaagcugcccgacgacuucaccggcugugugauugccuggaacagcaacaaccuggacuccaaagucggcggcaacuacaauuaccuguuccggcuguuccggaaguccaaucugaagcccuucgagcgggacaucagcaccgaaaucuaucaggccggcaacaccccuugcaacggcguggaaggcuucaacugcuacuucccacugcaguccuacggcuuucagcccacaaauggcgugggcuaucagcccuacagagugguggugcugagcuucgaacugcugcaugcuccugccacagugugcggcccuaagaaaagcaccaaucucgugaagaacaaaugcgugaacuucaacuucaacggccugaccggcaccggcgugcugacagagagcaacaagaaguuccugccauuccagcaguuuggccgggauaucgccgauaccacagacgccguuagagauccccagacacuggaaauccuggacaucaccccaugcagcuucggcggagugucugugaucaccccuggcaccaacaccagcaaucagguggcagugcuguaccagggcgugaacuguaccgaagugcccguggccauucacgccgaucagcugacaccuacauggcggguguacuccaccggcagcaauguguuucagaccagagccggcugucugaucggagccgagcacgugaacaauagcuacgagugcgacauccccaucggcgcuggcaucugugccagcuaccagacacagacaaacagccccagacgggcuagaagcguggccagccagagcgugauugccuacacaaugucucugggcgccgagaacagcguggccuacuccaacaacucuaucgcuauccccaccaacuucaccaucagcgugaccaccgagauccugccuguguccaugaccaagaccagcguggacugcaccauguacaucugcggcgauuccaccgagugcuccaaccugcugcugcaguacggcagcuucugcacccagcugaauagagcccugacagggaucgccguggaacaggacaagaacacccaagagguguucgcccaagugaagcaaaucuacaagaccccuccuaucaaggacuucggcggcuucaauuucagccagauucugcccgauccuagcaagcccagcaagcggagcuucaucgaggaccugcuguucaacaaagugacacuggccgacgccggcuucaucaagcaguauggcgauugucugggcgacauugccgccagggaucugauuugcgcccagaaguuuaacggacugacagugcugccuccucugcugaccgaugagaugaucgcccaguacacaucugcccugcuggccggcacaaucacaagcggcuggacauuuggagcuggcgccgcucugcagauccccuuugcuaugcagauggccuaccgguucaacggcaucggagugacccagaaugugcuguacgagaaccagaagcugaucgccaaccaguucaacagcgccaucggcaagauccaggacagccugagcagcacagcaagcgcccugggaaagcugcaggacguggucaaccagaaugcccaggcacugaacacccuggucaagcagcuguccuccaacuucggcgccaucagcucugugcugaacgauauccugagcagacuggacccuccugaggccgaggugcagaucgacagacugaucacaggcagacugcagagccuccagacauacgugacccagcagcugaucagagccgccgagauuagagccucugccaaucuggccgccaccaagaugucugagugugugcugggccagagcaagagaguggacuuuugcggcaagggcuaccaccugaugagcuucccucagucugccccucacggcgugguguuucugcacgugacauaugugcccgcucaagagaagaauuucaccaccgcuccagccaucugccacgacggcaaagcccacuuuccuagagaaggcguguucguguccaacggcacccauugguucgugacacagcggaacuucuacgagccccagaucaucaccaccgacaacaccuucgugucuggcaacugcgacguugugaucggcauugugaacaauaccguguacgacccucugcagcccgagcuggacagcuucaaagaggaacuggacaaguacuuuaagaaccacacaagccccgacguggaccugggcgauaucagcggaaucaaugccagcgucgugaacauccagaaagagaucgaccggcugaacgagguggccaagaaucugaacgagagccugaucgaccugcaagaacuggggaaguacgagcaguacaucaaguggcccugguacaucuggcugggcuuuaucgccggacugauugccaucgugauggucacaaucaugcuguguugcaugaccagcugcuguagcugccugaagggcuguuguagcuguggcagcugcugcaaguucgacgaggacgauucugagcccgugcugaagggcgugaaacugcacuacaccugaggacuaguguccaccugucccuccugggcugcuggauugucucguuuuccugccaaauaaacaggaucagcgcuuuacagaucuaaaaaaaaaaaaaaaaaaaaaaaaaaaaaaaaaaaaaaaaaaaaaaaaaaaaaaaaaaaaaaaaaaaaaaaaaaaaaaaaaaaaaaaaaaaaaaaaaaaa

SEQ ID NO: 25360 - RNA, 4099 nt, Artificial Sequence
  SARS-CoV-2/Wuhan/WIV05/2019__EPI_ISL_402128 spike protein mRNA gc mod (1-1273)(K986P_V987P_H69del_V70del_Y453F_D614G_I692V_M1229I)
aggagacccgugacccggaaguuguacggcuacgcgacuuucccucccacaaacccucgcgcccuuccuuuccuacuugggcccggcagaaagcuuaccauguucguguuucuggugcugcugccccugguguccagccagugugugaaccugaccaccagaacacagcugccuccagccuacaccaacagcuucaccagaggcguguacuaccccgacaagguguucagauccagcgugcugcacucuacccaggaccuguuccugccuuucuucagcaacgugaccugguuccacgccaucuccggcaccaauggcaccaagagauucgacaaccccgugcugcccuucaacgacgggguguacuuugccagcaccgagaaguccaacaucaucagaggcuggaucuucggcaccacacuggacagcaagacccagagccugcugaucgugaacaacgccaccaacguggucaucaaagugugcgaguuccaguucugcaacgaccccuuccugggcgucuacuaccacaagaacaacaagagcuggauggaaagcgaguuccggguguacagcagcgccaacaacugcaccuucgaguacgugucccagccuuuccugauggaccuggaaggcaagcagggcaacuucaagaaccugcgcgaguucguguucaagaacaucgacggcuacuucaaaaucuacagcaagcacaccccuaucaaccucgugcgggaucugccucagggcuucucugcucuggaaccccugguggaucugcccaucggcaucaacaucacccgguuucagacacugcuggcccugcacagaagcuaccugacaccuggcgauagcagcagcggauggacagcuggugccgccgcuuacuaugugggcuaccugcagccuagaaccuuccugcugaaguacaacgagaacggcaccaucaccgacgccguggauugugcucuggauccucugagcgagacaaagugcacccugaaguccuucaccguggaaaagggcaucuaccagaccagcaacuuccgggugcagcccaccgaauccaucgugcgguuccccaauaucaccaaucugugccccuucggcgagguguucaaugccaccagauucgccucuguguacgccuggaaccggaagcggaucagcaauugcguggccgacuacuccgugcuguacaacuccgccagcuucagcaccuucaagugcuacggcguguccccuaccaagcugaacgaccugugcuucacaaacguguacgccgacagcuucgugauccggggagaugaagugcggcagauugccccuggacagacaggcaagaucgccgacuacaacuacaagcugcccgacgacuucaccggcugugugauugccuggaacagcaacaaccuggacuccaaagucggcggcaacuacaauuaccuguuccggcuguuccggaaguccaaucugaagcccuucgagcgggacaucagcaccgaaaucuaucaggccggcagcaccccuugcaacggcguggaaggcuucaacugcuacuucccacugcaguccuacggcuuucagcccacaaauggcgugggcuaucagcccuacagagugguggugcugagcuucgaacugcugcaugcuccugccacagugugcggcccuaagaaaagcaccaaucucgugaagaacaaaugcgugaacuucaacuucaacggccugaccggcaccggcgugcugacagagagcaacaagaaguuccugccauuccagcaguuuggccgggauaucgccgauaccacagacgccguuagagauccccagacacuggaaauccuggacaucaccccaugcagcuucggcggagugucugugaucaccccuggcaccaacaccagcaaucagguggcagugcuguaccagggcgugaacuguaccgaagugcccguggccauucacgccgaucagcugacaccuacauggcggguguacuccaccggcagcaauguguuucagaccagagccggcugucugaucggagccgagcacgugaacaauagcuacgagugcgacauccccaucggcgcuggcaucugugccagcuaccagacacagacaaacagccccagacgggcuagaagcguggccagccagagcgugauugccuacacaaugucucugggcgccgagaacagcguggccuacuccaacaacucuaucgcuauccccaccaacuucaccaucagcgugaccaccgagauccugccuguguccaugaccaagaccagcguggacugcaccauguacaucugcggcgauuccaccgagugcuccaaccugcugcugcaguacggcagcuucugcacccagcugaauagagcccugacagggaucgccguggaacaggacaagaacacccaagagguguucgcccaagugaagcaaaucuacaagaccccuccuaucaaggacuucggcggcuucaauuucagccagauucugcccgauccuagcaagcccagcaagcggagcuucaucgaggaccugcuguucaacaaagugacacuggccgacgccggcuucaucaagcaguauggcgauugucugggcgacauugccgccagggaucugauuugcgcccagaaguuuaacggacugacagugcugccuccucugcugaccgaugagaugaucgcccaguacacaucugcccugcuggccggcacaaucacaagcggcuggacauuuggagcuggcgccgcucugcagauccccuuugcuaugcagauggccuaccgguucaacggcaucggagugacccagaaugugcuguacgagaaccagaagcugaucgccaaccaguucaacagcgccaucggcaagauccaggacagccugagcagcacagcaagcgcccugggaaagcugcaggacguggucaaccagaaugcccaggcacugaacacccuggucaagcagcuguccuccaacuucggcgccaucagcucugugcugaacgauauccugagcagacuggacccuccugaggccgaggugcagaucgacagacugaucacaggcagacugcagagccuccagacauacgugacccagcagcugaucagagccgccgagauuagagccucugccaaucuggccgccaccaagaugucugagugugugcugggccagagcaagagaguggacuuuugcggcaagggcuaccaccugaugagcuucccucagucugccccucacggcgugguguuucugcacgugacauaugugcccgcucaagagaagaauuucaccaccgcuccagccaucugccacgacggcaaagcccacuuuccuagagaaggcguguucguguccaacggcacccauugguucgugacacagcggaacuucuacgagccccagaucaucaccaccgacaacaccuucgugucuggcaacugcgacguugugaucggcauugugaacaauaccguguacgacccucugcagcccgagcuggacagcuucaaagaggaacuggacaaguacuuuaagaaccacacaagccccgacguggaccugggcgauaucagcggaaucaaugccagcgucgugaacauccagaaagagaucgaccggcugaacgagguggccaagaaucugaacgagagccugaucgaccugcaagaacuggggaaguacgagcaguacaucaaguggcccugguacaucuggcugggcuuuaucgccggacugauugccaucgugaucgucacaaucaugcuguguugcaugaccagcugcuguagcugccugaagggcuguuguagcuguggcagcugcugcaaguucgacgaggacgauucugagcccgugcugaagggcgugaaacugcacuacaccugaggacuaguguccaccugucccuccugggcugcuggauugucucguuuuccugccaaauaaacaggaucagcgcuuuacagaucuaaaaaaaaaaaaaaaaaaaaaaaaaaaaaaaaaaaaaaaaaaaaaaaaaaaaaaaaaaaaaaaaaaaaaaaaaaaaaaaaaaaaaaaaaaaaaaaaaaaa

SEQ ID NO: 25361 - RNA, 4096 nt, Artificial Sequence
  SARS-CoV-2/Wuhan/WIV05/2019__EPI_ISL_402128 spike protein mRNA gc mod (1-1273)(K986P_V987P_K986P_V987P_H69del_V70del_Y144del_N501Y_A570 D_D614G_P681H_T716I_S982A_D1118H)
aggagacccgugacccggaaguuguacggcuacgcgacuuucccucccacaaacccucgcgcccuuccuuuccuacuugggcccggcagaaagcuuaccauguucguguuucuggugcugcugccccugguguccagccagugugugaaccugaccaccagaacacagcugccuccagccuacaccaacagcuucaccagaggcguguacuaccccgacaagguguucagauccagcgugcugcacucuacccaggaccuguuccugccuuucuucagcaacgugaccugguuccacgccaucuccggcaccaauggcaccaagagauucgacaaccccgugcugcccuucaacgacgggguguacuuugccagcaccgagaaguccaacaucaucagaggcuggaucuucggcaccacacuggacagcaagacccagagccugcugaucgugaacaacgccaccaacguggucaucaaagugugcgaguuccaguucugcaacgaccccuuccugggcgucuaccacaagaacaacaagagcuggauggaaagcgaguuccggguguacagcagcgccaacaacugcaccuucgaguacgugucccagccuuuccugauggaccuggaaggcaagcagggcaacuucaagaaccugcgcgaguucguguucaagaacaucgacggcuacuucaaaaucuacagcaagcacaccccuaucaaccucgugcgggaucugccucagggcuucucugcucuggaaccccugguggaucugcccaucggcaucaacaucacccgguuucagacacugcuggcccugcacagaagcuaccugacaccuggcgauagcagcagcggauggacagcuggugccgccgcuuacuaugugggcuaccugcagccuagaaccuuccugcugaaguacaacgagaacggcaccaucaccgacgccguggauugugcucuggauccucugagcgagacaaagugcacccugaaguccuucaccguggaaaagggcaucuaccagaccagcaacuuccgggugcagcccaccgaauccaucgugcgguuccccaauaucaccaaucugugccccuucggcgagguguucaaugccaccagauucgccucuguguacgccuggaaccggaagcggaucagcaauugcguggccgacuacuccgugcuguacaacuccgccagcuucagcaccuucaagugcuacggcguguccccuaccaagcugaacgaccugugcuucacaaacguguacgccgacagcuucgugauccggggagaugaagugcggcagauugccccuggacagacaggcaagaucgccgacuacaacuacaagcugcccgacgacuucaccggcugugugauugccuggaacagcaacaaccuggacuccaaagucggcggcaacuacaauuaccuguaccggcuguuccggaaguccaaucugaagcccuucgagcgggacaucagcaccgaaaucuaucaggccggcagcaccccuugcaacggcguggaaggcuucaacugcuacuucccacugcaguccuacggcuuucagcccacauacggcgugggcuaucagcccuacagagugguggugcugagcuucgaacugcugcaugcuccugccacagugugcggcccuaagaaaagcaccaaucucgugaagaacaaaugcgugaacuucaacuucaacggccugaccggcaccggcgugcugacagagagcaacaagaaguuccugccauuccagcaguuuggccgggauaucgacgauaccacagacgccguuagagauccccagacacuggaaauccuggacaucaccccaugcagcuucggcggagugucugugaucaccccuggcaccaacaccagcaaucagguggcagugcuguaccagggcgugaacuguaccgaagugcccguggccauucacgccgaucagcugacaccuacauggcggguguacuccaccggcagcaauguguuucagaccagagccggcugucugaucggagccgagcacgugaacaauagcuacgagugcgacauccccaucggcgcuggcaucugugccagcuaccagacacagacaaacagccacagacgggcuagaagcguggccagccagagcaucauugccuacacaaugucucugggcgccgagaacagcguggccuacuccaacaacucuaucgcuauccccaucaacuucaccaucagcgugaccaccgagauccugccuguguccaugaccaagaccagcguggacugcaccauguacaucugcggcgauuccaccgagugcuccaaccugcugcugcaguacggcagcuucugcacccagcugaauagagcccugacagggaucgccguggaacaggacaagaacacccaagagguguucgcccaagugaagcaaaucuacaagaccccuccuaucaaggacuucggcggcuucaauuucagccagauucugcccgauccuagcaagcccagcaagcggagcuucaucgaggaccugcuguucaacaaagugacacuggccgacgccggcuucaucaagcaguauggcgauugucugggcgacauugccgccagggaucugauuugcgcccagaaguuuaacggacugacagugcugccuccucugcugaccgaugagaugaucgcccaguacacaucugcccugcuggccggcacaaucacaagcggcuggacauuuggagcuggcgccgcucugcagauccccuuugcuaugcagauggccuaccgguucaacggcaucggagugacccagaaugugcuguacgagaaccagaagcugaucgccaaccaguucaacagcgccaucggcaagauccaggacagccugagcagcacagcaagcgcccugggaaagcugcaggacguggucaaccagaaugcccaggcacugaacacccuggucaagcagcuguccuccaacuucggcgccaucagcucugugcugaacgauauccuggccagacuggacccuccugaggccgaggugcagaucgacagacugaucacaggcagacugcagagccuccagacauacgugacccagcagcugaucagagccgccgagauuagagccucugccaaucuggccgccaccaagaugucugagugugugcugggccagagcaagagaguggacuuuugcggcaagggcuaccaccugaugagcuucccucagucugccccucacggcgugguguuucugcacgugacauaugugcccgcucaagagaagaauuucaccaccgcuccagccaucugccacgacggcaaagcccacuuuccuagagaaggcguguucguguccaacggcacccauugguucgugacacagcggaacuucuacgagccccagaucaucaccacccacaacaccuucgugucuggcaacugcgacguugugaucggcauugugaacaauaccguguacgacccucugcagcccgagcuggacagcuucaaagaggaacuggacaaguacuuuaagaaccacacaagccccgacguggaccugggcgauaucagcggaaucaaugccagcgucgugaacauccagaaagagaucgaccggcugaacgagguggccaagaaucugaacgagagccugaucgaccugcaagaacuggggaaguacgagcaguacaucaaguggcccugguacaucuggcugggcuuuaucgccggacugauugccaucgugauggucacaaucaugcuguguugcaugaccagcugcuguagcugccugaagggcuguuguagcuguggcagcugcugcaaguucgacgaggacgauucugagcccgugcugaagggcgugaaacugcacuacaccugaggacuaguguccaccugucccuccugggcugcuggauugucucguuuuccugccaaauaaacaggaucagcgcuuuacagaucuaaaaaaaaaaaaaaaaaaaaaaaaaaaaaaaaaaaaaaaaaaaaaaaaaaaaaaaaaaaaaaaaaaaaaaaaaaaaaaaaaaaaaaaaaaaaaaaaaaaa

SEQ ID NO: 25362 - RNA, 4105 nt, Artificial Sequence
  SARS-CoV-2/Wuhan/WIV05/2019__EPI_ISL_402128 spike protein mRNA gc mod (1-1273)(K986P_V987P_K986P_V987P_K417N_E484K_N501Y_D614G)
aggagacccgugacccggaaguuguacggcuacgcgacuuucccucccacaaacccucgcgcccuuccuuuccuacuugggcccggcagaaagcuuaccauguucguguuucuggugcugcugccccugguguccagccagugugugaaccugaccaccagaacacagcugccuccagccuacaccaacagcuucaccagaggcguguacuaccccgacaagguguucagauccagcgugcugcacucuacccaggaccuguuccugccuuucuucagcaacgugaccugguuccacgccauccacguguccggcaccaauggcaccaagagauucgacaaccccgugcugcccuucaacgacgggguguacuuugccagcaccgagaaguccaacaucaucagaggcuggaucuucggcaccacacuggacagcaagacccagagccugcugaucgugaacaacgccaccaacguggucaucaaagugugcgaguuccaguucugcaacgaccccuuccugggcgucuacuaccacaagaacaacaagagcuggauggaaagcgaguuccggguguacagcagcgccaacaacugcaccuucgaguacgugucccagccuuuccugauggaccuggaaggcaagcagggcaacuucaagaaccugcgcgaguucguguucaagaacaucgacggcuacuucaaaaucuacagcaagcacaccccuaucaaccucgugcgggaucugccucagggcuucucugcucuggaaccccugguggaucugcccaucggcaucaacaucacccgguuucagacacugcuggcccugcacagaagcuaccugacaccuggcgauagcagcagcggauggacagcuggugccgccgcuuacuaugugggcuaccugcagccuagaaccuuccugcugaaguacaacgagaacggcaccaucaccgacgccguggauugugcucuggauccucugagcgagacaaagugcacccugaaguccuucaccguggaaaagggcaucuaccagaccagcaacuuccgggugcagcccaccgaauccaucgugcgguuccccaauaucaccaaucugugccccuucggcgagguguucaaugccaccagauucgccucuguguacgccuggaaccggaagcggaucagcaauugcguggccgacuacuccgugcuguacaacuccgccagcuucagcaccuucaagugcuacggcguguccccuaccaagcugaacgaccugugcuucacaaacguguacgccgacagcuucgugauccggggagaugaagugcggcagauugccccuggacagacaggcaacaucgccgacuacaacuacaagcugcccgacgacuucaccggcugugugauugccuggaacagcaacaaccuggacuccaaagucggcggcaacuacaauuaccuguaccggcuguuccggaaguccaaucugaagcccuucgagcgggacaucagcaccgaaaucuaucaggccggcagcaccccuugcaacggcgugaagggcuucaacugcuacuucccacugcaguccuacggcuuucagcccacauacggcgugggcuaucagcccuacagagugguggugcugagcuucgaacugcugcaugcuccugccacagugugcggcccuaagaaaagcaccaaucucgugaagaacaaaugcgugaacuucaacuucaacggccugaccggcaccggcgugcugacagagagcaacaagaaguuccugccauuccagcaguuuggccgggauaucgccgauaccacagacgccguuagagauccccagacacuggaaauccuggacaucaccccaugcagcuucggcggagugucugugaucaccccuggcaccaacaccagcaaucagguggcagugcuguaccagggcgugaacuguaccgaagugcccguggccauucacgccgaucagcugacaccuacauggcggguguacuccaccggcagcaauguguuucagaccagagccggcugucugaucggagccgagcacgugaacaauagcuacgagugcgacauccccaucggcgcuggcaucugugccagcuaccagacacagacaaacagccccagacgggcuagaagcguggccagccagagcaucauugccuacacaaugucucugggcgccgagaacagcguggccuacuccaacaacucuaucgcuauccccaccaacuucaccaucagcgugaccaccgagauccugccuguguccaugaccaagaccagcguggacugcaccauguacaucugcggcgauuccaccgagugcuccaaccugcugcugcaguacggcagcuucugcacccagcugaauagagcccugacagggaucgccguggaacaggacaagaacacccaagagguguucgcccaagugaagcaaaucuacaagaccccuccuaucaaggacuucggcggcuucaauuucagccagauucugcccgauccuagcaagcccagcaagcggagcuucaucgaggaccugcuguucaacaaagugacacuggccgacgccggcuucaucaagcaguauggcgauugucugggcgacauugccgccagggaucugauuugcgcccagaaguuuaacggacugacagugcugccuccucugcugaccgaugagaugaucgcccaguacacaucugcccugcuggccggcacaaucacaagcggcuggacauuuggagcuggcgccgcucugcagauccccuuugcuaugcagauggccuaccgguucaacggcaucggagugacccagaaugugcuguacgagaaccagaagcugaucgccaaccaguucaacagcgccaucggcaagauccaggacagccugagcagcacagcaagcgcccugggaaagcugcaggacguggucaaccagaaugcccaggcacugaacacccuggucaagcagcuguccuccaacuucggcgccaucagcucugugcugaacgauauccugagcagacuggacccuccugaggccgaggugcagaucgacagacugaucacaggcagacugcagagccuccagacauacgugacccagcagcugaucagagccgccgagauuagagccucugccaaucuggccgccaccaagaugucugagugugugcugggccagagcaagagaguggacuuuugcggcaagggcuaccaccugaugagcuucccucagucugccccucacggcgugguguuucugcacgugacauaugugcccgcucaagagaagaauuucaccaccgcuccagccaucugccacgacggcaaagcccacuuuccuagagaaggcguguucguguccaacggcacccauugguucgugacacagcggaacuucuacgagccccagaucaucaccaccgacaacaccuucgugucuggcaacugcgacguugugaucggcauugugaacaauaccguguacgacccucugcagcccgagcuggacagcuucaaagaggaacuggacaaguacuuuaagaaccacacaagccccgacguggaccugggcgauaucagcggaaucaaugccagcgucgugaacauccagaaagagaucgaccggcugaacgagguggccaagaaucugaacgagagccugaucgaccugcaagaacuggggaaguacgagcaguacaucaaguggcccugguacaucuggcugggcuuuaucgccggacugauugccaucgugauggucacaaucaugcuguguugcaugaccagcugcuguagcugccugaagggcuguuguagcuguggcagcugcugcaaguucgacgaggacgauucugagcccgugcugaagggcgugaaacugcacuacaccugaggacuaguguccaccugucccuccugggcugcuggauugucucguuuuccugccaaauaaacaggaucagcgcuuuacagaucuaaaaaaaaaaaaaaaaaaaaaaaaaaaaaaaaaaaaaaaaaaaaaaaaaaaaaaaaaaaaaaaaaaaaaaaaaaaaaaaaaaaaaaaaaaaaaaaaaaaa

SEQ ID NO: 25363 - RNA, 4096 nt, Artificial Sequence
  SARS-CoV-2/Wuhan/WIV05/2019__EPI_ISL_402128 spike protein mRNA gc mod (1-1273)(K986P_V987P_K986P_V987P_L18F_D80A_D215G_L242del_A243del_ L244del_R246I_K417N_E484K_N501Y_D614G_A701V)
aggagacccgugacccggaaguuguacggcuacgcgacuuucccucccacaaacccucgcgcccuuccuuuccuacuugggcccggcagaaagcuuaccauguucguguuucuggugcugcugccccugguguccagccagugugugaacuucaccaccagaacacagcugccuccagccuacaccaacagcuucaccagaggcguguacuaccccgacaagguguucagauccagcgugcugcacucuacccaggaccuguuccugccuuucuucagcaacgugaccugguuccacgccauccacguguccggcaccaauggcaccaagagauucgccaaccccgugcugcccuucaacgacgggguguacuuugccagcaccgagaaguccaacaucaucagaggcuggaucuucggcaccacacuggacagcaagacccagagccugcugaucgugaacaacgccaccaacguggucaucaaagugugcgaguuccaguucugcaacgaccccuuccugggcgucuacuaccacaagaacaacaagagcuggauggaaagcgaguuccggguguacagcagcgccaacaacugcaccuucgaguacgugucccagccuuuccugauggaccuggaaggcaagcagggcaacuucaagaaccugcgcgaguucguguucaagaacaucgacggcuacuucaaaaucuacagcaagcacaccccuaucaaccucgugcggggccugccucagggcuucucugcucuggaaccccugguggaucugcccaucggcaucaacaucacccgguuucagacacugcacaucagcuaccugacaccuggcgauagcagcagcggauggacagcuggugccgccgcuuacuaugugggcuaccugcagccuagaaccuuccugcugaaguacaacgagaacggcaccaucaccgacgccguggauugugcucuggauccucugagcgagacaaagugcacccugaaguccuucaccguggaaaagggcaucuaccagaccagcaacuuccgggugcagcccaccgaauccaucgugcgguuccccaauaucaccaaucugugccccuucggcgagguguucaaugccaccagauucgccucuguguacgccuggaaccggaagcggaucagcaauugcguggccgacuacuccgugcuguacaacuccgccagcuucagcaccuucaagugcuacggcguguccccuaccaagcugaacgaccugugcuucacaaacguguacgccgacagcuucgugauccggggagaugaagugcggcagauugccccuggacagacaggcaacaucgccgacuacaacuacaagcugcccgacgacuucaccggcugugugauugccuggaacagcaacaaccuggacuccaaagucggcggcaacuacaauuaccuguaccggcuguuccggaaguccaaucugaagcccuucgagcgggacaucagcaccgaaaucuaucaggccggcagcaccccuugcaacggcgugaagggcuucaacugcuacuucccacugcaguccuacggcuuucagcccacauacggcgugggcuaucagcccuacagagugguggugcugagcuucgaacugcugcaugcuccugccacagugugcggcccuaagaaaagcaccaaucucgugaagaacaaaugcgugaacuucaacuucaacggccugaccggcaccggcgugcugacagagagcaacaagaaguuccugccauuccagcaguuuggccgggauaucgccgauaccacagacgccguuagagauccccagacacuggaaauccuggacaucaccccaugcagcuucggcggagugucugugaucaccccuggcaccaacaccagcaaucagguggcagugcuguaccagggcgugaacuguaccgaagugcccguggccauucacgccgaucagcugacaccuacauggcggguguacuccaccggcagcaauguguuucagaccagagccggcugucugaucggagccgagcacgugaacaauagcuacgagugcgacauccccaucggcgcuggcaucugugccagcuaccagacacagacaaacagccccagacgggcuagaagcguggccagccagagcaucauugccuacacaaugucucugggcguggagaacagcguggccuacuccaacaacucuaucgcuauccccaccaacuucaccaucagcgugaccaccgagauccugccuguguccaugaccaagaccagcguggacugcaccauguacaucugcggcgauuccaccgagugcuccaaccugcugcugcaguacggcagcuucugcacccagcugaauagagcccugacagggaucgccguggaacaggacaagaacacccaagagguguucgcccaagugaagcaaaucuacaagaccccuccuaucaaggacuucggcggcuucaauuucagccagauucugcccgauccuagcaagcccagcaagcggagcuucaucgaggaccugcuguucaacaaagugacacuggccgacgccggcuucaucaagcaguauggcgauugucugggcgacauugccgccagggaucugauuugcgcccagaaguuuaacggacugacagugcugccuccucugcugaccgaugagaugaucgcccaguacacaucugcccugcuggccggcacaaucacaagcggcuggacauuuggagcuggcgccgcucugcagauccccuuugcuaugcagauggccuaccgguucaacggcaucggagugacccagaaugugcuguacgagaaccagaagcugaucgccaaccaguucaacagcgccaucggcaagauccaggacagccugagcagcacagcaagcgcccugggaaagcugcaggacguggucaaccagaaugcccaggcacugaacacccuggucaagcagcuguccuccaacuucggcgccaucagcucugugcugaacgauauccugagcagacuggacccuccugaggccgaggugcagaucgacagacugaucacaggcagacugcagagccuccagacauacgugacccagcagcugaucagagccgccgagauuagagccucugccaaucuggccgccaccaagaugucugagugugugcugggccagagcaagagaguggacuuuugcggcaagggcuaccaccugaugagcuucccucagucugccccucacggcgugguguuucugcacgugacauaugugcccgcucaagagaagaauuucaccaccgcuccagccaucugccacgacggcaaagcccacuuuccuagagaaggcguguucguguccaacggcacccauugguucgugacacagcggaacuucuacgagccccagaucaucaccaccgacaacaccuucgugucuggcaacugcgacguugugaucggcauugugaacaauaccguguacgacccucugcagcccgagcuggacagcuucaaagaggaacuggacaaguacuuuaagaaccacacaagccccgacguggaccugggcgauaucagcggaaucaaugccagcgucgugaacauccagaaagagaucgaccggcugaacgagguggccaagaaucugaacgagagccugaucgaccugcaagaacuggggaaguacgagcaguacaucaaguggcccugguacaucuggcugggcuuuaucgccggacugauugccaucgugauggucacaaucaugcuguguugcaugaccagcugcuguagcugccugaagggcuguuguagcuguggcagcugcugcaaguucgacgaggacgauucugagcccgugcugaagggcgugaaacugcacuacaccugaggacuaguguccaccugucccuccugggcugcuggauugucucguuuuccugccaaauaaacaggaucagcgcuuuacagaucuaaaaaaaaaaaaaaaaaaaaaaaaaaaaaaaaaaaaaaaaaaaaaaaaaaaaaaaaaaaaaaaaaaaaaaaaaaaaaaaaaaaaaaaaaaaaaaaaaaaa

SEQ ID NO: 25364 - RNA, 4105 nt, Artificial Sequence
  SARS-CoV-2/Wuhan/WIV05/2019__EPI_ISL_402128 spike protein mRNA gc mod (1-1273)(K986P_V987P_K986P_V987P_E484K_D614G)
aggagacccgugacccggaaguuguacggcuacgcgacuuucccucccacaaacccucgcgcccuuccuuuccuacuugggcccggcagaaagcuuaccauguucguguuucuggugcugcugccccugguguccagccagugugugaaccugaccaccagaacacagcugccuccagccuacaccaacagcuucaccagaggcguguacuaccccgacaagguguucagauccagcgugcugcacucuacccaggaccuguuccugccuuucuucagcaacgugaccugguuccacgccauccacguguccggcaccaauggcaccaagagauucgacaaccccgugcugcccuucaacgacgggguguacuuugccagcaccgagaaguccaacaucaucagaggcuggaucuucggcaccacacuggacagcaagacccagagccugcugaucgugaacaacgccaccaacguggucaucaaagugugcgaguuccaguucugcaacgaccccuuccugggcgucuacuaccacaagaacaacaagagcuggauggaaagcgaguuccggguguacagcagcgccaacaacugcaccuucgaguacgugucccagccuuuccugauggaccuggaaggcaagcagggcaacuucaagaaccugcgcgaguucguguucaagaacaucgacggcuacuucaaaaucuacagcaagcacaccccuaucaaccucgugcgggaucugccucagggcuucucugcucuggaaccccugguggaucugcccaucggcaucaacaucacccgguuucagacacugcuggcccugcacagaagcuaccugacaccuggcgauagcagcagcggauggacagcuggugccgccgcuuacuaugugggcuaccugcagccuagaaccuuccugcugaaguacaacgagaacggcaccaucaccgacgccguggauugugcucuggauccucugagcgagacaaagugcacccugaaguccuucaccguggaaaagggcaucuaccagaccagcaacuuccgggugcagcccaccgaauccaucgugcgguuccccaauaucaccaaucugugccccuucggcgagguguucaaugccaccagauucgccucuguguacgccuggaaccggaagcggaucagcaauugcguggccgacuacuccgugcuguacaacuccgccagcuucagcaccuucaagugcuacggcguguccccuaccaagcugaacgaccugugcuucacaaacguguacgccgacagcuucgugauccggggagaugaagugcggcagauugccccuggacagacaggcaagaucgccgacuacaacuacaagcugcccgacgacuucaccggcugugugauugccuggaacagcaacaaccuggacuccaaagucggcggcaacuacaauuaccuguaccggcuguuccggaaguccaaucugaagcccuucgagcgggacaucagcaccgaaaucuaucaggccggcagcaccccuugcaacggcgugaagggcuucaacugcuacuucccacugcaguccuacggcuuucagcccacaaauggcgugggcuaucagcccuacagagugguggugcugagcuucgaacugcugcaugcuccugccacagugugcggcccuaagaaaagcaccaaucucgugaagaacaaaugcgugaacuucaacuucaacggccugaccggcaccggcgugcugacagagagcaacaagaaguuccugccauuccagcaguuuggccgggauaucgccgauaccacagacgccguuagagauccccagacacuggaaauccuggacaucaccccaugcagcuucggcggagugucugugaucaccccuggcaccaacaccagcaaucagguggcagugcuguaccagggcgugaacuguaccgaagugcccguggccauucacgccgaucagcugacaccuacauggcggguguacuccaccggcagcaauguguuucagaccagagccggcugucugaucggagccgagcacgugaacaauagcuacgagugcgacauccccaucggcgcuggcaucugugccagcuaccagacacagacaaacagccccagacgggcuagaagcguggccagccagagcaucauugccuacacaaugucucugggcgccgagaacagcguggccuacuccaacaacucuaucgcuauccccaccaacuucaccaucagcgugaccaccgagauccugccuguguccaugaccaagaccagcguggacugcaccauguacaucugcggcgauuccaccgagugcuccaaccugcugcugcaguacggcagcuucugcacccagcugaauagagcccugacagggaucgccguggaacaggacaagaacacccaagagguguucgcccaagugaagcaaaucuacaagaccccuccuaucaaggacuucggcggcuucaauuucagccagauucugcccgauccuagcaagcccagcaagcggagcuucaucgaggaccugcuguucaacaaagugacacuggccgacgccggcuucaucaagcaguauggcgauugucugggcgacauugccgccagggaucugauuugcgcccagaaguuuaacggacugacagugcugccuccucugcugaccgaugagaugaucgcccaguacacaucugcccugcuggccggcacaaucacaagcggcuggacauuuggagcuggcgccgcucugcagauccccuuugcuaugcagauggccuaccgguucaacggcaucggagugacccagaaugugcuguacgagaaccagaagcugaucgccaaccaguucaacagcgccaucggcaagauccaggacagccugagcagcacagcaagcgcccugggaaagcugcaggacguggucaaccagaaugcccaggcacugaacacccuggucaagcagcuguccuccaacuucggcgccaucagcucugugcugaacgauauccugagcagacuggacccuccugaggccgaggugcagaucgacagacugaucacaggcagacugcagagccuccagacauacgugacccagcagcugaucagagccgccgagauuagagccucugccaaucuggccgccaccaagaugucugagugugugcugggccagagcaagagaguggacuuuugcggcaagggcuaccaccugaugagcuucccucagucugccccucacggcgugguguuucugcacgugacauaugugcccgcucaagagaagaauuucaccaccgcuccagccaucugccacgacggcaaagcccacuuuccuagagaaggcguguucguguccaacggcacccauugguucgugacacagcggaacuucuacgagccccagaucaucaccaccgacaacaccuucgugucuggcaacugcgacguugugaucggcauugugaacaauaccguguacgacccucugcagcccgagcuggacagcuucaaagaggaacuggacaaguacuuuaagaaccacacaagccccgacguggaccugggcgauaucagcggaaucaaugccagcgucgugaacauccagaaagagaucgaccggcugaacgagguggccaagaaucugaacgagagccugaucgaccugcaagaacuggggaaguacgagcaguacaucaaguggcccugguacaucuggcugggcuuuaucgccggacugauugccaucgugauggucacaaucaugcuguguugcaugaccagcugcuguagcugccugaagggcuguuguagcuguggcagcugcugcaaguucgacgaggacgauucugagcccgugcugaagggcgugaaacugcacuacaccugaggacuaguguccaccugucccuccugggcugcuggauugucucguuuuccugccaaauaaacaggaucagcgcuuuacagaucuaaaaaaaaaaaaaaaaaaaaaaaaaaaaaaaaaaaaaaaaaaaaaaaaaaaaaaaaaaaaaaaaaaaaaaaaaaaaaaaaaaaaaaaaaaaaaaaaaaaa

SEQ ID NO: 25365 - RNA, 4105 nt, Artificial Sequence
  SARS-CoV-2/Wuhan/WIV05/2019__EPI_ISL_402128 spike protein mRNA gc mod (1-1273)(K986P_V987P_K986P_V987P_L18F_T20N_P26S_D138Y_R190S_K417T _E484K_N501Y_D614G_H655Y_T1027I)
aggagacccgugacccggaaguuguacggcuacgcgacuuucccucccacaaacccucgcgcccuuccuuuccuacuugggcccggcagaaagcuuaccauguucguguuucuggugcugcugccccugguguccagccagugugugaacuucaccaacagaacacagcugccuagcgccuacaccaacagcuucaccagaggcguguacuaccccgacaagguguucagauccagcgugcugcacucuacccaggaccuguuccugccuuucuucagcaacgugaccugguuccacgccauccacguguccggcaccaauggcaccaagagauucgacaaccccgugcugcccuucaacgacgggguguacuuugccagcaccgagaaguccaacaucaucagaggcuggaucuucggcaccacacuggacagcaagacccagagccugcugaucgugaacaacgccaccaacguggucaucaaagugugcgaguuccaguucugcaacuaccccuuccugggcgucuacuaccacaagaacaacaagagcuggauggaaagcgaguuccggguguacagcagcgccaacaacugcaccuucgaguacgugucccagccuuuccugauggaccuggaaggcaagcagggcaacuucaagaaccugagcgaguucguguucaagaacaucgacggcuacuucaaaaucuacagcaagcacaccccuaucaaccucgugcgggaucugccucagggcuucucugcucuggaaccccugguggaucugcccaucggcaucaacaucacccgguuucagacacugcuggcccugcacagaagcuaccugacaccuggcgauagcagcagcggauggacagcuggugccgccgcuuacuaugugggcuaccugcagccuagaaccuuccugcugaaguacaacgagaacggcaccaucaccgacgccguggauugugcucuggauccucugagcgagacaaagugcacccugaaguccuucaccguggaaaagggcaucuaccagaccagcaacuuccgggugcagcccaccgaauccaucgugcgguuccccaauaucaccaaucugugccccuucggcgagguguucaaugccaccagauucgccucuguguacgccuggaaccggaagcggaucagcaauugcguggccgacuacuccgugcuguacaacuccgccagcuucagcaccuucaagugcuacggcguguccccuaccaagcugaacgaccugugcuucacaaacguguacgccgacagcuucgugauccggggagaugaagugcggcagauugccccuggacagacaggcaccaucgccgacuacaacuacaagcugcccgacgacuucaccggcugugugauugccuggaacagcaacaaccuggacuccaaagucggcggcaacuacaauuaccuguaccggcuguuccggaaguccaaucugaagcccuucgagcgggacaucagcaccgaaaucuaucaggccggcagcaccccuugcaacggcgugaagggcuucaacugcuacuucccacugcaguccuacggcuuucagcccacauacggcgugggcuaucagcccuacagagugguggugcugagcuucgaacugcugcaugcuccugccacagugugcggcccuaagaaaagcaccaaucucgugaagaacaaaugcgugaacuucaacuucaacggccugaccggcaccggcgugcugacagagagcaacaagaaguuccugccauuccagcaguuuggccgggauaucgccgauaccacagacgccguuagagauccccagacacuggaaauccuggacaucaccccaugcagcuucggcggagugucugugaucaccccuggcaccaacaccagcaaucagguggcagugcuguaccagggcgugaacuguaccgaagugcccguggccauucacgccgaucagcugacaccuacauggcggguguacuccaccggcagcaauguguuucagaccagagccggcugucugaucggagccgaguacgugaacaauagcuacgagugcgacauccccaucggcgcuggcaucugugccagcuaccagacacagacaaacagccccagacgggcuagaagcguggccagccagagcaucauugccuacacaaugucucugggcgccgagaacagcguggccuacuccaacaacucuaucgcuauccccaccaacuucaccaucagcgugaccaccgagauccugccuguguccaugaccaagaccagcguggacugcaccauguacaucugcggcgauuccaccgagugcuccaaccugcugcugcaguacggcagcuucugcacccagcugaauagagcccugacagggaucgccguggaacaggacaagaacacccaagagguguucgcccaagugaagcaaaucuacaagaccccuccuaucaaggacuucggcggcuucaauuucagccagauucugcccgauccuagcaagcccagcaagcggagcuucaucgaggaccugcuguucaacaaagugacacuggccgacgccggcuucaucaagcaguauggcgauugucugggcgacauugccgccagggaucugauuugcgcccagaaguuuaacggacugacagugcugccuccucugcugaccgaugagaugaucgcccaguacacaucugcccugcuggccggcacaaucacaagcggcuggacauuuggagcuggcgccgcucugcagauccccuuugcuaugcagauggccuaccgguucaacggcaucggagugacccagaaugugcuguacgagaaccagaagcugaucgccaaccaguucaacagcgccaucggcaagauccaggacagccugagcagcacagcaagcgcccugggaaagcugcaggacguggucaaccagaaugcccaggcacugaacacccuggucaagcagcuguccuccaacuucggcgccaucagcucugugcugaacgauauccugagcagacuggacccuccugaggccgaggugcagaucgacagacugaucacaggcagacugcagagccuccagacauacgugacccagcagcugaucagagccgccgagauuagagccucugccaaucuggccgccaucaagaugucugagugugugcugggccagagcaagagaguggacuuuugcggcaagggcuaccaccugaugagcuucccucagucugccccucacggcgugguguuucugcacgugacauaugugcccgcucaagagaagaauuucaccaccgcuccagccaucugccacgacggcaaagcccacuuuccuagagaaggcguguucguguccaacggcacccauugguucgugacacagcggaacuucuacgagccccagaucaucaccaccgacaacaccuucgugucuggcaacugcgacguugugaucggcauugugaacaauaccguguacgacccucugcagcccgagcuggacagcuucaaagaggaacuggacaaguacuuuaagaaccacacaagccccgacguggaccugggcgauaucagcggaaucaaugccagcgucgugaacauccagaaagagaucgaccggcugaacgagguggccaagaaucugaacgagagccugaucgaccugcaagaacuggggaaguacgagcaguacaucaaguggcccugguacaucuggcugggcuuuaucgccggacugauugccaucgugauggucacaaucaugcuguguugcaugaccagcugcuguagcugccugaagggcuguuguagcuguggcagcugcugcaaguucgacgaggacgauucugagcccgugcugaagggcgugaaacugcacuacaccugaggacuaguguccaccugucccuccugggcugcuggauugucucguuuuccugccaaauaaacaggaucagcgcuuuacagaucuaaaaaaaaaaaaaaaaaaaaaaaaaaaaaaaaaaaaaaaaaaaaaaaaaaaaaaaaaaaaaaaaaaaaaaaaaaaaaaaaaaaaaaaaaaaaaaaaaaaa

SEQ ID NO: 25366 - RNA, 4105 nt, Artificial Sequence
  SARS-CoV-2/Wuhan/WIV05/2019__EPI_ISL_402128 spike protein mRNA gc mod (1-1273)(K986P_V987P_K986P_V987P_S13I_W152C_L452R_D614G)
aggagacccgugacccggaaguuguacggcuacgcgacuuucccucccacaaacccucgcgcccuuccuuuccuacuugggcccggcagaaagcuuaccauguucguguuucuggugcugcugccccugguguccauccagugugugaaccugaccaccagaacacagcugccuccagccuacaccaacagcuucaccagaggcguguacuaccccgacaagguguucagauccagcgugcugcacucuacccaggaccuguuccugccuuucuucagcaacgugaccugguuccacgccauccacguguccggcaccaauggcaccaagagauucgacaaccccgugcugcccuucaacgacgggguguacuuugccagcaccgagaaguccaacaucaucagaggcuggaucuucggcaccacacuggacagcaagacccagagccugcugaucgugaacaacgccaccaacguggucaucaaagugugcgaguuccaguucugcaacgaccccuuccugggcgucuacuaccacaagaacaacaagagcugcauggaaagcgaguuccggguguacagcagcgccaacaacugcaccuucgaguacgugucccagccuuuccugauggaccuggaaggcaagcagggcaacuucaagaaccugcgcgaguucguguucaagaacaucgacggcuacuucaaaaucuacagcaagcacaccccuaucaaccucgugcgggaucugccucagggcuucucugcucuggaaccccugguggaucugcccaucggcaucaacaucacccgguuucagacacugcuggcccugcacagaagcuaccugacaccuggcgauagcagcagcggauggacagcuggugccgccgcuuacuaugugggcuaccugcagccuagaaccuuccugcugaaguacaacgagaacggcaccaucaccgacgccguggauugugcucuggauccucugagcgagacaaagugcacccugaaguccuucaccguggaaaagggcaucuaccagaccagcaacuuccgggugcagcccaccgaauccaucgugcgguuccccaauaucaccaaucugugccccuucggcgagguguucaaugccaccagauucgccucuguguacgccuggaaccggaagcggaucagcaauugcguggccgacuacuccgugcuguacaacuccgccagcuucagcaccuucaagugcuacggcguguccccuaccaagcugaacgaccugugcuucacaaacguguacgccgacagcuucgugauccggggagaugaagugcggcagauugccccuggacagacaggcaagaucgccgacuacaacuacaagcugcccgacgacuucaccggcugugugauugccuggaacagcaacaaccuggacuccaaagucggcggcaacuacaauuaccgcuaccggcuguuccggaaguccaaucugaagcccuucgagcgggacaucagcaccgaaaucuaucaggccggcagcaccccuugcaacggcguggaaggcuucaacugcuacuucccacugcaguccuacggcuuucagcccacaaauggcgugggcuaucagcccuacagagugguggugcugagcuucgaacugcugcaugcuccugccacagugugcggcccuaagaaaagcaccaaucucgugaagaacaaaugcgugaacuucaacuucaacggccugaccggcaccggcgugcugacagagagcaacaagaaguuccugccauuccagcaguuuggccgggauaucgccgauaccacagacgccguuagagauccccagacacuggaaauccuggacaucaccccaugcagcuucggcggagugucugugaucaccccuggcaccaacaccagcaaucagguggcagugcuguaccagggcgugaacuguaccgaagugcccguggccauucacgccgaucagcugacaccuacauggcggguguacuccaccggcagcaauguguuucagaccagagccggcugucugaucggagccgagcacgugaacaauagcuacgagugcgacauccccaucggcgcuggcaucugugccagcuaccagacacagacaaacagccccagacgggcuagaagcguggccagccagagcaucauugccuacacaaugucucugggcgccgagaacagcguggccuacuccaacaacucuaucgcuauccccaccaacuucaccaucagcgugaccaccgagauccugccuguguccaugaccaagaccagcguggacugcaccauguacaucugcggcgauuccaccgagugcuccaaccugcugcugcaguacggcagcuucugcacccagcugaauagagcccugacagggaucgccguggaacaggacaagaacacccaagagguguucgcccaagugaagcaaaucuacaagaccccuccuaucaaggacuucggcggcuucaauuucagccagauucugcccgauccuagcaagcccagcaagcggagcuucaucgaggaccugcuguucaacaaagugacacuggccgacgccggcuucaucaagcaguauggcgauugucugggcgacauugccgccagggaucugauuugcgcccagaaguuuaacggacugacagugcugccuccucugcugaccgaugagaugaucgcccaguacacaucugcccugcuggccggcacaaucacaagcggcuggacauuuggagcuggcgccgcucugcagauccccuuugcuaugcagauggccuaccgguucaacggcaucggagugacccagaaugugcuguacgagaaccagaagcugaucgccaaccaguucaacagcgccaucggcaagauccaggacagccugagcagcacagcaagcgcccugggaaagcugcaggacguggucaaccagaaugcccaggcacugaacacccuggucaagcagcuguccuccaacuucggcgccaucagcucugugcugaacgauauccugagcagacuggacccuccugaggccgaggugcagaucgacagacugaucacaggcagacugcagagccuccagacauacgugacccagcagcugaucagagccgccgagauuagagccucugccaaucuggccgccaccaagaugucugagugugugcugggccagagcaagagaguggacuuuugcggcaagggcuaccaccugaugagcuucccucagucugccccucacggcgugguguuucugcacgugacauaugugcccgcucaagagaagaauuucaccaccgcuccagccaucugccacgacggcaaagcccacuuuccuagagaaggcguguucguguccaacggcacccauugguucgugacacagcggaacuucuacgagccccagaucaucaccaccgacaacaccuucgugucuggcaacugcgacguugugaucggcauugugaacaauaccguguacgacccucugcagcccgagcuggacagcuucaaagaggaacuggacaaguacuuuaagaaccacacaagccccgacguggaccugggcgauaucagcggaaucaaugccagcgucgugaacauccagaaagagaucgaccggcugaacgagguggccaagaaucugaacgagagccugaucgaccugcaagaacuggggaaguacgagcaguacaucaaguggcccugguacaucuggcugggcuuuaucgccggacugauugccaucgugauggucacaaucaugcuguguugcaugaccagcugcuguagcugccugaagggcuguuguagcuguggcagcugcugcaaguucgacgaggacgauucugagcccgugcugaagggcgugaaacugcacuacaccugaggacuaguguccaccugucccuccugggcugcuggauugucucguuuuccugccaaauaaacaggaucagcgcuuuacagaucuaaaaaaaaaaaaaaaaaaaaaaaaaaaaaaaaaaaaaaaaaaaaaaaaaaaaaaaaaaaaaaaaaaaaaaaaaaaaaaaaaaaaaaaaaaaaaaaaaaaa

SEQ ID NO: 25367 - RNA, 4105 nt, Artificial Sequence
  SARS-CoV-2/Wuhan/WIV05/2019__EPI_ISL_402128 spike protein mRNA gc mod (1-1273)(K986P_V987P)
aggagacccgugacccggaaguuguacggcuacgcgacuuucccucccacaaacccucgcgcccuuccuuuccuacuugggcccggcagaaagcuuaccauguucguguuccuggugcugcugccucugguguccagccagugugugaaccugaccaccagaacacagcugccuccagccuacaccaacagcuuuaccagaggcguguacuaccccgacaagguguucagauccagcgugcugcacucuacccaggaccuguuccugccuuucuucagcaacgugaccugguuccacgccauccacguguccggcaccaauggcaccaagagauucgacaaccccgugcugcccuucaacgacgggguguacuuugccagcaccgagaaguccaacaucaucagaggcuggaucuucggcaccacacuggacagcaagacccagagccugcugaucgugaacaacgccaccaacguggucaucaaagugugcgaguuccaguucugcaacgaccccuuccugggcgucuacuaccacaagaacaacaagagcuggauggaaagcgaguuccggguguacagcagcgccaacaacugcaccuucgaguacgugucccagccuuuccugauggaccuggaaggcaagcagggcaacuucaagaaccugcgcgaguucguguuuaagaacaucgacggcuacuucaagaucuacagcaagcacaccccuaucaaccucgugcgggaucugccucagggcuucucugcucuggaaccccugguggaucugcccaucggcaucaacaucacccgguuucagacacugcuggcccugcacagaagcuaccugacaccuggcgauagcagcagcggauggacagcuggugccgccgcuuacuaugugggcuaccugcagccuagaaccuuccugcugaaguacaacgagaacggcaccaucaccgacgccguggauugugcucuggauccucugagcgagacaaagugcacccugaaguccuucaccguggaaaagggcaucuaccagaccagcaacuuccgggugcagcccaccgaauccaucgugcgguuccccaauaucaccaaucugugccccuucggcgagguguucaaugccaccagauucgccucuguguacgccuggaaccggaagcggaucagcaauugcguggccgacuacuccgugcuguacaacuccgccagcuucagcaccuucaagugcuacggcguguccccuaccaagcugaacgaccugugcuucacaaacguguacgccgacagcuucgugauccggggagaugaagugcggcagauugccccuggacagacaggcaagaucgccgacuacaacuacaagcugcccgacgacuucaccggcugugugauugccuggaacagcaacaaccuggacuccaaagucggcggcaacuacaauuaccuguaccggcuguuccggaaguccaaucugaagcccuucgagcgggacaucuccaccgagaucuaucaggccggcagcaccccuuguaacggcguggaaggcuucaacugcuacuucccacugcaguccuacggcuuucagcccacaaauggcgugggcuaucagcccuacagagugguggugcugagcuucgaacugcugcaugccccugccacagugugcggcccuaagaaaagcaccaaucucgugaagaacaaaugcgugaacuucaacuucaacggccugaccggcaccggcgugcugacagagagcaacaagaaguuccugccauuccagcaguuuggccgggauaucgccgauaccacagacgccguuagagauccccagacacuggaaauccuggacaucaccccuugcagcuucggcggagugucugugaucaccccuggcaccaacaccagcaaucagguggcagugcuguaccaggacgugaacuguaccgaagugcccguggccauucacgccgaucagcugacaccuacauggcggguguacuccaccggcagcaauguguuucagaccagagccggcugucugaucggagccgagcacgugaacaauagcuacgagugcgacauccccaucggcgcuggaaucugcgccagcuaccagacacagacaaacagcccucggagagccagaagcguggccagccagagcaucauugccuacacaaugucucugggcgccgagaacagcguggccuacuccaacaacucuaucgcuauccccaccaacuucaccaucagcgugaccacagagauccugccuguguccaugaccaagaccagcguggacugcaccauguacaucugcggcgauuccaccgagugcuccaaccugcugcugcaguacggcagcuucugcacccagcugaauagagcccugacagggaucgccguggaacaggacaagaacacccaagagguguucgcccaagugaagcagaucuacaagaccccuccuaucaaggacuucggcggcuucaauuucagccagauucugcccgauccuagcaagcccagcaagcggagcuucaucgaggaccugcuguucaacaaagugacacuggccgacgccggcuucaucaagcaguauggcgauugucugggcgacauugccgccagggaucugauuugcgcccagaaguuuaacggacugacagugcugccuccucugcugaccgaugagaugaucgcccaguacacaucugcccugcuggccggcacaaucacaagcggcuggacauuuggagcaggcgccgcucugcagauccccuuugcuaugcagauggccuaccgguucaacggcaucggagugacccagaaugugcuguacgagaaccagaagcugaucgccaaccaguucaacagcgccaucggcaagauccaggacagccugagcagcacagcaagcgcccugggaaagcugcaggacguggucaaccagaaugcccaggcacugaacacccuggucaagcagcuguccuccaacuucggcgccaucagcucugugcugaacgauauccugagcagacuggacccuccugaggccgaggugcagaucgacagacugaucacaggcagacugcagagccuccagacauacgugacccagcagcugaucagagccgccgagauuagagccucugccaaucuggccgccaccaagaugucugagugugugcugggccagagcaagagaguggacuuuugcggcaagggcuaccaccugaugagcuucccucagucugccccucacggcgugguguuucugcacgugacauaugugcccgcucaagagaagaauuucaccaccgcuccagccaucugccacgacggcaaagcccacuuuccuagagaaggcguguucguguccaacggcacccauugguucgugacacagcggaacuucuacgagccccagaucaucaccaccgacaacaccuucgugucuggcaacugcgacgucgugaucggcauugugaacaauaccguguacgacccucugcagcccgagcuggacagcuucaaagaggaacuggacaaguacuuuaagaaccacacaagccccgacguggaccugggcgauaucagcggaaucaaugccagcgucgugaacauccagaaagagaucgaccggcugaacgagguggccaagaaucugaacgagagccugaucgaccugcaagaacuggggaaguacgagcaguacaucaaguggcccugguacaucuggcugggcuuuaucgccggacugauugccaucgugauggucacaaucaugcuguguugcaugaccagcugcuguagcugccugaagggcuguuguagcuguggcagcugcugcaaguucgacgaggacgauucugagcccgugcugaagggcgugaaacugcacuacacaugaggacuaguguccaccugucccuccugggcugcuggauugucucguuuuccugccaaauaaacaggaucagcgcuuuacagaucuaaaaaaaaaaaaaaaaaaaaaaaaaaaaaaaaaaaaaaaaaaaaaaaaaaaaaaaaaaaaaaaaaaaaaaaaaaaaaaaaaaaaaaaaaaaaaaaaaaaa

SEQ ID NO: 25368 - RNA, 4105 nt, Artificial Sequence
  SARS-CoV-2/Wuhan/WIV05/2019__EPI_ISL_402128 spike protein mRNA gc mod (1-1273)(K986P_V987P_ D614G)
aggagacccgugacccggaaguuguacggcuacgcgacuuucccucccacaaacccucgcgcccuuccuuuccuacuugggcccggcagaaagcuuaccauguucguguuccuggugcugcugccucugguguccagccagugugugaaccugaccaccagaacacagcugccuccagccuacaccaacagcuuuaccagaggcguguacuaccccgacaagguguucagauccagcgugcugcacucuacccaggaccuguuccugccuuucuucagcaacgugaccugguuccacgccauccacguguccggcaccaauggcaccaagagauucgacaaccccgugcugcccuucaacgacgggguguacuuugccagcaccgagaaguccaacaucaucagaggcuggaucuucggcaccacacuggacagcaagacccagagccugcugaucgugaacaacgccaccaacguggucaucaaagugugcgaguuccaguucugcaacgaccccuuccugggcgucuacuaccacaagaacaacaagagcuggauggaaagcgaguuccggguguacagcagcgccaacaacugcaccuucgaguacgugucccagccuuuccugauggaccuggaaggcaagcagggcaacuucaagaaccugcgcgaguucguguuuaagaacaucgacggcuacuucaagaucuacagcaagcacaccccuaucaaccucgugcgggaucugccucagggcuucucugcucuggaaccccugguggaucugcccaucggcaucaacaucacccgguuucagacacugcuggcccugcacagaagcuaccugacaccuggcgauagcagcagcggauggacagcuggugccgccgcuuacuaugugggcuaccugcagccuagaaccuuccugcugaaguacaacgagaacggcaccaucaccgacgccguggauugugcucuggauccucugagcgagacaaagugcacccugaaguccuucaccguggaaaagggcaucuaccagaccagcaacuuccgggugcagcccaccgaauccaucgugcgguuccccaauaucaccaaucugugccccuucggcgagguguucaaugccaccagauucgccucuguguacgccuggaaccggaagcggaucagcaauugcguggccgacuacuccgugcuguacaacuccgccagcuucagcaccuucaagugcuacggcguguccccuaccaagcugaacgaccugugcuucacaaacguguacgccgacagcuucgugauccggggagaugaagugcggcagauugccccuggacagacaggcaagaucgccgacuacaacuacaagcugcccgacgacuucaccggcugugugauugccuggaacagcaacaaccuggacuccaaagucggcggcaacuacaauuaccuguaccggcuguuccggaaguccaaucugaagcccuucgagcgggacaucuccaccgagaucuaucaggccggcagcaccccuuguaacggcguggaaggcuucaacugcuacuucccacugcaguccuacggcuuucagcccacaaauggcgugggcuaucagcccuacagagugguggugcugagcuucgaacugcugcaugccccugccacagugugcggcccuaagaaaagcaccaaucucgugaagaacaaaugcgugaacuucaacuucaacggccugaccggcaccggcgugcugacagagagcaacaagaaguuccugccauuccagcaguuuggccgggauaucgccgauaccacagacgccguuagagauccccagacacuggaaauccuggacaucaccccuugcagcuucggcggagugucugugaucaccccuggcaccaacaccagcaaucagguggcagugcuguaccagggcgugaacuguaccgaagugcccguggccauucacgccgaucagcugacaccuacauggcggguguacuccaccggcagcaauguguuucagaccagagccggcugucugaucggagccgagcacgugaacaauagcuacgagugcgacauccccaucggcgcuggaaucugcgccagcuaccagacacagacaaacagcccucggagagccagaagcguggccagccagagcaucauugccuacacaaugucucugggcgccgagaacagcguggccuacuccaacaacucuaucgcuauccccaccaacuucaccaucagcgugaccacagagauccugccuguguccaugaccaagaccagcguggacugcaccauguacaucugcggcgauuccaccgagugcuccaaccugcugcugcaguacggcagcuucugcacccagcugaauagagcccugacagggaucgccguggaacaggacaagaacacccaagagguguucgcccaagugaagcagaucuacaagaccccuccuaucaaggacuucggcggcuucaauuucagccagauucugcccgauccuagcaagcccagcaagcggagcuucaucgaggaccugcuguucaacaaagugacacuggccgacgccggcuucaucaagcaguauggcgauugucugggcgacauugccgccagggaucugauuugcgcccagaaguuuaacggacugacagugcugccuccucugcugaccgaugagaugaucgcccaguacacaucugcccugcuggccggcacaaucacaagcggcuggacauuuggagcaggcgccgcucugcagauccccuuugcuaugcagauggccuaccgguucaacggcaucggagugacccagaaugugcuguacgagaaccagaagcugaucgccaaccaguucaacagcgccaucggcaagauccaggacagccugagcagcacagcaagcgcccugggaaagcugcaggacguggucaaccagaaugcccaggcacugaacacccuggucaagcagcuguccuccaacuucggcgccaucagcucugugcugaacgauauccugagcagacuggacccuccugaggccgaggugcagaucgacagacugaucacaggcagacugcagagccuccagacauacgugacccagcagcugaucagagccgccgagauuagagccucugccaaucuggccgccaccaagaugucugagugugugcugggccagagcaagagaguggacuuuugcggcaagggcuaccaccugaugagcuucccucagucugccccucacggcgugguguuucugcacgugacauaugugcccgcucaagagaagaauuucaccaccgcuccagccaucugccacgacggcaaagcccacuuuccuagagaaggcguguucguguccaacggcacccauugguucgugacacagcggaacuucuacgagccccagaucaucaccaccgacaacaccuucgugucuggcaacugcgacgucgugaucggcauugugaacaauaccguguacgacccucugcagcccgagcuggacagcuucaaagaggaacuggacaaguacuuuaagaaccacacaagccccgacguggaccugggcgauaucagcggaaucaaugccagcgucgugaacauccagaaagagaucgaccggcugaacgagguggccaagaaucugaacgagagccugaucgaccugcaagaacuggggaaguacgagcaguacaucaaguggcccugguacaucuggcugggcuuuaucgccggacugauugccaucgugauggucacaaucaugcuguguugcaugaccagcugcuguagcugccugaagggcuguuguagcuguggcagcugcugcaaguucgacgaggacgauucugagcccgugcugaagggcgugaaacugcacuacacaugaggacuaguguccaccugucccuccugggcugcuggauugucucguuuuccugccaaauaaacaggaucagcgcuuuacagaucuaaaaaaaaaaaaaaaaaaaaaaaaaaaaaaaaaaaaaaaaaaaaaaaaaaaaaaaaaaaaaaaaaaaaaaaaaaaaaaaaaaaaaaaaaaaaaaaaaaaa

SEQ ID NO: 25369 - RNA, 4105 nt, Artificial Sequence
  SARS-CoV-2/Wuhan/WIV05/2019__EPI_ISL_402128 spike protein mRNA gc mod (1-1273)(K986P_V987P_A222V_D614G)
aggagacccgugacccggaaguuguacggcuacgcgacuuucccucccacaaacccucgcgcccuuccuuuccuacuugggcccggcagaaagcuuaccauguucguguuccuggugcugcugccucugguguccagccagugugugaaccugaccaccagaacacagcugccuccagccuacaccaacagcuuuaccagaggcguguacuaccccgacaagguguucagauccagcgugcugcacucuacccaggaccuguuccugccuuucuucagcaacgugaccugguuccacgccauccacguguccggcaccaauggcaccaagagauucgacaaccccgugcugcccuucaacgacgggguguacuuugccagcaccgagaaguccaacaucaucagaggcuggaucuucggcaccacacuggacagcaagacccagagccugcugaucgugaacaacgccaccaacguggucaucaaagugugcgaguuccaguucugcaacgaccccuuccugggcgucuacuaccacaagaacaacaagagcuggauggaaagcgaguuccggguguacagcagcgccaacaacugcaccuucgaguacgugucccagccuuuccugauggaccuggaaggcaagcagggcaacuucaagaaccugcgcgaguucguguuuaagaacaucgacggcuacuucaagaucuacagcaagcacaccccuaucaaccucgugcgggaucugccucagggcuucucugugcuggaaccccugguggaucugcccaucggcaucaacaucacccgguuucagacacugcuggcccugcacagaagcuaccugacaccuggcgauagcagcagcggauggacagcuggugccgccgcuuacuaugugggcuaccugcagccuagaaccuuccugcugaaguacaacgagaacggcaccaucaccgacgccguggauugugcucuggauccucugagcgagacaaagugcacccugaaguccuucaccguggaaaagggcaucuaccagaccagcaacuuccgggugcagcccaccgaauccaucgugcgguuccccaauaucaccaaucugugccccuucggcgagguguucaaugccaccagauucgccucuguguacgccuggaaccggaagcggaucagcaauugcguggccgacuacuccgugcuguacaacuccgccagcuucagcaccuucaagugcuacggcguguccccuaccaagcugaacgaccugugcuucacaaacguguacgccgacagcuucgugauccggggagaugaagugcggcagauugccccuggacagacaggcaagaucgccgacuacaacuacaagcugcccgacgacuucaccggcugugugauugccuggaacagcaacaaccuggacuccaaagucggcggcaacuacaauuaccuguaccggcuguuccggaaguccaaucugaagcccuucgagcgggacaucuccaccgagaucuaucaggccggcagcaccccuuguaacggcguggaaggcuucaacugcuacuucccacugcaguccuacggcuuucagcccacaaauggcgugggcuaucagcccuacagagugguggugcugagcuucgaacugcugcaugccccugccacagugugcggcccuaagaaaagcaccaaucucgugaagaacaaaugcgugaacuucaacuucaacggccugaccggcaccggcgugcugacagagagcaacaagaaguuccugccauuccagcaguuuggccgggauaucgccgauaccacagacgccguuagagauccccagacacuggaaauccuggacaucaccccuugcagcuucggcggagugucugugaucaccccuggcaccaacaccagcaaucagguggcagugcuguaccagggcgugaacuguaccgaagugcccguggccauucacgccgaucagcugacaccuacauggcggguguacuccaccggcagcaauguguuucagaccagagccggcugucugaucggagccgagcacgugaacaauagcuacgagugcgacauccccaucggcgcuggaaucugcgccagcuaccagacacagacaaacagcccucggagagccagaagcguggccagccagagcaucauugccuacacaaugucucugggcgccgagaacagcguggccuacuccaacaacucuaucgcuauccccaccaacuucaccaucagcgugaccacagagauccugccuguguccaugaccaagaccagcguggacugcaccauguacaucugcggcgauuccaccgagugcuccaaccugcugcugcaguacggcagcuucugcacccagcugaauagagcccugacagggaucgccguggaacaggacaagaacacccaagagguguucgcccaagugaagcagaucuacaagaccccuccuaucaaggacuucggcggcuucaauuucagccagauucugcccgauccuagcaagcccagcaagcggagcuucaucgaggaccugcuguucaacaaagugacacuggccgacgccggcuucaucaagcaguauggcgauugucugggcgacauugccgccagggaucugauuugcgcccagaaguuuaacggacugacagugcugccuccucugcugaccgaugagaugaucgcccaguacacaucugcccugcuggccggcacaaucacaagcggcuggacauuuggagcaggcgccgcucugcagauccccuuugcuaugcagauggccuaccgguucaacggcaucggagugacccagaaugugcuguacgagaaccagaagcugaucgccaaccaguucaacagcgccaucggcaagauccaggacagccugagcagcacagcaagcgcccugggaaagcugcaggacguggucaaccagaaugcccaggcacugaacacccuggucaagcagcuguccuccaacuucggcgccaucagcucugugcugaacgauauccugagcagacuggacccuccugaggccgaggugcagaucgacagacugaucacaggcagacugcagagccuccagacauacgugacccagcagcugaucagagccgccgagauuagagccucugccaaucuggccgccaccaagaugucugagugugugcugggccagagcaagagaguggacuuuugcggcaagggcuaccaccugaugagcuucccucagucugccccucacggcgugguguuucugcacgugacauaugugcccgcucaagagaagaauuucaccaccgcuccagccaucugccacgacggcaaagcccacuuuccuagagaaggcguguucguguccaacggcacccauugguucgugacacagcggaacuucuacgagccccagaucaucaccaccgacaacaccuucgugucuggcaacugcgacgucgugaucggcauugugaacaauaccguguacgacccucugcagcccgagcuggacagcuucaaagaggaacuggacaaguacuuuaagaaccacacaagccccgacguggaccugggcgauaucagcggaaucaaugccagcgucgugaacauccagaaagagaucgaccggcugaacgagguggccaagaaucugaacgagagccugaucgaccugcaagaacuggggaaguacgagcaguacaucaaguggcccugguacaucuggcugggcuuuaucgccggacugauugccaucgugauggucacaaucaugcuguguugcaugaccagcugcuguagcugccugaagggcuguuguagcuguggcagcugcugcaaguucgacgaggacgauucugagcccgugcugaagggcgugaaacugcacuacacaugaggacuaguguccaccugucccuccugggcugcuggauugucucguuuuccugccaaauaaacaggaucagcgcuuuacagaucuaaaaaaaaaaaaaaaaaaaaaaaaaaaaaaaaaaaaaaaaaaaaaaaaaaaaaaaaaaaaaaaaaaaaaaaaaaaaaaaaaaaaaaaaaaaaaaaaaaaa

SEQ ID NO: 25370 - RNA, 4105 nt, Artificial Sequence
  SARS-CoV-2/Wuhan/WIV05/2019__EPI_ISL_402128 spike protein mRNA gc mod (1-1273)(K986P_V987P_N439K_D614G)
aggagacccgugacccggaaguuguacggcuacgcgacuuucccucccacaaacccucgcgcccuuccuuuccuacuugggcccggcagaaagcuuaccauguucguguuccuggugcugcugccucugguguccagccagugugugaaccugaccaccagaacacagcugccuccagccuacaccaacagcuuuaccagaggcguguacuaccccgacaagguguucagauccagcgugcugcacucuacccaggaccuguuccugccuuucuucagcaacgugaccugguuccacgccauccacguguccggcaccaauggcaccaagagauucgacaaccccgugcugcccuucaacgacgggguguacuuugccagcaccgagaaguccaacaucaucagaggcuggaucuucggcaccacacuggacagcaagacccagagccugcugaucgugaacaacgccaccaacguggucaucaaagugugcgaguuccaguucugcaacgaccccuuccugggcgucuacuaccacaagaacaacaagagcuggauggaaagcgaguuccggguguacagcagcgccaacaacugcaccuucgaguacgugucccagccuuuccugauggaccuggaaggcaagcagggcaacuucaagaaccugcgcgaguucguguuuaagaacaucgacggcuacuucaagaucuacagcaagcacaccccuaucaaccucgugcgggaucugccucagggcuucucugcucuggaaccccugguggaucugcccaucggcaucaacaucacccgguuucagacacugcuggcccugcacagaagcuaccugacaccuggcgauagcagcagcggauggacagcuggugccgccgcuuacuaugugggcuaccugcagccuagaaccuuccugcugaaguacaacgagaacggcaccaucaccgacgccguggauugugcucuggauccucugagcgagacaaagugcacccugaaguccuucaccguggaaaagggcaucuaccagaccagcaacuuccgggugcagcccaccgaauccaucgugcgguuccccaauaucaccaaucugugccccuucggcgagguguucaaugccaccagauucgccucuguguacgccuggaaccggaagcggaucagcaauugcguggccgacuacuccgugcuguacaacuccgccagcuucagcaccuucaagugcuacggcguguccccuaccaagcugaacgaccugugcuucacaaacguguacgccgacagcuucgugauccggggagaugaagugcggcagauugccccuggacagacaggcaagaucgccgacuacaacuacaagcugcccgacgacuucaccggcugugugauugccuggaacagcaagaaccuggacuccaaagucggcggcaacuacaauuaccuguaccggcuguuccggaaguccaaucugaagcccuucgagcgggacaucuccaccgagaucuaucaggccggcagcaccccuuguaacggcguggaaggcuucaacugcuacuucccacugcaguccuacggcuuucagcccacaaauggcgugggcuaucagcccuacagagugguggugcugagcuucgaacugcugcaugccccugccacagugugcggcccuaagaaaagcaccaaucucgugaagaacaaaugcgugaacuucaacuucaacggccugaccggcaccggcgugcugacagagagcaacaagaaguuccugccauuccagcaguuuggccgggauaucgccgauaccacagacgccguuagagauccccagacacuggaaauccuggacaucaccccuugcagcuucggcggagugucugugaucaccccuggcaccaacaccagcaaucagguggcagugcuguaccagggcgugaacuguaccgaagugcccguggccauucacgccgaucagcugacaccuacauggcggguguacuccaccggcagcaauguguuucagaccagagccggcugucugaucggagccgagcacgugaacaauagcuacgagugcgacauccccaucggcgcuggaaucugcgccagcuaccagacacagacaaacagcccucggagagccagaagcguggccagccagagcaucauugccuacacaaugucucugggcgccgagaacagcguggccuacuccaacaacucuaucgcuauccccaccaacuucaccaucagcgugaccacagagauccugccuguguccaugaccaagaccagcguggacugcaccauguacaucugcggcgauuccaccgagugcuccaaccugcugcugcaguacggcagcuucugcacccagcugaauagagcccugacagggaucgccguggaacaggacaagaacacccaagagguguucgcccaagugaagcagaucuacaagaccccuccuaucaaggacuucggcggcuucaauuucagccagauucugcccgauccuagcaagcccagcaagcggagcuucaucgaggaccugcuguucaacaaagugacacuggccgacgccggcuucaucaagcaguauggcgauugucugggcgacauugccgccagggaucugauuugcgcccagaaguuuaacggacugacagugcugccuccucugcugaccgaugagaugaucgcccaguacacaucugcccugcuggccggcacaaucacaagcggcuggacauuuggagcaggcgccgcucugcagauccccuuugcuaugcagauggccuaccgguucaacggcaucggagugacccagaaugugcuguacgagaaccagaagcugaucgccaaccaguucaacagcgccaucggcaagauccaggacagccugagcagcacagcaagcgcccugggaaagcugcaggacguggucaaccagaaugcccaggcacugaacacccuggucaagcagcuguccuccaacuucggcgccaucagcucugugcugaacgauauccugagcagacuggacccuccugaggccgaggugcagaucgacagacugaucacaggcagacugcagagccuccagacauacgugacccagcagcugaucagagccgccgagauuagagccucugccaaucuggccgccaccaagaugucugagugugugcugggccagagcaagagaguggacuuuugcggcaagggcuaccaccugaugagcuucccucagucugccccucacggcgugguguuucugcacgugacauaugugcccgcucaagagaagaauuucaccaccgcuccagccaucugccacgacggcaaagcccacuuuccuagagaaggcguguucguguccaacggcacccauugguucgugacacagcggaacuucuacgagccccagaucaucaccaccgacaacaccuucgugucuggcaacugcgacgucgugaucggcauugugaacaauaccguguacgacccucugcagcccgagcuggacagcuucaaagaggaacuggacaaguacuuuaagaaccacacaagccccgacguggaccugggcgauaucagcggaaucaaugccagcgucgugaacauccagaaagagaucgaccggcugaacgagguggccaagaaucugaacgagagccugaucgaccugcaagaacuggggaaguacgagcaguacaucaaguggcccugguacaucuggcugggcuuuaucgccggacugauugccaucgugauggucacaaucaugcuguguugcaugaccagcugcuguagcugccugaagggcuguuguagcuguggcagcugcugcaaguucgacgaggacgauucugagcccgugcugaagggcgugaaacugcacuacacaugaggacuaguguccaccugucccuccugggcugcuggauugucucguuuuccugccaaauaaacaggaucagcgcuuuacagaucuaaaaaaaaaaaaaaaaaaaaaaaaaaaaaaaaaaaaaaaaaaaaaaaaaaaaaaaaaaaaaaaaaaaaaaaaaaaaaaaaaaaaaaaaaaaaaaaaaaaa

SEQ ID NO: 25371 - RNA, 4105 nt, Artificial Sequence
  SARS-CoV-2/Wuhan/WIV05/2019__EPI_ISL_402128 spike protein mRNA gc mod (1-1273)(K986P_V987P_S477N_D614G)
aggagacccgugacccggaaguuguacggcuacgcgacuuucccucccacaaacccucgcgcccuuccuuuccuacuugggcccggcagaaagcuuaccauguucguguuccuggugcugcugccucugguguccagccagugugugaaccugaccaccagaacacagcugccuccagccuacaccaacagcuuuaccagaggcguguacuaccccgacaagguguucagauccagcgugcugcacucuacccaggaccuguuccugccuuucuucagcaacgugaccugguuccacgccauccacguguccggcaccaauggcaccaagagauucgacaaccccgugcugcccuucaacgacgggguguacuuugccagcaccgagaaguccaacaucaucagaggcuggaucuucggcaccacacuggacagcaagacccagagccugcugaucgugaacaacgccaccaacguggucaucaaagugugcgaguuccaguucugcaacgaccccuuccugggcgucuacuaccacaagaacaacaagagcuggauggaaagcgaguuccggguguacagcagcgccaacaacugcaccuucgaguacgugucccagccuuuccugauggaccuggaaggcaagcagggcaacuucaagaaccugcgcgaguucguguuuaagaacaucgacggcuacuucaagaucuacagcaagcacaccccuaucaaccucgugcgggaucugccucagggcuucucugcucuggaaccccugguggaucugcccaucggcaucaacaucacccgguuucagacacugcuggcccugcacagaagcuaccugacaccuggcgauagcagcagcggauggacagcuggugccgccgcuuacuaugugggcuaccugcagccuagaaccuuccugcugaaguacaacgagaacggcaccaucaccgacgccguggauugugcucuggauccucugagcgagacaaagugcacccugaaguccuucaccguggaaaagggcaucuaccagaccagcaacuuccgggugcagcccaccgaauccaucgugcgguuccccaauaucaccaaucugugccccuucggcgagguguucaaugccaccagauucgccucuguguacgccuggaaccggaagcggaucagcaauugcguggccgacuacuccgugcuguacaacuccgccagcuucagcaccuucaagugcuacggcguguccccuaccaagcugaacgaccugugcuucacaaacguguacgccgacagcuucgugauccggggagaugaagugcggcagauugccccuggacagacaggcaagaucgccgacuacaacuacaagcugcccgacgacuucaccggcugugugauugccuggaacagcaacaaccuggacuccaaagucggcggcaacuacaauuaccuguaccggcuguuccggaaguccaaucugaagcccuucgagcgggacaucuccaccgagaucuaucaggccggcaacaccccuuguaacggcguggaaggcuucaacugcuacuucccacugcaguccuacggcuuucagcccacaaauggcgugggcuaucagcccuacagagugguggugcugagcuucgaacugcugcaugccccugccacagugugcggcccuaagaaaagcaccaaucucgugaagaacaaaugcgugaacuucaacuucaacggccugaccggcaccggcgugcugacagagagcaacaagaaguuccugccauuccagcaguuuggccgggauaucgccgauaccacagacgccguuagagauccccagacacuggaaauccuggacaucaccccuugcagcuucggcggagugucugugaucaccccuggcaccaacaccagcaaucagguggcagugcuguaccagggcgugaacuguaccgaagugcccguggccauucacgccgaucagcugacaccuacauggcggguguacuccaccggcagcaauguguuucagaccagagccggcugucugaucggagccgagcacgugaacaauagcuacgagugcgacauccccaucggcgcuggaaucugcgccagcuaccagacacagacaaacagcccucggagagccagaagcguggccagccagagcaucauugccuacacaaugucucugggcgccgagaacagcguggccuacuccaacaacucuaucgcuauccccaccaacuucaccaucagcgugaccacagagauccugccuguguccaugaccaagaccagcguggacugcaccauguacaucugcggcgauuccaccgagugcuccaaccugcugcugcaguacggcagcuucugcacccagcugaauagagcccugacagggaucgccguggaacaggacaagaacacccaagagguguucgcccaagugaagcagaucuacaagaccccuccuaucaaggacuucggcggcuucaauuucagccagauucugcccgauccuagcaagcccagcaagcggagcuucaucgaggaccugcuguucaacaaagugacacuggccgacgccggcuucaucaagcaguauggcgauugucugggcgacauugccgccagggaucugauuugcgcccagaaguuuaacggacugacagugcugccuccucugcugaccgaugagaugaucgcccaguacacaucugcccugcuggccggcacaaucacaagcggcuggacauuuggagcaggcgccgcucugcagauccccuuugcuaugcagauggccuaccgguucaacggcaucggagugacccagaaugugcuguacgagaaccagaagcugaucgccaaccaguucaacagcgccaucggcaagauccaggacagccugagcagcacagcaagcgcccugggaaagcugcaggacguggucaaccagaaugcccaggcacugaacacccuggucaagcagcuguccuccaacuucggcgccaucagcucugugcugaacgauauccugagcagacuggacccuccugaggccgaggugcagaucgacagacugaucacaggcagacugcagagccuccagacauacgugacccagcagcugaucagagccgccgagauuagagccucugccaaucuggccgccaccaagaugucugagugugugcugggccagagcaagagaguggacuuuugcggcaagggcuaccaccugaugagcuucccucagucugccccucacggcgugguguuucugcacgugacauaugugcccgcucaagagaagaauuucaccaccgcuccagccaucugccacgacggcaaagcccacuuuccuagagaaggcguguucguguccaacggcacccauugguucgugacacagcggaacuucuacgagccccagaucaucaccaccgacaacaccuucgugucuggcaacugcgacgucgugaucggcauugugaacaauaccguguacgacccucugcagcccgagcuggacagcuucaaagaggaacuggacaaguacuuuaagaaccacacaagccccgacguggaccugggcgauaucagcggaaucaaugccagcgucgugaacauccagaaagagaucgaccggcugaacgagguggccaagaaucugaacgagagccugaucgaccugcaagaacuggggaaguacgagcaguacaucaaguggcccugguacaucuggcugggcuuuaucgccggacugauugccaucgugauggucacaaucaugcuguguugcaugaccagcugcuguagcugccugaagggcuguuguagcuguggcagcugcugcaaguucgacgaggacgauucugagcccgugcugaagggcgugaaacugcacuacacaugaggacuaguguccaccugucccuccugggcugcuggauugucucguuuuccugccaaauaaacaggaucagcgcuuuacagaucuaaaaaaaaaaaaaaaaaaaaaaaaaaaaaaaaaaaaaaaaaaaaaaaaaaaaaaaaaaaaaaaaaaaaaaaaaaaaaaaaaaaaaaaaaaaaaaaaaaaa

SEQ ID NO: 25372 - RNA, 4105 nt, Artificial Sequence
  SARS-CoV-2/Wuhan/WIV05/2019__EPI_ISL_402128 spike protein mRNA gc mod (1-1273)(K986P_V987P_N501Y_D614G)
aggagacccgugacccggaaguuguacggcuacgcgacuuucccucccacaaacccucgcgcccuuccuuuccuacuugggcccggcagaaagcuuaccauguucguguuccuggugcugcugccucugguguccagccagugugugaaccugaccaccagaacacagcugccuccagccuacaccaacagcuuuaccagaggcguguacuaccccgacaagguguucagauccagcgugcugcacucuacccaggaccuguuccugccuuucuucagcaacgugaccugguuccacgccauccacguguccggcaccaauggcaccaagagauucgacaaccccgugcugcccuucaacgacgggguguacuuugccagcaccgagaaguccaacaucaucagaggcuggaucuucggcaccacacuggacagcaagacccagagccugcugaucgugaacaacgccaccaacguggucaucaaagugugcgaguuccaguucugcaacgaccccuuccugggcgucuacuaccacaagaacaacaagagcuggauggaaagcgaguuccggguguacagcagcgccaacaacugcaccuucgaguacgugucccagccuuuccugauggaccuggaaggcaagcagggcaacuucaagaaccugcgcgaguucguguuuaagaacaucgacggcuacuucaagaucuacagcaagcacaccccuaucaaccucgugcgggaucugccucagggcuucucugcucuggaaccccugguggaucugcccaucggcaucaacaucacccgguuucagacacugcuggcccugcacagaagcuaccugacaccuggcgauagcagcagcggauggacagcuggugccgccgcuuacuaugugggcuaccugcagccuagaaccuuccugcugaaguacaacgagaacggcaccaucaccgacgccguggauugugcucuggauccucugagcgagacaaagugcacccugaaguccuucaccguggaaaagggcaucuaccagaccagcaacuuccgggugcagcccaccgaauccaucgugcgguuccccaauaucaccaaucugugccccuucggcgagguguucaaugccaccagauucgccucuguguacgccuggaaccggaagcggaucagcaauugcguggccgacuacuccgugcuguacaacuccgccagcuucagcaccuucaagugcuacggcguguccccuaccaagcugaacgaccugugcuucacaaacguguacgccgacagcuucgugauccggggagaugaagugcggcagauugccccuggacagacaggcaagaucgccgacuacaacuacaagcugcccgacgacuucaccggcugugugauugccuggaacagcaacaaccuggacuccaaagucggcggcaacuacaauuaccuguaccggcuguuccggaaguccaaucugaagcccuucgagcgggacaucuccaccgagaucuaucaggccggcagcaccccuuguaacggcguggaaggcuucaacugcuacuucccacugcaguccuacggcuuucagcccacauacggcgugggcuaucagcccuacagagugguggugcugagcuucgaacugcugcaugccccugccacagugugcggcccuaagaaaagcaccaaucucgugaagaacaaaugcgugaacuucaacuucaacggccugaccggcaccggcgugcugacagagagcaacaagaaguuccugccauuccagcaguuuggccgggauaucgccgauaccacagacgccguuagagauccccagacacuggaaauccuggacaucaccccuugcagcuucggcggagugucugugaucaccccuggcaccaacaccagcaaucagguggcagugcuguaccagggcgugaacuguaccgaagugcccguggccauucacgccgaucagcugacaccuacauggcggguguacuccaccggcagcaauguguuucagaccagagccggcugucugaucggagccgagcacgugaacaauagcuacgagugcgacauccccaucggcgcuggaaucugcgccagcuaccagacacagacaaacagcccucggagagccagaagcguggccagccagagcaucauugccuacacaaugucucugggcgccgagaacagcguggccuacuccaacaacucuaucgcuauccccaccaacuucaccaucagcgugaccacagagauccugccuguguccaugaccaagaccagcguggacugcaccauguacaucugcggcgauuccaccgagugcuccaaccugcugcugcaguacggcagcuucugcacccagcugaauagagcccugacagggaucgccguggaacaggacaagaacacccaagagguguucgcccaagugaagcagaucuacaagaccccuccuaucaaggacuucggcggcuucaauuucagccagauucugcccgauccuagcaagcccagcaagcggagcuucaucgaggaccugcuguucaacaaagugacacuggccgacgccggcuucaucaagcaguauggcgauugucugggcgacauugccgccagggaucugauuugcgcccagaaguuuaacggacugacagugcugccuccucugcugaccgaugagaugaucgcccaguacacaucugcccugcuggccggcacaaucacaagcggcuggacauuuggagcaggcgccgcucugcagauccccuuugcuaugcagauggccuaccgguucaacggcaucggagugacccagaaugugcuguacgagaaccagaagcugaucgccaaccaguucaacagcgccaucggcaagauccaggacagccugagcagcacagcaagcgcccugggaaagcugcaggacguggucaaccagaaugcccaggcacugaacacccuggucaagcagcuguccuccaacuucggcgccaucagcucugugcugaacgauauccugagcagacuggacccuccugaggccgaggugcagaucgacagacugaucacaggcagacugcagagccuccagacauacgugacccagcagcugaucagagccgccgagauuagagccucugccaaucuggccgccaccaagaugucugagugugugcugggccagagcaagagaguggacuuuugcggcaagggcuaccaccugaugagcuucccucagucugccccucacggcgugguguuucugcacgugacauaugugcccgcucaagagaagaauuucaccaccgcuccagccaucugccacgacggcaaagcccacuuuccuagagaaggcguguucguguccaacggcacccauugguucgugacacagcggaacuucuacgagccccagaucaucaccaccgacaacaccuucgugucuggcaacugcgacgucgugaucggcauugugaacaauaccguguacgacccucugcagcccgagcuggacagcuucaaagaggaacuggacaaguacuuuaagaaccacacaagccccgacguggaccugggcgauaucagcggaaucaaugccagcgucgugaacauccagaaagagaucgaccggcugaacgagguggccaagaaucugaacgagagccugaucgaccugcaagaacuggggaaguacgagcaguacaucaaguggcccugguacaucuggcugggcuuuaucgccggacugauugccaucgugauggucacaaucaugcuguguugcaugaccagcugcuguagcugccugaagggcuguuguagcuguggcagcugcugcaaguucgacgaggacgauucugagcccgugcugaagggcgugaaacugcacuacacaugaggacuaguguccaccugucccuccugggcugcuggauugucucguuuuccugccaaauaaacaggaucagcgcuuuacagaucuaaaaaaaaaaaaaaaaaaaaaaaaaaaaaaaaaaaaaaaaaaaaaaaaaaaaaaaaaaaaaaaaaaaaaaaaaaaaaaaaaaaaaaaaaaaaaaaaaaaa

SEQ ID NO: 25373 - RNA, 4099 nt, Artificial Sequence
  SARS-CoV-2/Wuhan/WIV05/2019__EPI_ISL_402128 spike protein mRNA gc mod (1-1273)(K986P_V987P_H69del_V70del_D614G)
aggagacccgugacccggaaguuguacggcuacgcgacuuucccucccacaaacccucgcgcccuuccuuuccuacuugggcccggcagaaagcuuaccauguucguguuccuggugcugcugccucugguguccagccagugugugaaccugaccaccagaacacagcugccuccagccuacaccaacagcuuuaccagaggcguguacuaccccgacaagguguucagauccagcgugcugcacucuacccaggaccuguuccugccuuucuucagcaacgugaccugguuccacgccaucuccggcaccaauggcaccaagagauucgacaaccccgugcugcccuucaacgacgggguguacuuugccagcaccgagaaguccaacaucaucagaggcuggaucuucggcaccacacuggacagcaagacccagagccugcugaucgugaacaacgccaccaacguggucaucaaagugugcgaguuccaguucugcaacgaccccuuccugggcgucuacuaccacaagaacaacaagagcuggauggaaagcgaguuccggguguacagcagcgccaacaacugcaccuucgaguacgugucccagccuuuccugauggaccuggaaggcaagcagggcaacuucaagaaccugcgcgaguucguguuuaagaacaucgacggcuacuucaagaucuacagcaagcacaccccuaucaaccucgugcgggaucugccucagggcuucucugcucuggaaccccugguggaucugcccaucggcaucaacaucacccgguuucagacacugcuggcccugcacagaagcuaccugacaccuggcgauagcagcagcggauggacagcuggugccgccgcuuacuaugugggcuaccugcagccuagaaccuuccugcugaaguacaacgagaacggcaccaucaccgacgccguggauugugcucuggauccucugagcgagacaaagugcacccugaaguccuucaccguggaaaagggcaucuaccagaccagcaacuuccgggugcagcccaccgaauccaucgugcgguuccccaauaucaccaaucugugccccuucggcgagguguucaaugccaccagauucgccucuguguacgccuggaaccggaagcggaucagcaauugcguggccgacuacuccgugcuguacaacuccgccagcuucagcaccuucaagugcuacggcguguccccuaccaagcugaacgaccugugcuucacaaacguguacgccgacagcuucgugauccggggagaugaagugcggcagauugccccuggacagacaggcaagaucgccgacuacaacuacaagcugcccgacgacuucaccggcugugugauugccuggaacagcaacaaccuggacuccaaagucggcggcaacuacaauuaccuguaccggcuguuccggaaguccaaucugaagcccuucgagcgggacaucuccaccgagaucuaucaggccggcagcaccccuuguaacggcguggaaggcuucaacugcuacuucccacugcaguccuacggcuuucagcccacaaauggcgugggcuaucagcccuacagagugguggugcugagcuucgaacugcugcaugccccugccacagugugcggcccuaagaaaagcaccaaucucgugaagaacaaaugcgugaacuucaacuucaacggccugaccggcaccggcgugcugacagagagcaacaagaaguuccugccauuccagcaguuuggccgggauaucgccgauaccacagacgccguuagagauccccagacacuggaaauccuggacaucaccccuugcagcuucggcggagugucugugaucaccccuggcaccaacaccagcaaucagguggcagugcuguaccagggcgugaacuguaccgaagugcccguggccauucacgccgaucagcugacaccuacauggcggguguacuccaccggcagcaauguguuucagaccagagccggcugucugaucggagccgagcacgugaacaauagcuacgagugcgacauccccaucggcgcuggaaucugcgccagcuaccagacacagacaaacagcccucggagagccagaagcguggccagccagagcaucauugccuacacaaugucucugggcgccgagaacagcguggccuacuccaacaacucuaucgcuauccccaccaacuucaccaucagcgugaccacagagauccugccuguguccaugaccaagaccagcguggacugcaccauguacaucugcggcgauuccaccgagugcuccaaccugcugcugcaguacggcagcuucugcacccagcugaauagagcccugacagggaucgccguggaacaggacaagaacacccaagagguguucgcccaagugaagcagaucuacaagaccccuccuaucaaggacuucggcggcuucaauuucagccagauucugcccgauccuagcaagcccagcaagcggagcuucaucgaggaccugcuguucaacaaagugacacuggccgacgccggcuucaucaagcaguauggcgauugucugggcgacauugccgccagggaucugauuugcgcccagaaguuuaacggacugacagugcugccuccucugcugaccgaugagaugaucgcccaguacacaucugcccugcuggccggcacaaucacaagcggcuggacauuuggagcaggcgccgcucugcagauccccuuugcuaugcagauggccuaccgguucaacggcaucggagugacccagaaugugcuguacgagaaccagaagcugaucgccaaccaguucaacagcgccaucggcaagauccaggacagccugagcagcacagcaagcgcccugggaaagcugcaggacguggucaaccagaaugcccaggcacugaacacccuggucaagcagcuguccuccaacuucggcgccaucagcucugugcugaacgauauccugagcagacuggacccuccugaggccgaggugcagaucgacagacugaucacaggcagacugcagagccuccagacauacgugacccagcagcugaucagagccgccgagauuagagccucugccaaucuggccgccaccaagaugucugagugugugcugggccagagcaagagaguggacuuuugcggcaagggcuaccaccugaugagcuucccucagucugccccucacggcgugguguuucugcacgugacauaugugcccgcucaagagaagaauuucaccaccgcuccagccaucugccacgacggcaaagcccacuuuccuagagaaggcguguucguguccaacggcacccauugguucgugacacagcggaacuucuacgagccccagaucaucaccaccgacaacaccuucgugucuggcaacugcgacgucgugaucggcauugugaacaauaccguguacgacccucugcagcccgagcuggacagcuucaaagaggaacuggacaaguacuuuaagaaccacacaagccccgacguggaccugggcgauaucagcggaaucaaugccagcgucgugaacauccagaaagagaucgaccggcugaacgagguggccaagaaucugaacgagagccugaucgaccugcaagaacuggggaaguacgagcaguacaucaaguggcccugguacaucuggcugggcuuuaucgccggacugauugccaucgugauggucacaaucaugcuguguugcaugaccagcugcuguagcugccugaagggcuguuguagcuguggcagcugcugcaaguucgacgaggacgauucugagcccgugcugaagggcgugaaacugcacuacacaugaggacuaguguccaccugucccuccugggcugcuggauugucucguuuuccugccaaauaaacaggaucagcgcuuuacagaucuaaaaaaaaaaaaaaaaaaaaaaaaaaaaaaaaaaaaaaaaaaaaaaaaaaaaaaaaaaaaaaaaaaaaaaaaaaaaaaaaaaaaaaaaaaaaaaaaaaaa

SEQ ID NO: 25374 - RNA, 4105 nt, Artificial Sequence
  SARS-CoV-2/Wuhan/WIV05/2019__EPI_ISL_402128 spike protein mRNA gc mod (1-1273)(K986P_V987P_Y453F_D614G)
aggagacccgugacccggaaguuguacggcuacgcgacuuucccucccacaaacccucgcgcccuuccuuuccuacuugggcccggcagaaagcuuaccauguucguguuccuggugcugcugccucugguguccagccagugugugaaccugaccaccagaacacagcugccuccagccuacaccaacagcuuuaccagaggcguguacuaccccgacaagguguucagauccagcgugcugcacucuacccaggaccuguuccugccuuucuucagcaacgugaccugguuccacgccauccacguguccggcaccaauggcaccaagagauucgacaaccccgugcugcccuucaacgacgggguguacuuugccagcaccgagaaguccaacaucaucagaggcuggaucuucggcaccacacuggacagcaagacccagagccugcugaucgugaacaacgccaccaacguggucaucaaagugugcgaguuccaguucugcaacgaccccuuccugggcgucuacuaccacaagaacaacaagagcuggauggaaagcgaguuccggguguacagcagcgccaacaacugcaccuucgaguacgugucccagccuuuccugauggaccuggaaggcaagcagggcaacuucaagaaccugcgcgaguucguguuuaagaacaucgacggcuacuucaagaucuacagcaagcacaccccuaucaaccucgugcgggaucugccucagggcuucucugcucuggaaccccugguggaucugcccaucggcaucaacaucacccgguuucagacacugcuggcccugcacagaagcuaccugacaccuggcgauagcagcagcggauggacagcuggugccgccgcuuacuaugugggcuaccugcagccuagaaccuuccugcugaaguacaacgagaacggcaccaucaccgacgccguggauugugcucuggauccucugagcgagacaaagugcacccugaaguccuucaccguggaaaagggcaucuaccagaccagcaacuuccgggugcagcccaccgaauccaucgugcgguuccccaauaucaccaaucugugccccuucggcgagguguucaaugccaccagauucgccucuguguacgccuggaaccggaagcggaucagcaauugcguggccgacuacuccgugcuguacaacuccgccagcuucagcaccuucaagugcuacggcguguccccuaccaagcugaacgaccugugcuucacaaacguguacgccgacagcuucgugauccggggagaugaagugcggcagauugccccuggacagacaggcaagaucgccgacuacaacuacaagcugcccgacgacuucaccggcugugugauugccuggaacagcaacaaccuggacuccaaagucggcggcaacuacaauuaccuguuccggcuguuccggaaguccaaucugaagcccuucgagcgggacaucuccaccgagaucuaucaggccggcagcaccccuuguaacggcguggaaggcuucaacugcuacuucccacugcaguccuacggcuuucagcccacaaauggcgugggcuaucagcccuacagagugguggugcugagcuucgaacugcugcaugccccugccacagugugcggcccuaagaaaagcaccaaucucgugaagaacaaaugcgugaacuucaacuucaacggccugaccggcaccggcgugcugacagagagcaacaagaaguuccugccauuccagcaguuuggccgggauaucgccgauaccacagacgccguuagagauccccagacacuggaaauccuggacaucaccccuugcagcuucggcggagugucugugaucaccccuggcaccaacaccagcaaucagguggcagugcuguaccagggcgugaacuguaccgaagugcccguggccauucacgccgaucagcugacaccuacauggcggguguacuccaccggcagcaauguguuucagaccagagccggcugucugaucggagccgagcacgugaacaauagcuacgagugcgacauccccaucggcgcuggaaucugcgccagcuaccagacacagacaaacagcccucggagagccagaagcguggccagccagagcaucauugccuacacaaugucucugggcgccgagaacagcguggccuacuccaacaacucuaucgcuauccccaccaacuucaccaucagcgugaccacagagauccugccuguguccaugaccaagaccagcguggacugcaccauguacaucugcggcgauuccaccgagugcuccaaccugcugcugcaguacggcagcuucugcacccagcugaauagagcccugacagggaucgccguggaacaggacaagaacacccaagagguguucgcccaagugaagcagaucuacaagaccccuccuaucaaggacuucggcggcuucaauuucagccagauucugcccgauccuagcaagcccagcaagcggagcuucaucgaggaccugcuguucaacaaagugacacuggccgacgccggcuucaucaagcaguauggcgauugucugggcgacauugccgccagggaucugauuugcgcccagaaguuuaacggacugacagugcugccuccucugcugaccgaugagaugaucgcccaguacacaucugcccugcuggccggcacaaucacaagcggcuggacauuuggagcaggcgccgcucugcagauccccuuugcuaugcagauggccuaccgguucaacggcaucggagugacccagaaugugcuguacgagaaccagaagcugaucgccaaccaguucaacagcgccaucggcaagauccaggacagccugagcagcacagcaagcgcccugggaaagcugcaggacguggucaaccagaaugcccaggcacugaacacccuggucaagcagcuguccuccaacuucggcgccaucagcucugugcugaacgauauccugagcagacuggacccuccugaggccgaggugcagaucgacagacugaucacaggcagacugcagagccuccagacauacgugacccagcagcugaucagagccgccgagauuagagccucugccaaucuggccgccaccaagaugucugagugugugcugggccagagcaagagaguggacuuuugcggcaagggcuaccaccugaugagcuucccucagucugccccucacggcgugguguuucugcacgugacauaugugcccgcucaagagaagaauuucaccaccgcuccagccaucugccacgacggcaaagcccacuuuccuagagaaggcguguucguguccaacggcacccauugguucgugacacagcggaacuucuacgagccccagaucaucaccaccgacaacaccuucgugucuggcaacugcgacgucgugaucggcauugugaacaauaccguguacgacccucugcagcccgagcuggacagcuucaaagaggaacuggacaaguacuuuaagaaccacacaagccccgacguggaccugggcgauaucagcggaaucaaugccagcgucgugaacauccagaaagagaucgaccggcugaacgagguggccaagaaucugaacgagagccugaucgaccugcaagaacuggggaaguacgagcaguacaucaaguggcccugguacaucuggcugggcuuuaucgccggacugauugccaucgugauggucacaaucaugcuguguugcaugaccagcugcuguagcugccugaagggcuguuguagcuguggcagcugcugcaaguucgacgaggacgauucugagcccgugcugaagggcgugaaacugcacuacacaugaggacuaguguccaccugucccuccugggcugcuggauugucucguuuuccugccaaauaaacaggaucagcgcuuuacagaucuaaaaaaaaaaaaaaaaaaaaaaaaaaaaaaaaaaaaaaaaaaaaaaaaaaaaaaaaaaaaaaaaaaaaaaaaaaaaaaaaaaaaaaaaaaaaaaaaaaaa

SEQ ID NO: 25375 - RNA, 4105 nt, Artificial Sequence
  SARS-CoV-2/Wuhan/WIV05/2019__EPI_ISL_402128 spike protein mRNA gc mod (1-1273)(K986P_V987P_D614G_I692V)
aggagacccgugacccggaaguuguacggcuacgcgacuuucccucccacaaacccucgcgcccuuccuuuccuacuugggcccggcagaaagcuuaccauguucguguuccuggugcugcugccucugguguccagccagugugugaaccugaccaccagaacacagcugccuccagccuacaccaacagcuuuaccagaggcguguacuaccccgacaagguguucagauccagcgugcugcacucuacccaggaccuguuccugccuuucuucagcaacgugaccugguuccacgccauccacguguccggcaccaauggcaccaagagauucgacaaccccgugcugcccuucaacgacgggguguacuuugccagcaccgagaaguccaacaucaucagaggcuggaucuucggcaccacacuggacagcaagacccagagccugcugaucgugaacaacgccaccaacguggucaucaaagugugcgaguuccaguucugcaacgaccccuuccugggcgucuacuaccacaagaacaacaagagcuggauggaaagcgaguuccggguguacagcagcgccaacaacugcaccuucgaguacgugucccagccuuuccugauggaccuggaaggcaagcagggcaacuucaagaaccugcgcgaguucguguuuaagaacaucgacggcuacuucaagaucuacagcaagcacaccccuaucaaccucgugcgggaucugccucagggcuucucugcucuggaaccccugguggaucugcccaucggcaucaacaucacccgguuucagacacugcuggcccugcacagaagcuaccugacaccuggcgauagcagcagcggauggacagcuggugccgccgcuuacuaugugggcuaccugcagccuagaaccuuccugcugaaguacaacgagaacggcaccaucaccgacgccguggauugugcucuggauccucugagcgagacaaagugcacccugaaguccuucaccguggaaaagggcaucuaccagaccagcaacuuccgggugcagcccaccgaauccaucgugcgguuccccaauaucaccaaucugugccccuucggcgagguguucaaugccaccagauucgccucuguguacgccuggaaccggaagcggaucagcaauugcguggccgacuacuccgugcuguacaacuccgccagcuucagcaccuucaagugcuacggcguguccccuaccaagcugaacgaccugugcuucacaaacguguacgccgacagcuucgugauccggggagaugaagugcggcagauugccccuggacagacaggcaagaucgccgacuacaacuacaagcugcccgacgacuucaccggcugugugauugccuggaacagcaacaaccuggacuccaaagucggcggcaacuacaauuaccuguaccggcuguuccggaaguccaaucugaagcccuucgagcgggacaucuccaccgagaucuaucaggccggcagcaccccuuguaacggcguggaaggcuucaacugcuacuucccacugcaguccuacggcuuucagcccacaaauggcgugggcuaucagcccuacagagugguggugcugagcuucgaacugcugcaugccccugccacagugugcggcccuaagaaaagcaccaaucucgugaagaacaaaugcgugaacuucaacuucaacggccugaccggcaccggcgugcugacagagagcaacaagaaguuccugccauuccagcaguuuggccgggauaucgccgauaccacagacgccguuagagauccccagacacuggaaauccuggacaucaccccuugcagcuucggcggagugucugugaucaccccuggcaccaacaccagcaaucagguggcagugcuguaccagggcgugaacuguaccgaagugcccguggccauucacgccgaucagcugacaccuacauggcggguguacuccaccggcagcaauguguuucagaccagagccggcugucugaucggagccgagcacgugaacaauagcuacgagugcgacauccccaucggcgcuggaaucugcgccagcuaccagacacagacaaacagcccucggagagccagaagcguggccagccagagcgugauugccuacacaaugucucugggcgccgagaacagcguggccuacuccaacaacucuaucgcuauccccaccaacuucaccaucagcgugaccacagagauccugccuguguccaugaccaagaccagcguggacugcaccauguacaucugcggcgauuccaccgagugcuccaaccugcugcugcaguacggcagcuucugcacccagcugaauagagcccugacagggaucgccguggaacaggacaagaacacccaagagguguucgcccaagugaagcagaucuacaagaccccuccuaucaaggacuucggcggcuucaauuucagccagauucugcccgauccuagcaagcccagcaagcggagcuucaucgaggaccugcuguucaacaaagugacacuggccgacgccggcuucaucaagcaguauggcgauugucugggcgacauugccgccagggaucugauuugcgcccagaaguuuaacggacugacagugcugccuccucugcugaccgaugagaugaucgcccaguacacaucugcccugcuggccggcacaaucacaagcggcuggacauuuggagcaggcgccgcucugcagauccccuuugcuaugcagauggccuaccgguucaacggcaucggagugacccagaaugugcuguacgagaaccagaagcugaucgccaaccaguucaacagcgccaucggcaagauccaggacagccugagcagcacagcaagcgcccugggaaagcugcaggacguggucaaccagaaugcccaggcacugaacacccuggucaagcagcuguccuccaacuucggcgccaucagcucugugcugaacgauauccugagcagacuggacccuccugaggccgaggugcagaucgacagacugaucacaggcagacugcagagccuccagacauacgugacccagcagcugaucagagccgccgagauuagagccucugccaaucuggccgccaccaagaugucugagugugugcugggccagagcaagagaguggacuuuugcggcaagggcuaccaccugaugagcuucccucagucugccccucacggcgugguguuucugcacgugacauaugugcccgcucaagagaagaauuucaccaccgcuccagccaucugccacgacggcaaagcccacuuuccuagagaaggcguguucguguccaacggcacccauugguucgugacacagcggaacuucuacgagccccagaucaucaccaccgacaacaccuucgugucuggcaacugcgacgucgugaucggcauugugaacaauaccguguacgacccucugcagcccgagcuggacagcuucaaagaggaacuggacaaguacuuuaagaaccacacaagccccgacguggaccugggcgauaucagcggaaucaaugccagcgucgugaacauccagaaagagaucgaccggcugaacgagguggccaagaaucugaacgagagccugaucgaccugcaagaacuggggaaguacgagcaguacaucaaguggcccugguacaucuggcugggcuuuaucgccggacugauugccaucgugauggucacaaucaugcuguguugcaugaccagcugcuguagcugccugaagggcuguuguagcuguggcagcugcugcaaguucgacgaggacgauucugagcccgugcugaagggcgugaaacugcacuacacaugaggacuaguguccaccugucccuccugggcugcuggauugucucguuuuccugccaaauaaacaggaucagcgcuuuacagaucuaaaaaaaaaaaaaaaaaaaaaaaaaaaaaaaaaaaaaaaaaaaaaaaaaaaaaaaaaaaaaaaaaaaaaaaaaaaaaaaaaaaaaaaaaaaaaaaaaaaa

SEQ ID NO: 25376 - RNA, 4105 nt, Artificial Sequence
  SARS-CoV-2/Wuhan/WIV05/2019__EPI_ISL_402128 spike protein mRNA gc mod (1-1273)(K986P_V987P_D614G_M1229I)
aggagacccgugacccggaaguuguacggcuacgcgacuuucccucccacaaacccucgcgcccuuccuuuccuacuugggcccggcagaaagcuuaccauguucguguuccuggugcugcugccucugguguccagccagugugugaaccugaccaccagaacacagcugccuccagccuacaccaacagcuuuaccagaggcguguacuaccccgacaagguguucagauccagcgugcugcacucuacccaggaccuguuccugccuuucuucagcaacgugaccugguuccacgccauccacguguccggcaccaauggcaccaagagauucgacaaccccgugcugcccuucaacgacgggguguacuuugccagcaccgagaaguccaacaucaucagaggcuggaucuucggcaccacacuggacagcaagacccagagccugcugaucgugaacaacgccaccaacguggucaucaaagugugcgaguuccaguucugcaacgaccccuuccugggcgucuacuaccacaagaacaacaagagcuggauggaaagcgaguuccggguguacagcagcgccaacaacugcaccuucgaguacgugucccagccuuuccugauggaccuggaaggcaagcagggcaacuucaagaaccugcgcgaguucguguuuaagaacaucgacggcuacuucaagaucuacagcaagcacaccccuaucaaccucgugcgggaucugccucagggcuucucugcucuggaaccccugguggaucugcccaucggcaucaacaucacccgguuucagacacugcuggcccugcacagaagcuaccugacaccuggcgauagcagcagcggauggacagcuggugccgccgcuuacuaugugggcuaccugcagccuagaaccuuccugcugaaguacaacgagaacggcaccaucaccgacgccguggauugugcucuggauccucugagcgagacaaagugcacccugaaguccuucaccguggaaaagggcaucuaccagaccagcaacuuccgggugcagcccaccgaauccaucgugcgguuccccaauaucaccaaucugugccccuucggcgagguguucaaugccaccagauucgccucuguguacgccuggaaccggaagcggaucagcaauugcguggccgacuacuccgugcuguacaacuccgccagcuucagcaccuucaagugcuacggcguguccccuaccaagcugaacgaccugugcuucacaaacguguacgccgacagcuucgugauccggggagaugaagugcggcagauugccccuggacagacaggcaagaucgccgacuacaacuacaagcugcccgacgacuucaccggcugugugauugccuggaacagcaacaaccuggacuccaaagucggcggcaacuacaauuaccuguaccggcuguuccggaaguccaaucugaagcccuucgagcgggacaucuccaccgagaucuaucaggccggcagcaccccuuguaacggcguggaaggcuucaacugcuacuucccacugcaguccuacggcuuucagcccacaaauggcgugggcuaucagcccuacagagugguggugcugagcuucgaacugcugcaugccccugccacagugugcggcccuaagaaaagcaccaaucucgugaagaacaaaugcgugaacuucaacuucaacggccugaccggcaccggcgugcugacagagagcaacaagaaguuccugccauuccagcaguuuggccgggauaucgccgauaccacagacgccguuagagauccccagacacuggaaauccuggacaucaccccuugcagcuucggcggagugucugugaucaccccuggcaccaacaccagcaaucagguggcagugcuguaccagggcgugaacuguaccgaagugcccguggccauucacgccgaucagcugacaccuacauggcggguguacuccaccggcagcaauguguuucagaccagagccggcugucugaucggagccgagcacgugaacaauagcuacgagugcgacauccccaucggcgcuggaaucugcgccagcuaccagacacagacaaacagcccucggagagccagaagcguggccagccagagcaucauugccuacacaaugucucugggcgccgagaacagcguggccuacuccaacaacucuaucgcuauccccaccaacuucaccaucagcgugaccacagagauccugccuguguccaugaccaagaccagcguggacugcaccauguacaucugcggcgauuccaccgagugcuccaaccugcugcugcaguacggcagcuucugcacccagcugaauagagcccugacagggaucgccguggaacaggacaagaacacccaagagguguucgcccaagugaagcagaucuacaagaccccuccuaucaaggacuucggcggcuucaauuucagccagauucugcccgauccuagcaagcccagcaagcggagcuucaucgaggaccugcuguucaacaaagugacacuggccgacgccggcuucaucaagcaguauggcgauugucugggcgacauugccgccagggaucugauuugcgcccagaaguuuaacggacugacagugcugccuccucugcugaccgaugagaugaucgcccaguacacaucugcccugcuggccggcacaaucacaagcggcuggacauuuggagcaggcgccgcucugcagauccccuuugcuaugcagauggccuaccgguucaacggcaucggagugacccagaaugugcuguacgagaaccagaagcugaucgccaaccaguucaacagcgccaucggcaagauccaggacagccugagcagcacagcaagcgcccugggaaagcugcaggacguggucaaccagaaugcccaggcacugaacacccuggucaagcagcuguccuccaacuucggcgccaucagcucugugcugaacgauauccugagcagacuggacccuccugaggccgaggugcagaucgacagacugaucacaggcagacugcagagccuccagacauacgugacccagcagcugaucagagccgccgagauuagagccucugccaaucuggccgccaccaagaugucugagugugugcugggccagagcaagagaguggacuuuugcggcaagggcuaccaccugaugagcuucccucagucugccccucacggcgugguguuucugcacgugacauaugugcccgcucaagagaagaauuucaccaccgcuccagccaucugccacgacggcaaagcccacuuuccuagagaaggcguguucguguccaacggcacccauugguucgugacacagcggaacuucuacgagccccagaucaucaccaccgacaacaccuucgugucuggcaacugcgacgucgugaucggcauugugaacaauaccguguacgacccucugcagcccgagcuggacagcuucaaagaggaacuggacaaguacuuuaagaaccacacaagccccgacguggaccugggcgauaucagcggaaucaaugccagcgucgugaacauccagaaagagaucgaccggcugaacgagguggccaagaaucugaacgagagccugaucgaccugcaagaacuggggaaguacgagcaguacaucaaguggcccugguacaucuggcugggcuuuaucgccggacugauugccaucgugaucgucacaaucaugcuguguugcaugaccagcugcuguagcugccugaagggcuguuguagcuguggcagcugcugcaaguucgacgaggacgauucugagcccgugcugaagggcgugaaacugcacuacacaugaggacuaguguccaccugucccuccugggcugcuggauugucucguuuuccugccaaauaaacaggaucagcgcuuuacagaucuaaaaaaaaaaaaaaaaaaaaaaaaaaaaaaaaaaaaaaaaaaaaaaaaaaaaaaaaaaaaaaaaaaaaaaaaaaaaaaaaaaaaaaaaaaaaaaaaaaaa

SEQ ID NO: 25377 - RNA, 4099 nt, Artificial Sequence
  SARS-CoV-2/Wuhan/WIV05/2019__EPI_ISL_402128 spike protein mRNA gc mod (1-1273)(K986P_V987P_H69del_V70del_A222V_Y453F_S477N_D614G_I692V)
aggagacccgugacccggaaguuguacggcuacgcgacuuucccucccacaaacccucgcgcccuuccuuuccuacuugggcccggcagaaagcuuaccauguucguguuccuggugcugcugccucugguguccagccagugugugaaccugaccaccagaacacagcugccuccagccuacaccaacagcuuuaccagaggcguguacuaccccgacaagguguucagauccagcgugcugcacucuacccaggaccuguuccugccuuucuucagcaacgugaccugguuccacgccaucuccggcaccaauggcaccaagagauucgacaaccccgugcugcccuucaacgacgggguguacuuugccagcaccgagaaguccaacaucaucagaggcuggaucuucggcaccacacuggacagcaagacccagagccugcugaucgugaacaacgccaccaacguggucaucaaagugugcgaguuccaguucugcaacgaccccuuccugggcgucuacuaccacaagaacaacaagagcuggauggaaagcgaguuccggguguacagcagcgccaacaacugcaccuucgaguacgugucccagccuuuccugauggaccuggaaggcaagcagggcaacuucaagaaccugcgcgaguucguguuuaagaacaucgacggcuacuucaagaucuacagcaagcacaccccuaucaaccucgugcgggaucugccucagggcuucucugugcuggaaccccugguggaucugcccaucggcaucaacaucacccgguuucagacacugcuggcccugcacagaagcuaccugacaccuggcgauagcagcagcggauggacagcuggugccgccgcuuacuaugugggcuaccugcagccuagaaccuuccugcugaaguacaacgagaacggcaccaucaccgacgccguggauugugcucuggauccucugagcgagacaaagugcacccugaaguccuucaccguggaaaagggcaucuaccagaccagcaacuuccgggugcagcccaccgaauccaucgugcgguuccccaauaucaccaaucugugccccuucggcgagguguucaaugccaccagauucgccucuguguacgccuggaaccggaagcggaucagcaauugcguggccgacuacuccgugcuguacaacuccgccagcuucagcaccuucaagugcuacggcguguccccuaccaagcugaacgaccugugcuucacaaacguguacgccgacagcuucgugauccggggagaugaagugcggcagauugccccuggacagacaggcaagaucgccgacuacaacuacaagcugcccgacgacuucaccggcugugugauugccuggaacagcaacaaccuggacuccaaagucggcggcaacuacaauuaccuguuccggcuguuccggaaguccaaucugaagcccuucgagcgggacaucuccaccgagaucuaucaggccggcaacaccccuuguaacggcguggaaggcuucaacugcuacuucccacugcaguccuacggcuuucagcccacaaauggcgugggcuaucagcccuacagagugguggugcugagcuucgaacugcugcaugccccugccacagugugcggcccuaagaaaagcaccaaucucgugaagaacaaaugcgugaacuucaacuucaacggccugaccggcaccggcgugcugacagagagcaacaagaaguuccugccauuccagcaguuuggccgggauaucgccgauaccacagacgccguuagagauccccagacacuggaaauccuggacaucaccccuugcagcuucggcggagugucugugaucaccccuggcaccaacaccagcaaucagguggcagugcuguaccagggcgugaacuguaccgaagugcccguggccauucacgccgaucagcugacaccuacauggcggguguacuccaccggcagcaauguguuucagaccagagccggcugucugaucggagccgagcacgugaacaauagcuacgagugcgacauccccaucggcgcuggaaucugcgccagcuaccagacacagacaaacagcccucggagagccagaagcguggccagccagagcgugauugccuacacaaugucucugggcgccgagaacagcguggccuacuccaacaacucuaucgcuauccccaccaacuucaccaucagcgugaccacagagauccugccuguguccaugaccaagaccagcguggacugcaccauguacaucugcggcgauuccaccgagugcuccaaccugcugcugcaguacggcagcuucugcacccagcugaauagagcccugacagggaucgccguggaacaggacaagaacacccaagagguguucgcccaagugaagcagaucuacaagaccccuccuaucaaggacuucggcggcuucaauuucagccagauucugcccgauccuagcaagcccagcaagcggagcuucaucgaggaccugcuguucaacaaagugacacuggccgacgccggcuucaucaagcaguauggcgauugucugggcgacauugccgccagggaucugauuugcgcccagaaguuuaacggacugacagugcugccuccucugcugaccgaugagaugaucgcccaguacacaucugcccugcuggccggcacaaucacaagcggcuggacauuuggagcaggcgccgcucugcagauccccuuugcuaugcagauggccuaccgguucaacggcaucggagugacccagaaugugcuguacgagaaccagaagcugaucgccaaccaguucaacagcgccaucggcaagauccaggacagccugagcagcacagcaagcgcccugggaaagcugcaggacguggucaaccagaaugcccaggcacugaacacccuggucaagcagcuguccuccaacuucggcgccaucagcucugugcugaacgauauccugagcagacuggacccuccugaggccgaggugcagaucgacagacugaucacaggcagacugcagagccuccagacauacgugacccagcagcugaucagagccgccgagauuagagccucugccaaucuggccgccaccaagaugucugagugugugcugggccagagcaagagaguggacuuuugcggcaagggcuaccaccugaugagcuucccucagucugccccucacggcgugguguuucugcacgugacauaugugcccgcucaagagaagaauuucaccaccgcuccagccaucugccacgacggcaaagcccacuuuccuagagaaggcguguucguguccaacggcacccauugguucgugacacagcggaacuucuacgagccccagaucaucaccaccgacaacaccuucgugucuggcaacugcgacgucgugaucggcauugugaacaauaccguguacgacccucugcagcccgagcuggacagcuucaaagaggaacuggacaaguacuuuaagaaccacacaagccccgacguggaccugggcgauaucagcggaaucaaugccagcgucgugaacauccagaaagagaucgaccggcugaacgagguggccaagaaucugaacgagagccugaucgaccugcaagaacuggggaaguacgagcaguacaucaaguggcccugguacaucuggcugggcuuuaucgccggacugauugccaucgugauggucacaaucaugcuguguugcaugaccagcugcuguagcugccugaagggcuguuguagcuguggcagcugcugcaaguucgacgaggacgauucugagcccgugcugaagggcgugaaacugcacuacacaugaggacuaguguccaccugucccuccugggcugcuggauugucucguuuuccugccaaauaaacaggaucagcgcuuuacagaucuaaaaaaaaaaaaaaaaaaaaaaaaaaaaaaaaaaaaaaaaaaaaaaaaaaaaaaaaaaaaaaaaaaaaaaaaaaaaaaaaaaaaaaaaaaaaaaaaaaaa

SEQ ID NO: 25378 - RNA, 4099 nt, Artificial Sequence
  SARS-CoV-2/Wuhan/WIV05/2019__EPI_ISL_402128 spike protein mRNA gc mod (1-1273)(K986P_V987P_H69del_V70del_Y453F_D614G_I692V_M1229I)
aggagacccgugacccggaaguuguacggcuacgcgacuuucccucccacaaacccucgcgcccuuccuuuccuacuugggcccggcagaaagcuuaccauguucguguuccuggugcugcugccucugguguccagccagugugugaaccugaccaccagaacacagcugccuccagccuacaccaacagcuuuaccagaggcguguacuaccccgacaagguguucagauccagcgugcugcacucuacccaggaccuguuccugccuuucuucagcaacgugaccugguuccacgccaucuccggcaccaauggcaccaagagauucgacaaccccgugcugcccuucaacgacgggguguacuuugccagcaccgagaaguccaacaucaucagaggcuggaucuucggcaccacacuggacagcaagacccagagccugcugaucgugaacaacgccaccaacguggucaucaaagugugcgaguuccaguucugcaacgaccccuuccugggcgucuacuaccacaagaacaacaagagcuggauggaaagcgaguuccggguguacagcagcgccaacaacugcaccuucgaguacgugucccagccuuuccugauggaccuggaaggcaagcagggcaacuucaagaaccugcgcgaguucguguuuaagaacaucgacggcuacuucaagaucuacagcaagcacaccccuaucaaccucgugcgggaucugccucagggcuucucugcucuggaaccccugguggaucugcccaucggcaucaacaucacccgguuucagacacugcuggcccugcacagaagcuaccugacaccuggcgauagcagcagcggauggacagcuggugccgccgcuuacuaugugggcuaccugcagccuagaaccuuccugcugaaguacaacgagaacggcaccaucaccgacgccguggauugugcucuggauccucugagcgagacaaagugcacccugaaguccuucaccguggaaaagggcaucuaccagaccagcaacuuccgggugcagcccaccgaauccaucgugcgguuccccaauaucaccaaucugugccccuucggcgagguguucaaugccaccagauucgccucuguguacgccuggaaccggaagcggaucagcaauugcguggccgacuacuccgugcuguacaacuccgccagcuucagcaccuucaagugcuacggcguguccccuaccaagcugaacgaccugugcuucacaaacguguacgccgacagcuucgugauccggggagaugaagugcggcagauugccccuggacagacaggcaagaucgccgacuacaacuacaagcugcccgacgacuucaccggcugugugauugccuggaacagcaacaaccuggacuccaaagucggcggcaacuacaauuaccuguuccggcuguuccggaaguccaaucugaagcccuucgagcgggacaucuccaccgagaucuaucaggccggcagcaccccuuguaacggcguggaaggcuucaacugcuacuucccacugcaguccuacggcuuucagcccacaaauggcgugggcuaucagcccuacagagugguggugcugagcuucgaacugcugcaugccccugccacagugugcggcccuaagaaaagcaccaaucucgugaagaacaaaugcgugaacuucaacuucaacggccugaccggcaccggcgugcugacagagagcaacaagaaguuccugccauuccagcaguuuggccgggauaucgccgauaccacagacgccguuagagauccccagacacuggaaauccuggacaucaccccuugcagcuucggcggagugucugugaucaccccuggcaccaacaccagcaaucagguggcagugcuguaccagggcgugaacuguaccgaagugcccguggccauucacgccgaucagcugacaccuacauggcggguguacuccaccggcagcaauguguuucagaccagagccggcugucugaucggagccgagcacgugaacaauagcuacgagugcgacauccccaucggcgcuggaaucugcgccagcuaccagacacagacaaacagcccucggagagccagaagcguggccagccagagcgugauugccuacacaaugucucugggcgccgagaacagcguggccuacuccaacaacucuaucgcuauccccaccaacuucaccaucagcgugaccacagagauccugccuguguccaugaccaagaccagcguggacugcaccauguacaucugcggcgauuccaccgagugcuccaaccugcugcugcaguacggcagcuucugcacccagcugaauagagcccugacagggaucgccguggaacaggacaagaacacccaagagguguucgcccaagugaagcagaucuacaagaccccuccuaucaaggacuucggcggcuucaauuucagccagauucugcccgauccuagcaagcccagcaagcggagcuucaucgaggaccugcuguucaacaaagugacacuggccgacgccggcuucaucaagcaguauggcgauugucugggcgacauugccgccagggaucugauuugcgcccagaaguuuaacggacugacagugcugccuccucugcugaccgaugagaugaucgcccaguacacaucugcccugcuggccggcacaaucacaagcggcuggacauuuggagcaggcgccgcucugcagauccccuuugcuaugcagauggccuaccgguucaacggcaucggagugacccagaaugugcuguacgagaaccagaagcugaucgccaaccaguucaacagcgccaucggcaagauccaggacagccugagcagcacagcaagcgcccugggaaagcugcaggacguggucaaccagaaugcccaggcacugaacacccuggucaagcagcuguccuccaacuucggcgccaucagcucugugcugaacgauauccugagcagacuggacccuccugaggccgaggugcagaucgacagacugaucacaggcagacugcagagccuccagacauacgugacccagcagcugaucagagccgccgagauuagagccucugccaaucuggccgccaccaagaugucugagugugugcugggccagagcaagagaguggacuuuugcggcaagggcuaccaccugaugagcuucccucagucugccccucacggcgugguguuucugcacgugacauaugugcccgcucaagagaagaauuucaccaccgcuccagccaucugccacgacggcaaagcccacuuuccuagagaaggcguguucguguccaacggcacccauugguucgugacacagcggaacuucuacgagccccagaucaucaccaccgacaacaccuucgugucuggcaacugcgacgucgugaucggcauugugaacaauaccguguacgacccucugcagcccgagcuggacagcuucaaagaggaacuggacaaguacuuuaagaaccacacaagccccgacguggaccugggcgauaucagcggaaucaaugccagcgucgugaacauccagaaagagaucgaccggcugaacgagguggccaagaaucugaacgagagccugaucgaccugcaagaacuggggaaguacgagcaguacaucaaguggcccugguacaucuggcugggcuuuaucgccggacugauugccaucgugaucgucacaaucaugcuguguugcaugaccagcugcuguagcugccugaagggcuguuguagcuguggcagcugcugcaaguucgacgaggacgauucugagcccgugcugaagggcgugaaacugcacuacacaugaggacuaguguccaccugucccuccugggcugcuggauugucucguuuuccugccaaauaaacaggaucagcgcuuuacagaucuaaaaaaaaaaaaaaaaaaaaaaaaaaaaaaaaaaaaaaaaaaaaaaaaaaaaaaaaaaaaaaaaaaaaaaaaaaaaaaaaaaaaaaaaaaaaaaaaaaaa

SEQ ID NO: 25379 - RNA, 4096 nt, Artificial Sequence
  SARS-CoV-2/Wuhan/WIV05/2019__EPI_ISL_402128 spike protein mRNA gc mod (1-1273)(K986P_V987P_K986P_V987P_H69del_V70del_Y144del_N501Y_A570 D_D614G_P681H_T716I_S982A_D1118H)
aggagacccgugacccggaaguuguacggcuacgcgacuuucccucccacaaacccucgcgcccuuccuuuccuacuugggcccggcagaaagcuuaccauguucguguuccuggugcugcugccucugguguccagccagugugugaaccugaccaccagaacacagcugccuccagccuacaccaacagcuuuaccagaggcguguacuaccccgacaagguguucagauccagcgugcugcacucuacccaggaccuguuccugccuuucuucagcaacgugaccugguuccacgccaucuccggcaccaauggcaccaagagauucgacaaccccgugcugcccuucaacgacgggguguacuuugccagcaccgagaaguccaacaucaucagaggcuggaucuucggcaccacacuggacagcaagacccagagccugcugaucgugaacaacgccaccaacguggucaucaaagugugcgaguuccaguucugcaacgaccccuuccugggcgucuaccacaagaacaacaagagcuggauggaaagcgaguuccggguguacagcagcgccaacaacugcaccuucgaguacgugucccagccuuuccugauggaccuggaaggcaagcagggcaacuucaagaaccugcgcgaguucguguuuaagaacaucgacggcuacuucaagaucuacagcaagcacaccccuaucaaccucgugcgggaucugccucagggcuucucugcucuggaaccccugguggaucugcccaucggcaucaacaucacccgguuucagacacugcuggcccugcacagaagcuaccugacaccuggcgauagcagcagcggauggacagcuggugccgccgcuuacuaugugggcuaccugcagccuagaaccuuccugcugaaguacaacgagaacggcaccaucaccgacgccguggauugugcucuggauccucugagcgagacaaagugcacccugaaguccuucaccguggaaaagggcaucuaccagaccagcaacuuccgggugcagcccaccgaauccaucgugcgguuccccaauaucaccaaucugugccccuucggcgagguguucaaugccaccagauucgccucuguguacgccuggaaccggaagcggaucagcaauugcguggccgacuacuccgugcuguacaacuccgccagcuucagcaccuucaagugcuacggcguguccccuaccaagcugaacgaccugugcuucacaaacguguacgccgacagcuucgugauccggggagaugaagugcggcagauugccccuggacagacaggcaagaucgccgacuacaacuacaagcugcccgacgacuucaccggcugugugauugccuggaacagcaacaaccuggacuccaaagucggcggcaacuacaauuaccuguaccggcuguuccggaaguccaaucugaagcccuucgagcgggacaucuccaccgagaucuaucaggccggcagcaccccuuguaacggcguggaaggcuucaacugcuacuucccacugcaguccuacggcuuucagcccacauacggcgugggcuaucagcccuacagagugguggugcugagcuucgaacugcugcaugccccugccacagugugcggcccuaagaaaagcaccaaucucgugaagaacaaaugcgugaacuucaacuucaacggccugaccggcaccggcgugcugacagagagcaacaagaaguuccugccauuccagcaguuuggccgggauaucgacgauaccacagacgccguuagagauccccagacacuggaaauccuggacaucaccccuugcagcuucggcggagugucugugaucaccccuggcaccaacaccagcaaucagguggcagugcuguaccagggcgugaacuguaccgaagugcccguggccauucacgccgaucagcugacaccuacauggcggguguacuccaccggcagcaauguguuucagaccagagccggcugucugaucggagccgagcacgugaacaauagcuacgagugcgacauccccaucggcgcuggaaucugcgccagcuaccagacacagacaaacagccaccggagagccagaagcguggccagccagagcaucauugccuacacaaugucucugggcgccgagaacagcguggccuacuccaacaacucuaucgcuauccccaucaacuucaccaucagcgugaccacagagauccugccuguguccaugaccaagaccagcguggacugcaccauguacaucugcggcgauuccaccgagugcuccaaccugcugcugcaguacggcagcuucugcacccagcugaauagagcccugacagggaucgccguggaacaggacaagaacacccaagagguguucgcccaagugaagcagaucuacaagaccccuccuaucaaggacuucggcggcuucaauuucagccagauucugcccgauccuagcaagcccagcaagcggagcuucaucgaggaccugcuguucaacaaagugacacuggccgacgccggcuucaucaagcaguauggcgauugucugggcgacauugccgccagggaucugauuugcgcccagaaguuuaacggacugacagugcugccuccucugcugaccgaugagaugaucgcccaguacacaucugcccugcuggccggcacaaucacaagcggcuggacauuuggagcaggcgccgcucugcagauccccuuugcuaugcagauggccuaccgguucaacggcaucggagugacccagaaugugcuguacgagaaccagaagcugaucgccaaccaguucaacagcgccaucggcaagauccaggacagccugagcagcacagcaagcgcccugggaaagcugcaggacguggucaaccagaaugcccaggcacugaacacccuggucaagcagcuguccuccaacuucggcgccaucagcucugugcugaacgauauccuggccagacuggacccuccugaggccgaggugcagaucgacagacugaucacaggcagacugcagagccuccagacauacgugacccagcagcugaucagagccgccgagauuagagccucugccaaucuggccgccaccaagaugucugagugugugcugggccagagcaagagaguggacuuuugcggcaagggcuaccaccugaugagcuucccucagucugccccucacggcgugguguuucugcacgugacauaugugcccgcucaagagaagaauuucaccaccgcuccagccaucugccacgacggcaaagcccacuuuccuagagaaggcguguucguguccaacggcacccauugguucgugacacagcggaacuucuacgagccccagaucaucaccacccacaacaccuucgugucuggcaacugcgacgucgugaucggcauugugaacaauaccguguacgacccucugcagcccgagcuggacagcuucaaagaggaacuggacaaguacuuuaagaaccacacaagccccgacguggaccugggcgauaucagcggaaucaaugccagcgucgugaacauccagaaagagaucgaccggcugaacgagguggccaagaaucugaacgagagccugaucgaccugcaagaacuggggaaguacgagcaguacaucaaguggcccugguacaucuggcugggcuuuaucgccggacugauugccaucgugauggucacaaucaugcuguguugcaugaccagcugcuguagcugccugaagggcuguuguagcuguggcagcugcugcaaguucgacgaggacgauucugagcccgugcugaagggcgugaaacugcacuacacaugaggacuaguguccaccugucccuccugggcugcuggauugucucguuuuccugccaaauaaacaggaucagcgcuuuacagaucuaaaaaaaaaaaaaaaaaaaaaaaaaaaaaaaaaaaaaaaaaaaaaaaaaaaaaaaaaaaaaaaaaaaaaaaaaaaaaaaaaaaaaaaaaaaaaaaaaaaa

SEQ ID NO: 25380 - RNA, 4105 nt, Artificial Sequence
  SARS-CoV-2/Wuhan/WIV05/2019__EPI_ISL_402128 spike protein mRNA gc mod (1-1273)(K986P_V987P_K986P_V987P_K417N_E484K_N501Y_D614G)
aggagacccgugacccggaaguuguacggcuacgcgacuuucccucccacaaacccucgcgcccuuccuuuccuacuugggcccggcagaaagcuuaccauguucguguuccuggugcugcugccucugguguccagccagugugugaaccugaccaccagaacacagcugccuccagccuacaccaacagcuuuaccagaggcguguacuaccccgacaagguguucagauccagcgugcugcacucuacccaggaccuguuccugccuuucuucagcaacgugaccugguuccacgccauccacguguccggcaccaauggcaccaagagauucgacaaccccgugcugcccuucaacgacgggguguacuuugccagcaccgagaaguccaacaucaucagaggcuggaucuucggcaccacacuggacagcaagacccagagccugcugaucgugaacaacgccaccaacguggucaucaaagugugcgaguuccaguucugcaacgaccccuuccugggcgucuacuaccacaagaacaacaagagcuggauggaaagcgaguuccggguguacagcagcgccaacaacugcaccuucgaguacgugucccagccuuuccugauggaccuggaaggcaagcagggcaacuucaagaaccugcgcgaguucguguuuaagaacaucgacggcuacuucaagaucuacagcaagcacaccccuaucaaccucgugcgggaucugccucagggcuucucugcucuggaaccccugguggaucugcccaucggcaucaacaucacccgguuucagacacugcuggcccugcacagaagcuaccugacaccuggcgauagcagcagcggauggacagcuggugccgccgcuuacuaugugggcuaccugcagccuagaaccuuccugcugaaguacaacgagaacggcaccaucaccgacgccguggauugugcucuggauccucugagcgagacaaagugcacccugaaguccuucaccguggaaaagggcaucuaccagaccagcaacuuccgggugcagcccaccgaauccaucgugcgguuccccaauaucaccaaucugugccccuucggcgagguguucaaugccaccagauucgccucuguguacgccuggaaccggaagcggaucagcaauugcguggccgacuacuccgugcuguacaacuccgccagcuucagcaccuucaagugcuacggcguguccccuaccaagcugaacgaccugugcuucacaaacguguacgccgacagcuucgugauccggggagaugaagugcggcagauugccccuggacagacaggcaacaucgccgacuacaacuacaagcugcccgacgacuucaccggcugugugauugccuggaacagcaacaaccuggacuccaaagucggcggcaacuacaauuaccuguaccggcuguuccggaaguccaaucugaagcccuucgagcgggacaucuccaccgagaucuaucaggccggcagcaccccuuguaacggcgugaagggcuucaacugcuacuucccacugcaguccuacggcuuucagcccacauacggcgugggcuaucagcccuacagagugguggugcugagcuucgaacugcugcaugccccugccacagugugcggcccuaagaaaagcaccaaucucgugaagaacaaaugcgugaacuucaacuucaacggccugaccggcaccggcgugcugacagagagcaacaagaaguuccugccauuccagcaguuuggccgggauaucgccgauaccacagacgccguuagagauccccagacacuggaaauccuggacaucaccccuugcagcuucggcggagugucugugaucaccccuggcaccaacaccagcaaucagguggcagugcuguaccagggcgugaacuguaccgaagugcccguggccauucacgccgaucagcugacaccuacauggcggguguacuccaccggcagcaauguguuucagaccagagccggcugucugaucggagccgagcacgugaacaauagcuacgagugcgacauccccaucggcgcuggaaucugcgccagcuaccagacacagacaaacagcccucggagagccagaagcguggccagccagagcaucauugccuacacaaugucucugggcgccgagaacagcguggccuacuccaacaacucuaucgcuauccccaccaacuucaccaucagcgugaccacagagauccugccuguguccaugaccaagaccagcguggacugcaccauguacaucugcggcgauuccaccgagugcuccaaccugcugcugcaguacggcagcuucugcacccagcugaauagagcccugacagggaucgccguggaacaggacaagaacacccaagagguguucgcccaagugaagcagaucuacaagaccccuccuaucaaggacuucggcggcuucaauuucagccagauucugcccgauccuagcaagcccagcaagcggagcuucaucgaggaccugcuguucaacaaagugacacuggccgacgccggcuucaucaagcaguauggcgauugucugggcgacauugccgccagggaucugauuugcgcccagaaguuuaacggacugacagugcugccuccucugcugaccgaugagaugaucgcccaguacacaucugcccugcuggccggcacaaucacaagcggcuggacauuuggagcaggcgccgcucugcagauccccuuugcuaugcagauggccuaccgguucaacggcaucggagugacccagaaugugcuguacgagaaccagaagcugaucgccaaccaguucaacagcgccaucggcaagauccaggacagccugagcagcacagcaagcgcccugggaaagcugcaggacguggucaaccagaaugcccaggcacugaacacccuggucaagcagcuguccuccaacuucggcgccaucagcucugugcugaacgauauccugagcagacuggacccuccugaggccgaggugcagaucgacagacugaucacaggcagacugcagagccuccagacauacgugacccagcagcugaucagagccgccgagauuagagccucugccaaucuggccgccaccaagaugucugagugugugcugggccagagcaagagaguggacuuuugcggcaagggcuaccaccugaugagcuucccucagucugccccucacggcgugguguuucugcacgugacauaugugcccgcucaagagaagaauuucaccaccgcuccagccaucugccacgacggcaaagcccacuuuccuagagaaggcguguucguguccaacggcacccauugguucgugacacagcggaacuucuacgagccccagaucaucaccaccgacaacaccuucgugucuggcaacugcgacgucgugaucggcauugugaacaauaccguguacgacccucugcagcccgagcuggacagcuucaaagaggaacuggacaaguacuuuaagaaccacacaagccccgacguggaccugggcgauaucagcggaaucaaugccagcgucgugaacauccagaaagagaucgaccggcugaacgagguggccaagaaucugaacgagagccugaucgaccugcaagaacuggggaaguacgagcaguacaucaaguggcccugguacaucuggcugggcuuuaucgccggacugauugccaucgugauggucacaaucaugcuguguugcaugaccagcugcuguagcugccugaagggcuguuguagcuguggcagcugcugcaaguucgacgaggacgauucugagcccgugcugaagggcgugaaacugcacuacacaugaggacuaguguccaccugucccuccugggcugcuggauugucucguuuuccugccaaauaaacaggaucagcgcuuuacagaucuaaaaaaaaaaaaaaaaaaaaaaaaaaaaaaaaaaaaaaaaaaaaaaaaaaaaaaaaaaaaaaaaaaaaaaaaaaaaaaaaaaaaaaaaaaaaaaaaaaaa

SEQ ID NO: 25381 - RNA, 4096 nt, Artificial Sequence
  SARS-CoV-2/Wuhan/WIV05/2019__EPI_ISL_402128 spike protein mRNA gc mod (1-1273)(K986P_V987P_K986P_V987P_L18F_D80A_D215G_L242del_A243del_ L244del_R246I_K417N_E484K_N501Y_D614G_A701V)
aggagacccgugacccggaaguuguacggcuacgcgacuuucccucccacaaacccucgcgcccuuccuuuccuacuugggcccggcagaaagcuuaccauguucguguuccuggugcugcugccucugguguccagccagugugugaacuucaccaccagaacacagcugccuccagccuacaccaacagcuuuaccagaggcguguacuaccccgacaagguguucagauccagcgugcugcacucuacccaggaccuguuccugccuuucuucagcaacgugaccugguuccacgccauccacguguccggcaccaauggcaccaagagauucgccaaccccgugcugcccuucaacgacgggguguacuuugccagcaccgagaaguccaacaucaucagaggcuggaucuucggcaccacacuggacagcaagacccagagccugcugaucgugaacaacgccaccaacguggucaucaaagugugcgaguuccaguucugcaacgaccccuuccugggcgucuacuaccacaagaacaacaagagcuggauggaaagcgaguuccggguguacagcagcgccaacaacugcaccuucgaguacgugucccagccuuuccugauggaccuggaaggcaagcagggcaacuucaagaaccugcgcgaguucguguuuaagaacaucgacggcuacuucaagaucuacagcaagcacaccccuaucaaccucgugcggggccugccucagggcuucucugcucuggaaccccugguggaucugcccaucggcaucaacaucacccgguuucagacacugcacaucagcuaccugacaccuggcgauagcagcagcggauggacagcuggugccgccgcuuacuaugugggcuaccugcagccuagaaccuuccugcugaaguacaacgagaacggcaccaucaccgacgccguggauugugcucuggauccucugagcgagacaaagugcacccugaaguccuucaccguggaaaagggcaucuaccagaccagcaacuuccgggugcagcccaccgaauccaucgugcgguuccccaauaucaccaaucugugccccuucggcgagguguucaaugccaccagauucgccucuguguacgccuggaaccggaagcggaucagcaauugcguggccgacuacuccgugcuguacaacuccgccagcuucagcaccuucaagugcuacggcguguccccuaccaagcugaacgaccugugcuucacaaacguguacgccgacagcuucgugauccggggagaugaagugcggcagauugccccuggacagacaggcaacaucgccgacuacaacuacaagcugcccgacgacuucaccggcugugugauugccuggaacagcaacaaccuggacuccaaagucggcggcaacuacaauuaccuguaccggcuguuccggaaguccaaucugaagcccuucgagcgggacaucuccaccgagaucuaucaggccggcagcaccccuuguaacggcgugaagggcuucaacugcuacuucccacugcaguccuacggcuuucagcccacauacggcgugggcuaucagcccuacagagugguggugcugagcuucgaacugcugcaugccccugccacagugugcggcccuaagaaaagcaccaaucucgugaagaacaaaugcgugaacuucaacuucaacggccugaccggcaccggcgugcugacagagagcaacaagaaguuccugccauuccagcaguuuggccgggauaucgccgauaccacagacgccguuagagauccccagacacuggaaauccuggacaucaccccuugcagcuucggcggagugucugugaucaccccuggcaccaacaccagcaaucagguggcagugcuguaccagggcgugaacuguaccgaagugcccguggccauucacgccgaucagcugacaccuacauggcggguguacuccaccggcagcaauguguuucagaccagagccggcugucugaucggagccgagcacgugaacaauagcuacgagugcgacauccccaucggcgcuggaaucugcgccagcuaccagacacagacaaacagcccucggagagccagaagcguggccagccagagcaucauugccuacacaaugucucugggcguggagaacagcguggccuacuccaacaacucuaucgcuauccccaccaacuucaccaucagcgugaccacagagauccugccuguguccaugaccaagaccagcguggacugcaccauguacaucugcggcgauuccaccgagugcuccaaccugcugcugcaguacggcagcuucugcacccagcugaauagagcccugacagggaucgccguggaacaggacaagaacacccaagagguguucgcccaagugaagcagaucuacaagaccccuccuaucaaggacuucggcggcuucaauuucagccagauucugcccgauccuagcaagcccagcaagcggagcuucaucgaggaccugcuguucaacaaagugacacuggccgacgccggcuucaucaagcaguauggcgauugucugggcgacauugccgccagggaucugauuugcgcccagaaguuuaacggacugacagugcugccuccucugcugaccgaugagaugaucgcccaguacacaucugcccugcuggccggcacaaucacaagcggcuggacauuuggagcaggcgccgcucugcagauccccuuugcuaugcagauggccuaccgguucaacggcaucggagugacccagaaugugcuguacgagaaccagaagcugaucgccaaccaguucaacagcgccaucggcaagauccaggacagccugagcagcacagcaagcgcccugggaaagcugcaggacguggucaaccagaaugcccaggcacugaacacccuggucaagcagcuguccuccaacuucggcgccaucagcucugugcugaacgauauccugagcagacuggacccuccugaggccgaggugcagaucgacagacugaucacaggcagacugcagagccuccagacauacgugacccagcagcugaucagagccgccgagauuagagccucugccaaucuggccgccaccaagaugucugagugugugcugggccagagcaagagaguggacuuuugcggcaagggcuaccaccugaugagcuucccucagucugccccucacggcgugguguuucugcacgugacauaugugcccgcucaagagaagaauuucaccaccgcuccagccaucugccacgacggcaaagcccacuuuccuagagaaggcguguucguguccaacggcacccauugguucgugacacagcggaacuucuacgagccccagaucaucaccaccgacaacaccuucgugucuggcaacugcgacgucgugaucggcauugugaacaauaccguguacgacccucugcagcccgagcuggacagcuucaaagaggaacuggacaaguacuuuaagaaccacacaagccccgacguggaccugggcgauaucagcggaaucaaugccagcgucgugaacauccagaaagagaucgaccggcugaacgagguggccaagaaucugaacgagagccugaucgaccugcaagaacuggggaaguacgagcaguacaucaaguggcccugguacaucuggcugggcuuuaucgccggacugauugccaucgugauggucacaaucaugcuguguugcaugaccagcugcuguagcugccugaagggcuguuguagcuguggcagcugcugcaaguucgacgaggacgauucugagcccgugcugaagggcgugaaacugcacuacacaugaggacuaguguccaccugucccuccugggcugcuggauugucucguuuuccugccaaauaaacaggaucagcgcuuuacagaucuaaaaaaaaaaaaaaaaaaaaaaaaaaaaaaaaaaaaaaaaaaaaaaaaaaaaaaaaaaaaaaaaaaaaaaaaaaaaaaaaaaaaaaaaaaaaaaaaaaaa

SEQ ID NO: 25382 - RNA, 4105 nt, Artificial Sequence
  SARS-CoV-2/Wuhan/WIV05/2019__EPI_ISL_402128 spike protein mRNA gc mod (1-1273)(K986P_V987P_K986P_V987P_E484K_D614G)
aggagacccgugacccggaaguuguacggcuacgcgacuuucccucccacaaacccucgcgcccuuccuuuccuacuugggcccggcagaaagcuuaccauguucguguuccuggugcugcugccucugguguccagccagugugugaaccugaccaccagaacacagcugccuccagccuacaccaacagcuuuaccagaggcguguacuaccccgacaagguguucagauccagcgugcugcacucuacccaggaccuguuccugccuuucuucagcaacgugaccugguuccacgccauccacguguccggcaccaauggcaccaagagauucgacaaccccgugcugcccuucaacgacgggguguacuuugccagcaccgagaaguccaacaucaucagaggcuggaucuucggcaccacacuggacagcaagacccagagccugcugaucgugaacaacgccaccaacguggucaucaaagugugcgaguuccaguucugcaacgaccccuuccugggcgucuacuaccacaagaacaacaagagcuggauggaaagcgaguuccggguguacagcagcgccaacaacugcaccuucgaguacgugucccagccuuuccugauggaccuggaaggcaagcagggcaacuucaagaaccugcgcgaguucguguuuaagaacaucgacggcuacuucaagaucuacagcaagcacaccccuaucaaccucgugcgggaucugccucagggcuucucugcucuggaaccccugguggaucugcccaucggcaucaacaucacccgguuucagacacugcuggcccugcacagaagcuaccugacaccuggcgauagcagcagcggauggacagcuggugccgccgcuuacuaugugggcuaccugcagccuagaaccuuccugcugaaguacaacgagaacggcaccaucaccgacgccguggauugugcucuggauccucugagcgagacaaagugcacccugaaguccuucaccguggaaaagggcaucuaccagaccagcaacuuccgggugcagcccaccgaauccaucgugcgguuccccaauaucaccaaucugugccccuucggcgagguguucaaugccaccagauucgccucuguguacgccuggaaccggaagcggaucagcaauugcguggccgacuacuccgugcuguacaacuccgccagcuucagcaccuucaagugcuacggcguguccccuaccaagcugaacgaccugugcuucacaaacguguacgccgacagcuucgugauccggggagaugaagugcggcagauugccccuggacagacaggcaagaucgccgacuacaacuacaagcugcccgacgacuucaccggcugugugauugccuggaacagcaacaaccuggacuccaaagucggcggcaacuacaauuaccuguaccggcuguuccggaaguccaaucugaagcccuucgagcgggacaucuccaccgagaucuaucaggccggcagcaccccuuguaacggcgugaagggcuucaacugcuacuucccacugcaguccuacggcuuucagcccacaaauggcgugggcuaucagcccuacagagugguggugcugagcuucgaacugcugcaugccccugccacagugugcggcccuaagaaaagcaccaaucucgugaagaacaaaugcgugaacuucaacuucaacggccugaccggcaccggcgugcugacagagagcaacaagaaguuccugccauuccagcaguuuggccgggauaucgccgauaccacagacgccguuagagauccccagacacuggaaauccuggacaucaccccuugcagcuucggcggagugucugugaucaccccuggcaccaacaccagcaaucagguggcagugcuguaccagggcgugaacuguaccgaagugcccguggccauucacgccgaucagcugacaccuacauggcggguguacuccaccggcagcaauguguuucagaccagagccggcugucugaucggagccgagcacgugaacaauagcuacgagugcgacauccccaucggcgcuggaaucugcgccagcuaccagacacagacaaacagcccucggagagccagaagcguggccagccagagcaucauugccuacacaaugucucugggcgccgagaacagcguggccuacuccaacaacucuaucgcuauccccaccaacuucaccaucagcgugaccacagagauccugccuguguccaugaccaagaccagcguggacugcaccauguacaucugcggcgauuccaccgagugcuccaaccugcugcugcaguacggcagcuucugcacccagcugaauagagcccugacagggaucgccguggaacaggacaagaacacccaagagguguucgcccaagugaagcagaucuacaagaccccuccuaucaaggacuucggcggcuucaauuucagccagauucugcccgauccuagcaagcccagcaagcggagcuucaucgaggaccugcuguucaacaaagugacacuggccgacgccggcuucaucaagcaguauggcgauugucugggcgacauugccgccagggaucugauuugcgcccagaaguuuaacggacugacagugcugccuccucugcugaccgaugagaugaucgcccaguacacaucugcccugcuggccggcacaaucacaagcggcuggacauuuggagcaggcgccgcucugcagauccccuuugcuaugcagauggccuaccgguucaacggcaucggagugacccagaaugugcuguacgagaaccagaagcugaucgccaaccaguucaacagcgccaucggcaagauccaggacagccugagcagcacagcaagcgcccugggaaagcugcaggacguggucaaccagaaugcccaggcacugaacacccuggucaagcagcuguccuccaacuucggcgccaucagcucugugcugaacgauauccugagcagacuggacccuccugaggccgaggugcagaucgacagacugaucacaggcagacugcagagccuccagacauacgugacccagcagcugaucagagccgccgagauuagagccucugccaaucuggccgccaccaagaugucugagugugugcugggccagagcaagagaguggacuuuugcggcaagggcuaccaccugaugagcuucccucagucugccccucacggcgugguguuucugcacgugacauaugugcccgcucaagagaagaauuucaccaccgcuccagccaucugccacgacggcaaagcccacuuuccuagagaaggcguguucguguccaacggcacccauugguucgugacacagcggaacuucuacgagccccagaucaucaccaccgacaacaccuucgugucuggcaacugcgacgucgugaucggcauugugaacaauaccguguacgacccucugcagcccgagcuggacagcuucaaagaggaacuggacaaguacuuuaagaaccacacaagccccgacguggaccugggcgauaucagcggaaucaaugccagcgucgugaacauccagaaagagaucgaccggcugaacgagguggccaagaaucugaacgagagccugaucgaccugcaagaacuggggaaguacgagcaguacaucaaguggcccugguacaucuggcugggcuuuaucgccggacugauugccaucgugauggucacaaucaugcuguguugcaugaccagcugcuguagcugccugaagggcuguuguagcuguggcagcugcugcaaguucgacgaggacgauucugagcccgugcugaagggcgugaaacugcacuacacaugaggacuaguguccaccugucccuccugggcugcuggauugucucguuuuccugccaaauaaacaggaucagcgcuuuacagaucuaaaaaaaaaaaaaaaaaaaaaaaaaaaaaaaaaaaaaaaaaaaaaaaaaaaaaaaaaaaaaaaaaaaaaaaaaaaaaaaaaaaaaaaaaaaaaaaaaaaa

SEQ ID NO: 25383 - RNA, 4105 nt, Artificial Sequence
  SARS-CoV-2/Wuhan/WIV05/2019__EPI_ISL_402128 spike protein mRNA gc mod (1-1273)(K986P_V987P_K986P_V987P_L18F_T20N_P26S_D138Y_R190S_K417T _E484K_N501Y_D614G_H655Y_T1027I)
aggagacccgugacccggaaguuguacggcuacgcgacuuucccucccacaaacccucgcgcccuuccuuuccuacuugggcccggcagaaagcuuaccauguucguguuccuggugcugcugccucugguguccagccagugugugaacuucaccaacagaacacagcugccuagcgccuacaccaacagcuuuaccagaggcguguacuaccccgacaagguguucagauccagcgugcugcacucuacccaggaccuguuccugccuuucuucagcaacgugaccugguuccacgccauccacguguccggcaccaauggcaccaagagauucgacaaccccgugcugcccuucaacgacgggguguacuuugccagcaccgagaaguccaacaucaucagaggcuggaucuucggcaccacacuggacagcaagacccagagccugcugaucgugaacaacgccaccaacguggucaucaaagugugcgaguuccaguucugcaacuaccccuuccugggcgucuacuaccacaagaacaacaagagcuggauggaaagcgaguuccggguguacagcagcgccaacaacugcaccuucgaguacgugucccagccuuuccugauggaccuggaaggcaagcagggcaacuucaagaaccugagcgaguucguguuuaagaacaucgacggcuacuucaagaucuacagcaagcacaccccuaucaaccucgugcgggaucugccucagggcuucucugcucuggaaccccugguggaucugcccaucggcaucaacaucacccgguuucagacacugcuggcccugcacagaagcuaccugacaccuggcgauagcagcagcggauggacagcuggugccgccgcuuacuaugugggcuaccugcagccuagaaccuuccugcugaaguacaacgagaacggcaccaucaccgacgccguggauugugcucuggauccucugagcgagacaaagugcacccugaaguccuucaccguggaaaagggcaucuaccagaccagcaacuuccgggugcagcccaccgaauccaucgugcgguuccccaauaucaccaaucugugccccuucggcgagguguucaaugccaccagauucgccucuguguacgccuggaaccggaagcggaucagcaauugcguggccgacuacuccgugcuguacaacuccgccagcuucagcaccuucaagugcuacggcguguccccuaccaagcugaacgaccugugcuucacaaacguguacgccgacagcuucgugauccggggagaugaagugcggcagauugccccuggacagacaggcaccaucgccgacuacaacuacaagcugcccgacgacuucaccggcugugugauugccuggaacagcaacaaccuggacuccaaagucggcggcaacuacaauuaccuguaccggcuguuccggaaguccaaucugaagcccuucgagcgggacaucuccaccgagaucuaucaggccggcagcaccccuuguaacggcgugaagggcuucaacugcuacuucccacugcaguccuacggcuuucagcccacauacggcgugggcuaucagcccuacagagugguggugcugagcuucgaacugcugcaugccccugccacagugugcggcccuaagaaaagcaccaaucucgugaagaacaaaugcgugaacuucaacuucaacggccugaccggcaccggcgugcugacagagagcaacaagaaguuccugccauuccagcaguuuggccgggauaucgccgauaccacagacgccguuagagauccccagacacuggaaauccuggacaucaccccuugcagcuucggcggagugucugugaucaccccuggcaccaacaccagcaaucagguggcagugcuguaccagggcgugaacuguaccgaagugcccguggccauucacgccgaucagcugacaccuacauggcggguguacuccaccggcagcaauguguuucagaccagagccggcugucugaucggagccgaguacgugaacaauagcuacgagugcgacauccccaucggcgcuggaaucugcgccagcuaccagacacagacaaacagcccucggagagccagaagcguggccagccagagcaucauugccuacacaaugucucugggcgccgagaacagcguggccuacuccaacaacucuaucgcuauccccaccaacuucaccaucagcgugaccacagagauccugccuguguccaugaccaagaccagcguggacugcaccauguacaucugcggcgauuccaccgagugcuccaaccugcugcugcaguacggcagcuucugcacccagcugaauagagcccugacagggaucgccguggaacaggacaagaacacccaagagguguucgcccaagugaagcagaucuacaagaccccuccuaucaaggacuucggcggcuucaauuucagccagauucugcccgauccuagcaagcccagcaagcggagcuucaucgaggaccugcuguucaacaaagugacacuggccgacgccggcuucaucaagcaguauggcgauugucugggcgacauugccgccagggaucugauuugcgcccagaaguuuaacggacugacagugcugccuccucugcugaccgaugagaugaucgcccaguacacaucugcccugcuggccggcacaaucacaagcggcuggacauuuggagcaggcgccgcucugcagauccccuuugcuaugcagauggccuaccgguucaacggcaucggagugacccagaaugugcuguacgagaaccagaagcugaucgccaaccaguucaacagcgccaucggcaagauccaggacagccugagcagcacagcaagcgcccugggaaagcugcaggacguggucaaccagaaugcccaggcacugaacacccuggucaagcagcuguccuccaacuucggcgccaucagcucugugcugaacgauauccugagcagacuggacccuccugaggccgaggugcagaucgacagacugaucacaggcagacugcagagccuccagacauacgugacccagcagcugaucagagccgccgagauuagagccucugccaaucuggccgccaucaagaugucugagugugugcugggccagagcaagagaguggacuuuugcggcaagggcuaccaccugaugagcuucccucagucugccccucacggcgugguguuucugcacgugacauaugugcccgcucaagagaagaauuucaccaccgcuccagccaucugccacgacggcaaagcccacuuuccuagagaaggcguguucguguccaacggcacccauugguucgugacacagcggaacuucuacgagccccagaucaucaccaccgacaacaccuucgugucuggcaacugcgacgucgugaucggcauugugaacaauaccguguacgacccucugcagcccgagcuggacagcuucaaagaggaacuggacaaguacuuuaagaaccacacaagccccgacguggaccugggcgauaucagcggaaucaaugccagcgucgugaacauccagaaagagaucgaccggcugaacgagguggccaagaaucugaacgagagccugaucgaccugcaagaacuggggaaguacgagcaguacaucaaguggcccugguacaucuggcugggcuuuaucgccggacugauugccaucgugauggucacaaucaugcuguguugcaugaccagcugcuguagcugccugaagggcuguuguagcuguggcagcugcugcaaguucgacgaggacgauucugagcccgugcugaagggcgugaaacugcacuacacaugaggacuaguguccaccugucccuccugggcugcuggauugucucguuuuccugccaaauaaacaggaucagcgcuuuacagaucuaaaaaaaaaaaaaaaaaaaaaaaaaaaaaaaaaaaaaaaaaaaaaaaaaaaaaaaaaaaaaaaaaaaaaaaaaaaaaaaaaaaaaaaaaaaaaaaaaaaa

SEQ ID NO: 25384 - RNA, 4105 nt, Artificial Sequence
  SARS-CoV-2/Wuhan/WIV05/2019__EPI_ISL_402128 spike protein mRNA gc mod (1-1273)(K986P_V987P_K986P_V987P_S13I_W152C_L452R_D614G)
aggagacccgugacccggaaguuguacggcuacgcgacuuucccucccacaaacccucgcgcccuuccuuuccuacuugggcccggcagaaagcuuaccauguucguguuccuggugcugcugccucugguguccauccagugugugaaccugaccaccagaacacagcugccuccagccuacaccaacagcuuuaccagaggcguguacuaccccgacaagguguucagauccagcgugcugcacucuacccaggaccuguuccugccuuucuucagcaacgugaccugguuccacgccauccacguguccggcaccaauggcaccaagagauucgacaaccccgugcugcccuucaacgacgggguguacuuugccagcaccgagaaguccaacaucaucagaggcuggaucuucggcaccacacuggacagcaagacccagagccugcugaucgugaacaacgccaccaacguggucaucaaagugugcgaguuccaguucugcaacgaccccuuccugggcgucuacuaccacaagaacaacaagagcugcauggaaagcgaguuccggguguacagcagcgccaacaacugcaccuucgaguacgugucccagccuuuccugauggaccuggaaggcaagcagggcaacuucaagaaccugcgcgaguucguguuuaagaacaucgacggcuacuucaagaucuacagcaagcacaccccuaucaaccucgugcgggaucugccucagggcuucucugcucuggaaccccugguggaucugcccaucggcaucaacaucacccgguuucagacacugcuggcccugcacagaagcuaccugacaccuggcgauagcagcagcggauggacagcuggugccgccgcuuacuaugugggcuaccugcagccuagaaccuuccugcugaaguacaacgagaacggcaccaucaccgacgccguggauugugcucuggauccucugagcgagacaaagugcacccugaaguccuucaccguggaaaagggcaucuaccagaccagcaacuuccgggugcagcccaccgaauccaucgugcgguuccccaauaucaccaaucugugccccuucggcgagguguucaaugccaccagauucgccucuguguacgccuggaaccggaagcggaucagcaauugcguggccgacuacuccgugcuguacaacuccgccagcuucagcaccuucaagugcuacggcguguccccuaccaagcugaacgaccugugcuucacaaacguguacgccgacagcuucgugauccggggagaugaagugcggcagauugccccuggacagacaggcaagaucgccgacuacaacuacaagcugcccgacgacuucaccggcugugugauugccuggaacagcaacaaccuggacuccaaagucggcggcaacuacaauuaccgcuaccggcuguuccggaaguccaaucugaagcccuucgagcgggacaucuccaccgagaucuaucaggccggcagcaccccuuguaacggcguggaaggcuucaacugcuacuucccacugcaguccuacggcuuucagcccacaaauggcgugggcuaucagcccuacagagugguggugcugagcuucgaacugcugcaugccccugccacagugugcggcccuaagaaaagcaccaaucucgugaagaacaaaugcgugaacuucaacuucaacggccugaccggcaccggcgugcugacagagagcaacaagaaguuccugccauuccagcaguuuggccgggauaucgccgauaccacagacgccguuagagauccccagacacuggaaauccuggacaucaccccuugcagcuucggcggagugucugugaucaccccuggcaccaacaccagcaaucagguggcagugcuguaccagggcgugaacuguaccgaagugcccguggccauucacgccgaucagcugacaccuacauggcggguguacuccaccggcagcaauguguuucagaccagagccggcugucugaucggagccgagcacgugaacaauagcuacgagugcgacauccccaucggcgcuggaaucugcgccagcuaccagacacagacaaacagcccucggagagccagaagcguggccagccagagcaucauugccuacacaaugucucugggcgccgagaacagcguggccuacuccaacaacucuaucgcuauccccaccaacuucaccaucagcgugaccacagagauccugccuguguccaugaccaagaccagcguggacugcaccauguacaucugcggcgauuccaccgagugcuccaaccugcugcugcaguacggcagcuucugcacccagcugaauagagcccugacagggaucgccguggaacaggacaagaacacccaagagguguucgcccaagugaagcagaucuacaagaccccuccuaucaaggacuucggcggcuucaauuucagccagauucugcccgauccuagcaagcccagcaagcggagcuucaucgaggaccugcuguucaacaaagugacacuggccgacgccggcuucaucaagcaguauggcgauugucugggcgacauugccgccagggaucugauuugcgcccagaaguuuaacggacugacagugcugccuccucugcugaccgaugagaugaucgcccaguacacaucugcccugcuggccggcacaaucacaagcggcuggacauuuggagcaggcgccgcucugcagauccccuuugcuaugcagauggccuaccgguucaacggcaucggagugacccagaaugugcuguacgagaaccagaagcugaucgccaaccaguucaacagcgccaucggcaagauccaggacagccugagcagcacagcaagcgcccugggaaagcugcaggacguggucaaccagaaugcccaggcacugaacacccuggucaagcagcuguccuccaacuucggcgccaucagcucugugcugaacgauauccugagcagacuggacccuccugaggccgaggugcagaucgacagacugaucacaggcagacugcagagccuccagacauacgugacccagcagcugaucagagccgccgagauuagagccucugccaaucuggccgccaccaagaugucugagugugugcugggccagagcaagagaguggacuuuugcggcaagggcuaccaccugaugagcuucccucagucugccccucacggcgugguguuucugcacgugacauaugugcccgcucaagagaagaauuucaccaccgcuccagccaucugccacgacggcaaagcccacuuuccuagagaaggcguguucguguccaacggcacccauugguucgugacacagcggaacuucuacgagccccagaucaucaccaccgacaacaccuucgugucuggcaacugcgacgucgugaucggcauugugaacaauaccguguacgacccucugcagcccgagcuggacagcuucaaagaggaacuggacaaguacuuuaagaaccacacaagccccgacguggaccugggcgauaucagcggaaucaaugccagcgucgugaacauccagaaagagaucgaccggcugaacgagguggccaagaaucugaacgagagccugaucgaccugcaagaacuggggaaguacgagcaguacaucaaguggcccugguacaucuggcugggcuuuaucgccggacugauugccaucgugauggucacaaucaugcuguguugcaugaccagcugcuguagcugccugaagggcuguuguagcuguggcagcugcugcaaguucgacgaggacgauucugagcccgugcugaagggcgugaaacugcacuacacaugaggacuaguguccaccugucccuccugggcugcuggauugucucguuuuccugccaaauaaacaggaucagcgcuuuacagaucuaaaaaaaaaaaaaaaaaaaaaaaaaaaaaaaaaaaaaaaaaaaaaaaaaaaaaaaaaaaaaaaaaaaaaaaaaaaaaaaaaaaaaaaaaaaaaaaaaaaa

SEQ ID NO: 25385 - RNA, 1341 nt, Artificial Sequence
  SARS-CoV-2/Wuhan/WIV05/2019__EPI_ISL_402128 spike protein mRNA gc (1-15,334-528) Ferritin construct
aggagaaagcuuaccauguucguguuccugguccuccugccccuggugagcucccagugcaaccugugccccuucggcgagguguucaacgccacccgguucgccagcgucuacgccuggaaccgcaagcggaucuccaacugcguggcggacuacagcgugcuguacaacuccgccagcuucuccacguucaagugcuacggcgucagccccaccaagcucaacgaccugugcuucaccaacguguacgccgacuccuucgugauccgcggggacgagguccggcagaucgcccccggccagaccgggaagaucgccgacuacaacuacaagcugccggacgacuucacgggcugcgugaucgcguggaacagcaacaaccucgacuccaaggucgggggcaacuacaacuaccuguaccgccuguuccgcaagagcaaccucaagcccuucgagcgggacaucuccaccgagaucuaccaggccggcagcacccccugcaacgggguggagggcuucaacugcuacuucccccugcaguccuacggguuccagccgaccaacggcgugggguaccagcccuaccggguggucgugcugagcuucgagcuccugcacgcccccgccacggugugcggccccaagggcggggguggaagcggcggggguggaagugacaucaucaagcuccugaacgagcaggucaacaaggagaugcaguccagcaaccuguacauguccaugagcuccuggugcuacacccacagccucgacggcgccgggcuguuccuguucgaccacgccgcggaggaguacgagcacgccaagaagcucaucaucuuccugaacgagaacaacgugcccgugcagcugaccuccaucagcgccccggagcacaaguucgagggccucacgcagaucuuccagaaggccuacgagcacgagcagcacaucuccgagagcaucaacaacaucguggaccacgccaucaaguccaaggaccacgcgaccuucaacuuccugcagugguacgucgccgagcagcacgaggaggaggugcuguucaaggacauccucgacaagaucgagcugaucgggaacgagaaccacggccuguaccucgccgaccaguacgugaaggggaucgccaagagccgcaaguccugaggacuaguuauaagacugacuagcccgaugggccucccaacgggcccuccuccccuccuugcaccgagauuaauaaaaaaaaaaaaaaaaaaaaaaaaaaaaaaaaaaaaaaaaaaaaaaaaaaaaaaaaaaaaaaaaaaaaaaaaaaaaaaaaaaaaaaaaaaaaaaaaaaaa

SEQ ID NO: 25386 - RNA, 939 nt, Artificial Sequence
  SARS-CoV-2/Wuhan/WIV05/2019__EPI_ISL_402128 spike protein mRNA gc (334-528) Foldon construct
aggagaaagcuuaccaugcccaugggcagccugcagccgcucgccacccuguaccugcucgggaugcugguggccuccguccuggcgaaccugugccccuucggcgagguguucaacgccacccgguucgccagcgucuacgccuggaaccgcaagcggaucuccaacugcguggcggacuacagcgugcuguacaacuccgccagcuucuccacguucaagugcuacggcgucagccccaccaagcucaacgaccugugcuucaccaacguguacgccgacuccuucgugauccgcggggacgagguccggcagaucgcccccggccagaccgggaagaucgccgacuacaacuacaagcugccggacgacuucacgggcugcgugaucgcguggaacagcaacaaccucgacuccaaggucgggggcaacuacaacuaccuguaccgccuguuccgcaagagcaaccucaagcccuucgagcgggacaucuccaccgagaucuaccaggccggcagcacccccugcaacgggguggagggcuucaacugcuacuucccccugcaguccuacggguuccagccgaccaacggcgugggguaccagcccuaccggguggucgugcugagcuucgagcuccugcacgcccccgccacggugugcggccccaagggcagcggcggguacauccccgaggccccgcgcgacggccaggccuacgugcggaaggacggcgaguggguccugcugagcaccuuccucugaggacuaguuauaagacugacuagcccgaugggccucccaacgggcccuccuccccuccuugcaccgagauuaauaaaaaaaaaaaaaaaaaaaaaaaaaaaaaaaaaaaaaaaaaaaaaaaaaaaaaaaaaaaaaaaaaaaaaaaaaaaaaaaaaaaaaaaaaaaaaaaaaaaa

SEQ ID NO: 25387 - RNA, 1317 nt, Artificial Sequence
  SARS-CoV-2/Wuhan/WIV05/2019__EPI_ISL_402128 spike protein mRNA gc (1-15,334-528) LumSynth construct
aggagaaagcuuaccauguucguguuccugguccuccugccccuggugagcucccagugcaaccugugccccuucggcgagguguucaacgccacccgguucgccagcgucuacgccuggaaccgcaagcggaucuccaacugcguggcggacuacagcgugcuguacaacuccgccagcuucuccacguucaagugcuacggcgucagccccaccaagcucaacgaccugugcuucaccaacguguacgccgacuccuucgugauccgcggggacgagguccggcagaucgcccccggccagaccgggaagaucgccgacuacaacuacaagcugccggacgacuucacgggcugcgugaucgcguggaacagcaacaaccucgacuccaaggucgggggcaacuacaacuaccuguaccgccuguuccgcaagagcaaccucaagcccuucgagcgggacaucuccaccgagaucuaccaggccggcagcacccccugcaacgggguggagggcuucaacugcuacuucccccugcaguccuacggguuccagccgaccaacggcgugggguaccagcccuaccggguggucgugcugagcuucgagcuccugcacgcccccgccacggugugcggccccaagggcggcggcggcuccggaggcggagguagcgggggacagaucuacgagggcaagcugaccgccgaggggcuccgcuucggcaucguggccagccgguucaaccacgcgcuggucgaccgccugguggagggggccaucgacgccaucgugcggcacggcgggcgcgaggaggacaucacccucguccgggugcccggcuccugggagaucccgguggccgccggcgagcuggcccgcaaggaggacaucgacgcggucaucgccaucggggugcugauccggggcgccacgccccacuucgacuacaucgccagcgagguguccaaggggcucgcggaccugagccuggagcuccgcaagcccaucaccuucggcgucaucaccgccgacacccuggagcaggccaucgagcgggccgggacgaagcacggcaacaagggcugggaggccgcgcuguccgccaucgagauggccaaccucuucaagagccugcgcugaggacuaguuauaagacugacuagcccgaugggccucccaacgggcccuccuccccuccuugcaccgagauuaauaaaaaaaaaaaaaaaaaaaaaaaaaaaaaaaaaaaaaaaaaaaaaaaaaaaaaaaaaaaaaaaaaaaaaaaaaaaaaaaaaaaaaaaaaaaaaaaaaaaa

SEQ ID NO: 25388 - RNA, 1278 nt, Artificial Sequence
  SARS-CoV-2/Wuhan/WIV05/2019__EPI_ISL_402128 spike protein mRNA gc (334-528) LumSynth construct
aggagaaagcuuaccaugcagaucuacgagggcaagcugaccgccgaggggcuccgcuucggcaucguggccagccgguucaaccacgcgcuggucgaccgccugguggagggggccaucgacgccaucgugcggcacggcgggcgcgaggaggacaucacccucguccgggugcccggcuccugggagaucccgguggccgccggcgagcuggcccgcaaggaggacaucgacgcggucaucgccaucggggugcugauccggggcgccacgccccacuucgacuacaucgccagcgagguguccaaggggcucgcggaccugagccuggagcuccgcaagcccaucaccuucggcgucaucaccgccgacacccuggagcaggccaucgagcgggccgggacgaagcacggcaacaagggcugggaggccgcgcuguccgccaucgagauggccaaccucuucaagagccugcgcggcgggggcgggagcggcgggggcggcuccgggggcgggaaccugugccccuucggcgagguguucaacgccacccgguucgccagcgucuacgccuggaaccgcaagcggaucuccaacugcguggcggacuacagcgugcuguacaacuccgccagcuucuccacguucaagugcuacggcgucagccccaccaagcucaacgaccugugcuucaccaacguguacgccgacuccuucgugauccgcggggacgagguccggcagaucgcccccggccagaccgggaagaucgccgacuacaacuacaagcugccggacgacuucacgggcugcgugaucgcguggaacagcaacaaccucgacuccaaggucgggggcaacuacaacuaccuguaccgccuguuccgcaagagcaaccucaagcccuucgagcgggacaucuccaccgagaucuaccaggccggcagcacccccugcaacgggguggagggcuucaacugcuacuucccccugcaguccuacggguuccagccgaccaacggcgugggguaccagcccuaccggguggucgugcugagcuucgagcuccugcacgcccccgccacggugugcggccccaagugaggacuaguuauaagacugacuagcccgaugggccucccaacgggcccuccuccccuccuugcaccgagauuaauaaaaaaaaaaaaaaaaaaaaaaaaaaaaaaaaaaaaaaaaaaaaaaaaaaaaaaaaaaaaaaaaaaaaaaaaaaaaaaaaaaaaaaaaaaaaaaaaaaaa

SEQ ID NO: 25389 - RNA, 4011 nt, Artificial Sequence
  SARS-CoV-2/Wuhan/WIV05/2019__EPI_ISL_402128 spike protein mRNA gc (1-1273)
aggagaaagcuuaccauguucguguuccugguccuccugccccuggugagcucccagugcgugaaccucaccacccgcacgcagcugccgcccgccuacaccaacagcuucacccggggcgucuacuaccccgacaagguguuccgcuccagcgugcugcacuccacccaggaccucuuccugcccuucuucagcaacgucacgugguuccacgccauccacguguccgggaccaacggcaccaagcgguucgacaacccggugcugcccuucaacgacggggucuacuucgcgagcaccgagaaguccaacaucauccgcggcuggaucuucgggacgacccucgacagcaagacccagucccugcugaucgugaacaacgccaccaacguggucaucaaggugugcgaguuccaguucugcaacgaccccuuccucggcguguacuaccacaagaacaacaagagcuggauggaguccgaguuccgggucuacagcuccgccaacaacugcacguucgaguacgugagccagcccuuccugauggaccuggagggcaagcaggggaacuucaagaaccuccgcgaguucguguucaagaacaucgacggcuacuucaagaucuacuccaagcacaccccgaucaaccugguccgggaccugccccagggguucagcgcccucgagccccugguggaccugcccaucggcaucaacaucacccgcuuccagacccuccuggcccugcaccgguccuaccucacgccgggggacagcagcuccggcuggaccgcgggcgccgccgccuacuacgugggguaccugcagccccgcaccuuccugcucaaguacaacgagaacggcaccaucacggacgcggucgacugcgcccuggacccccugagcgagaccaagugcacccucaaguccuucaccguggagaaggggaucuaccagacgagcaacuuccgggugcagcccaccgaguccaucguccgcuucccgaacaucaccaaccugugccccuucggcgagguguucaacgccacccgguucgccagcgucuacgccuggaaccgcaagcggaucuccaacugcguggcggacuacagcgugcuguacaacuccgccagcuucuccacguucaagugcuacggcgucagccccaccaagcucaacgaccugugcuucaccaacguguacgccgacuccuucgugauccgcggggacgagguccggcagaucgcccccggccagaccgggaagaucgccgacuacaacuacaagcugccggacgacuucacgggcugcgugaucgcguggaacagcaacaaccucgacuccaaggucgggggcaacuacaacuaccuguaccgccuguuccgcaagagcaaccucaagcccuucgagcgggacaucuccaccgagaucuaccaggccggcagcacccccugcaacgggguggagggcuucaacugcuacuucccccugcaguccuacggguuccagccgaccaacggcgugggguaccagcccuaccggguggucgugcugagcuucgagcuccugcacgcccccgccacggugugcggccccaagaaguccaccaaccuggucaagaacaagugcgugaacuucaacuucaacggccucaccgggaccggcgugcugaccgagagcaacaagaaguuccugccguuccagcaguucgggcgcgacaucgccgacacgaccgacgcgguccgcgacccccagacccuggagauccucgacaucacccccugcagcuucggcgggguguccgugaucacgccgggcaccaacaccagcaaccaggucgccgugcuguaccaggacgugaacugcaccgagguccccguggccauccacgccgaccagcugacgcccaccuggcggguguacuccaccggcagcaacgucuuccagacccgcgccgggugccucaucggcgcggagcacgugaacaacuccuacgagugcgacauccccaucggggccggcaucugcgccagcuaccagacgcagaccaacuccccgcggcgcgcccggagcguggcgucccagagcaucaucgccuacaccaugucccugggcgccgagaacagcgucgccuacuccaacaacagcaucgccauccccaccaacuucacgaucuccgugaccaccgagauccugcccgugagcaugaccaagacgagcgucgacugcaccauguacaucugcggggacuccaccgagugcagcaaccuccugcugcaguacggcuccuucugcacccagcucaaccgcgcgcugacggggaucgccguggagcaggacaagaacacccaggagguguucgcccaggucaagcagaucuacaagacgcccccgaucaaggacuucggcggguucaacuucagccagauccugcccgaccccuccaagcccagcaagcgguccuucaucgaggaccuccuguucaacaaggugacccuggccgacgccggcuucaucaagcaguacggcgacugccucggggacaucgcggcccgcgaccugaucugcgcccagaaguucaacggccugaccgugcucccgccccugcugaccgacgagaugaucgcccaguacaccagcgcccuccuggcggggaccaucacguccggcuggaccuucggggccggcgccgcccugcagauccccuucgcgaugcagauggccuaccgguucaacggcaucggggucacccagaacgugcucuacgagaaccagaagcugaucgccaaccaguucaacagcgccaucggcaagauccaggacucccugagcuccaccgccagcgcgcucgggaagcugcaggacguggucaaccagaacgcccaggcccugaacacgcucgugaagcagcuguccagcaacuucggcgccaucuccagcgugcugaacgacauccucucccgccuggacaaggucgaggccgaggugcagaucgaccggcugaucaccgggcgccuccagagccugcagaccuacgugacccagcagcugauccgggcggccgagauccgcgccagcgccaaccucgccgcgaccaagauguccgagugcguccugggccagagcaagcggguggacuucugcggcaagggguaccaccugauguccuucccccagagcgccccgcacggcguggucuuccuccacgugacguacguccccgcccaggagaagaacuucaccaccgcccccgcgaucugccacgacgggaaggcccacuucccccgcgagggcguguucguguccaacgggacccacugguucgucacgcagcggaacuucuacgagccgcagaucaucaccaccgacaacaccuucgugagcggcaacugcgacguggucaucggcaucgugaacaacacgguguacgacccccugcagcccgagcuggacuccuucaaggaggagcucgacaaguacuucaagaaccacaccagccccgacgucgaccugggggacaucuccggcaucaacgccagcguggugaacauccagaaggagaucgaccgccugaacgaggucgccaagaaccucaacgagucccugaucgaccugcaggagcucgggaaguacgagcaguacaucaaguggccgugguacaucuggcugggcuucaucgccggccugaucgcgaucgugauggugaccaucaugcucugcugcaugaccagcugcugcuccugccugaaggggugcugcagcugcggcuccugcugcaaguucgacgaggacgacagcgagcccguccugaagggggugaagcuccacuacacgugaggacuaguuauaagacugacuagcccgaugggccucccaacgggcccuccuccccuccuugcaccgagauuaauaaaaaaaaaaaaaaaaaaaaaaaaaaaaaaaaaaaaaaaaaaaaaaaaaaaaaaaaaaaaaaaaaaaaaaaaaaaaaaaaaaaaaaaaaaaaaaaaaaaa

SEQ ID NO: 25390 - RNA, 4011 nt, Artificial Sequence
  SARS-CoV-2/Wuhan/WIV05/2019__EPI_ISL_402128 spike protein mRNA gc (1-1273)(D614G)
aggagaaagcuuaccauguucguguuccugguccuccugccccuggugagcucccagugcgugaaccucaccacccgcacgcagcugccgcccgccuacaccaacagcuucacccggggcgucuacuaccccgacaagguguuccgcuccagcgugcugcacuccacccaggaccucuuccugcccuucuucagcaacgucacgugguuccacgccauccacguguccgggaccaacggcaccaagcgguucgacaacccggugcugcccuucaacgacggggucuacuucgcgagcaccgagaaguccaacaucauccgcggcuggaucuucgggacgacccucgacagcaagacccagucccugcugaucgugaacaacgccaccaacguggucaucaaggugugcgaguuccaguucugcaacgaccccuuccucggcguguacuaccacaagaacaacaagagcuggauggaguccgaguuccgggucuacagcuccgccaacaacugcacguucgaguacgugagccagcccuuccugauggaccuggagggcaagcaggggaacuucaagaaccuccgcgaguucguguucaagaacaucgacggcuacuucaagaucuacuccaagcacaccccgaucaaccugguccgggaccugccccagggguucagcgcccucgagccccugguggaccugcccaucggcaucaacaucacccgcuuccagacccuccuggcccugcaccgguccuaccucacgccgggggacagcagcuccggcuggaccgcgggcgccgccgccuacuacgugggguaccugcagccccgcaccuuccugcucaaguacaacgagaacggcaccaucacggacgcggucgacugcgcccuggacccccugagcgagaccaagugcacccucaaguccuucaccguggagaaggggaucuaccagacgagcaacuuccgggugcagcccaccgaguccaucguccgcuucccgaacaucaccaaccugugccccuucggcgagguguucaacgccacccgguucgccagcgucuacgccuggaaccgcaagcggaucuccaacugcguggcggacuacagcgugcuguacaacuccgccagcuucuccacguucaagugcuacggcgucagccccaccaagcucaacgaccugugcuucaccaacguguacgccgacuccuucgugauccgcggggacgagguccggcagaucgcccccggccagaccgggaagaucgccgacuacaacuacaagcugccggacgacuucacgggcugcgugaucgcguggaacagcaacaaccucgacuccaaggucgggggcaacuacaacuaccuguaccgccuguuccgcaagagcaaccucaagcccuucgagcgggacaucuccaccgagaucuaccaggccggcagcacccccugcaacgggguggagggcuucaacugcuacuucccccugcaguccuacggguuccagccgaccaacggcgugggguaccagcccuaccggguggucgugcugagcuucgagcuccugcacgcccccgccacggugugcggccccaagaaguccaccaaccuggucaagaacaagugcgugaacuucaacuucaacggccucaccgggaccggcgugcugaccgagagcaacaagaaguuccugccguuccagcaguucgggcgcgacaucgccgacacgaccgacgcgguccgcgacccccagacccuggagauccucgacaucacccccugcagcuucggcgggguguccgugaucacgccgggcaccaacaccagcaaccaggucgccgugcuguaccagggcgugaacugcaccgagguccccguggccauccacgccgaccagcugacgcccaccuggcggguguacuccaccggcagcaacgucuuccagacccgcgccgggugccucaucggcgcggagcacgugaacaacuccuacgagugcgacauccccaucggggccggcaucugcgccagcuaccagacgcagaccaacuccccgcggcgcgcccggagcguggcgucccagagcaucaucgccuacaccaugucccugggcgccgagaacagcgucgccuacuccaacaacagcaucgccauccccaccaacuucacgaucuccgugaccaccgagauccugcccgugagcaugaccaagacgagcgucgacugcaccauguacaucugcggggacuccaccgagugcagcaaccuccugcugcaguacggcuccuucugcacccagcucaaccgcgcgcugacggggaucgccguggagcaggacaagaacacccaggagguguucgcccaggucaagcagaucuacaagacgcccccgaucaaggacuucggcggguucaacuucagccagauccugcccgaccccuccaagcccagcaagcgguccuucaucgaggaccuccuguucaacaaggugacccuggccgacgccggcuucaucaagcaguacggcgacugccucggggacaucgcggcccgcgaccugaucugcgcccagaaguucaacggccugaccgugcucccgccccugcugaccgacgagaugaucgcccaguacaccagcgcccuccuggcggggaccaucacguccggcuggaccuucggggccggcgccgcccugcagauccccuucgcgaugcagauggccuaccgguucaacggcaucggggucacccagaacgugcucuacgagaaccagaagcugaucgccaaccaguucaacagcgccaucggcaagauccaggacucccugagcuccaccgccagcgcgcucgggaagcugcaggacguggucaaccagaacgcccaggcccugaacacgcucgugaagcagcuguccagcaacuucggcgccaucuccagcgugcugaacgacauccucucccgccuggacaaggucgaggccgaggugcagaucgaccggcugaucaccgggcgccuccagagccugcagaccuacgugacccagcagcugauccgggcggccgagauccgcgccagcgccaaccucgccgcgaccaagauguccgagugcguccugggccagagcaagcggguggacuucugcggcaagggguaccaccugauguccuucccccagagcgccccgcacggcguggucuuccuccacgugacguacguccccgcccaggagaagaacuucaccaccgcccccgcgaucugccacgacgggaaggcccacuucccccgcgagggcguguucguguccaacgggacccacugguucgucacgcagcggaacuucuacgagccgcagaucaucaccaccgacaacaccuucgugagcggcaacugcgacguggucaucggcaucgugaacaacacgguguacgacccccugcagcccgagcuggacuccuucaaggaggagcucgacaaguacuucaagaaccacaccagccccgacgucgaccugggggacaucuccggcaucaacgccagcguggugaacauccagaaggagaucgaccgccugaacgaggucgccaagaaccucaacgagucccugaucgaccugcaggagcucgggaaguacgagcaguacaucaaguggccgugguacaucuggcugggcuucaucgccggccugaucgcgaucgugauggugaccaucaugcucugcugcaugaccagcugcugcuccugccugaaggggugcugcagcugcggcuccugcugcaaguucgacgaggacgacagcgagcccguccugaagggggugaagcuccacuacacgugaggacuaguuauaagacugacuagcccgaugggccucccaacgggcccuccuccccuccuugcaccgagauuaauaaaaaaaaaaaaaaaaaaaaaaaaaaaaaaaaaaaaaaaaaaaaaaaaaaaaaaaaaaaaaaaaaaaaaaaaaaaaaaaaaaaaaaaaaaaaaaaaaaaa

SEQ ID NO: 25391 - RNA, 4011 nt, Artificial Sequence
  SARS-CoV-2/Wuhan/WIV05/2019__EPI_ISL_402128 spike protein mRNA gc (1-1273)(A222V_D614G)
aggagaaagcuuaccauguucguguuccugguccuccugccccuggugagcucccagugcgugaaccucaccacccgcacgcagcugccgcccgccuacaccaacagcuucacccggggcgucuacuaccccgacaagguguuccgcuccagcgugcugcacuccacccaggaccucuuccugcccuucuucagcaacgucacgugguuccacgccauccacguguccgggaccaacggcaccaagcgguucgacaacccggugcugcccuucaacgacggggucuacuucgcgagcaccgagaaguccaacaucauccgcggcuggaucuucgggacgacccucgacagcaagacccagucccugcugaucgugaacaacgccaccaacguggucaucaaggugugcgaguuccaguucugcaacgaccccuuccucggcguguacuaccacaagaacaacaagagcuggauggaguccgaguuccgggucuacagcuccgccaacaacugcacguucgaguacgugagccagcccuuccugauggaccuggagggcaagcaggggaacuucaagaaccuccgcgaguucguguucaagaacaucgacggcuacuucaagaucuacuccaagcacaccccgaucaaccugguccgggaccugccccagggguucagcguccucgagccccugguggaccugcccaucggcaucaacaucacccgcuuccagacccuccuggcccugcaccgguccuaccucacgccgggggacagcagcuccggcuggaccgcgggcgccgccgccuacuacgugggguaccugcagccccgcaccuuccugcucaaguacaacgagaacggcaccaucacggacgcggucgacugcgcccuggacccccugagcgagaccaagugcacccucaaguccuucaccguggagaaggggaucuaccagacgagcaacuuccgggugcagcccaccgaguccaucguccgcuucccgaacaucaccaaccugugccccuucggcgagguguucaacgccacccgguucgccagcgucuacgccuggaaccgcaagcggaucuccaacugcguggcggacuacagcgugcuguacaacuccgccagcuucuccacguucaagugcuacggcgucagccccaccaagcucaacgaccugugcuucaccaacguguacgccgacuccuucgugauccgcggggacgagguccggcagaucgcccccggccagaccgggaagaucgccgacuacaacuacaagcugccggacgacuucacgggcugcgugaucgcguggaacagcaacaaccucgacuccaaggucgggggcaacuacaacuaccuguaccgccuguuccgcaagagcaaccucaagcccuucgagcgggacaucuccaccgagaucuaccaggccggcagcacccccugcaacgggguggagggcuucaacugcuacuucccccugcaguccuacggguuccagccgaccaacggcgugggguaccagcccuaccggguggucgugcugagcuucgagcuccugcacgcccccgccacggugugcggccccaagaaguccaccaaccuggucaagaacaagugcgugaacuucaacuucaacggccucaccgggaccggcgugcugaccgagagcaacaagaaguuccugccguuccagcaguucgggcgcgacaucgccgacacgaccgacgcgguccgcgacccccagacccuggagauccucgacaucacccccugcagcuucggcgggguguccgugaucacgccgggcaccaacaccagcaaccaggucgccgugcuguaccagggcgugaacugcaccgagguccccguggccauccacgccgaccagcugacgcccaccuggcggguguacuccaccggcagcaacgucuuccagacccgcgccgggugccucaucggcgcggagcacgugaacaacuccuacgagugcgacauccccaucggggccggcaucugcgccagcuaccagacgcagaccaacuccccgcggcgcgcccggagcguggcgucccagagcaucaucgccuacaccaugucccugggcgccgagaacagcgucgccuacuccaacaacagcaucgccauccccaccaacuucacgaucuccgugaccaccgagauccugcccgugagcaugaccaagacgagcgucgacugcaccauguacaucugcggggacuccaccgagugcagcaaccuccugcugcaguacggcuccuucugcacccagcucaaccgcgcgcugacggggaucgccguggagcaggacaagaacacccaggagguguucgcccaggucaagcagaucuacaagacgcccccgaucaaggacuucggcggguucaacuucagccagauccugcccgaccccuccaagcccagcaagcgguccuucaucgaggaccuccuguucaacaaggugacccuggccgacgccggcuucaucaagcaguacggcgacugccucggggacaucgcggcccgcgaccugaucugcgcccagaaguucaacggccugaccgugcucccgccccugcugaccgacgagaugaucgcccaguacaccagcgcccuccuggcggggaccaucacguccggcuggaccuucggggccggcgccgcccugcagauccccuucgcgaugcagauggccuaccgguucaacggcaucggggucacccagaacgugcucuacgagaaccagaagcugaucgccaaccaguucaacagcgccaucggcaagauccaggacucccugagcuccaccgccagcgcgcucgggaagcugcaggacguggucaaccagaacgcccaggcccugaacacgcucgugaagcagcuguccagcaacuucggcgccaucuccagcgugcugaacgacauccucucccgccuggacaaggucgaggccgaggugcagaucgaccggcugaucaccgggcgccuccagagccugcagaccuacgugacccagcagcugauccgggcggccgagauccgcgccagcgccaaccucgccgcgaccaagauguccgagugcguccugggccagagcaagcggguggacuucugcggcaagggguaccaccugauguccuucccccagagcgccccgcacggcguggucuuccuccacgugacguacguccccgcccaggagaagaacuucaccaccgcccccgcgaucugccacgacgggaaggcccacuucccccgcgagggcguguucguguccaacgggacccacugguucgucacgcagcggaacuucuacgagccgcagaucaucaccaccgacaacaccuucgugagcggcaacugcgacguggucaucggcaucgugaacaacacgguguacgacccccugcagcccgagcuggacuccuucaaggaggagcucgacaaguacuucaagaaccacaccagccccgacgucgaccugggggacaucuccggcaucaacgccagcguggugaacauccagaaggagaucgaccgccugaacgaggucgccaagaaccucaacgagucccugaucgaccugcaggagcucgggaaguacgagcaguacaucaaguggccgugguacaucuggcugggcuucaucgccggccugaucgcgaucgugauggugaccaucaugcucugcugcaugaccagcugcugcuccugccugaaggggugcugcagcugcggcuccugcugcaaguucgacgaggacgacagcgagcccguccugaagggggugaagcuccacuacacgugaggacuaguuauaagacugacuagcccgaugggccucccaacgggcccuccuccccuccuugcaccgagauuaauaaaaaaaaaaaaaaaaaaaaaaaaaaaaaaaaaaaaaaaaaaaaaaaaaaaaaaaaaaaaaaaaaaaaaaaaaaaaaaaaaaaaaaaaaaaaaaaaaaaa

SEQ ID NO: 25392 - RNA, 4011 nt, Artificial Sequence
  SARS-CoV-2/Wuhan/WIV05/2019__EPI_ISL_402128 spike protein mRNA gc (1-1273)(N439K_D614G)
aggagaaagcuuaccauguucguguuccugguccuccugccccuggugagcucccagugcgugaaccucaccacccgcacgcagcugccgcccgccuacaccaacagcuucacccggggcgucuacuaccccgacaagguguuccgcuccagcgugcugcacuccacccaggaccucuuccugcccuucuucagcaacgucacgugguuccacgccauccacguguccgggaccaacggcaccaagcgguucgacaacccggugcugcccuucaacgacggggucuacuucgcgagcaccgagaaguccaacaucauccgcggcuggaucuucgggacgacccucgacagcaagacccagucccugcugaucgugaacaacgccaccaacguggucaucaaggugugcgaguuccaguucugcaacgaccccuuccucggcguguacuaccacaagaacaacaagagcuggauggaguccgaguuccgggucuacagcuccgccaacaacugcacguucgaguacgugagccagcccuuccugauggaccuggagggcaagcaggggaacuucaagaaccuccgcgaguucguguucaagaacaucgacggcuacuucaagaucuacuccaagcacaccccgaucaaccugguccgggaccugccccagggguucagcgcccucgagccccugguggaccugcccaucggcaucaacaucacccgcuuccagacccuccuggcccugcaccgguccuaccucacgccgggggacagcagcuccggcuggaccgcgggcgccgccgccuacuacgugggguaccugcagccccgcaccuuccugcucaaguacaacgagaacggcaccaucacggacgcggucgacugcgcccuggacccccugagcgagaccaagugcacccucaaguccuucaccguggagaaggggaucuaccagacgagcaacuuccgggugcagcccaccgaguccaucguccgcuucccgaacaucaccaaccugugccccuucggcgagguguucaacgccacccgguucgccagcgucuacgccuggaaccgcaagcggaucuccaacugcguggcggacuacagcgugcuguacaacuccgccagcuucuccacguucaagugcuacggcgucagccccaccaagcucaacgaccugugcuucaccaacguguacgccgacuccuucgugauccgcggggacgagguccggcagaucgcccccggccagaccgggaagaucgccgacuacaacuacaagcugccggacgacuucacgggcugcgugaucgcguggaacagcaagaaccucgacuccaaggucgggggcaacuacaacuaccuguaccgccuguuccgcaagagcaaccucaagcccuucgagcgggacaucuccaccgagaucuaccaggccggcagcacccccugcaacgggguggagggcuucaacugcuacuucccccugcaguccuacggguuccagccgaccaacggcgugggguaccagcccuaccggguggucgugcugagcuucgagcuccugcacgcccccgccacggugugcggccccaagaaguccaccaaccuggucaagaacaagugcgugaacuucaacuucaacggccucaccgggaccggcgugcugaccgagagcaacaagaaguuccugccguuccagcaguucgggcgcgacaucgccgacacgaccgacgcgguccgcgacccccagacccuggagauccucgacaucacccccugcagcuucggcgggguguccgugaucacgccgggcaccaacaccagcaaccaggucgccgugcuguaccagggcgugaacugcaccgagguccccguggccauccacgccgaccagcugacgcccaccuggcggguguacuccaccggcagcaacgucuuccagacccgcgccgggugccucaucggcgcggagcacgugaacaacuccuacgagugcgacauccccaucggggccggcaucugcgccagcuaccagacgcagaccaacuccccgcggcgcgcccggagcguggcgucccagagcaucaucgccuacaccaugucccugggcgccgagaacagcgucgccuacuccaacaacagcaucgccauccccaccaacuucacgaucuccgugaccaccgagauccugcccgugagcaugaccaagacgagcgucgacugcaccauguacaucugcggggacuccaccgagugcagcaaccuccugcugcaguacggcuccuucugcacccagcucaaccgcgcgcugacggggaucgccguggagcaggacaagaacacccaggagguguucgcccaggucaagcagaucuacaagacgcccccgaucaaggacuucggcggguucaacuucagccagauccugcccgaccccuccaagcccagcaagcgguccuucaucgaggaccuccuguucaacaaggugacccuggccgacgccggcuucaucaagcaguacggcgacugccucggggacaucgcggcccgcgaccugaucugcgcccagaaguucaacggccugaccgugcucccgccccugcugaccgacgagaugaucgcccaguacaccagcgcccuccuggcggggaccaucacguccggcuggaccuucggggccggcgccgcccugcagauccccuucgcgaugcagauggccuaccgguucaacggcaucggggucacccagaacgugcucuacgagaaccagaagcugaucgccaaccaguucaacagcgccaucggcaagauccaggacucccugagcuccaccgccagcgcgcucgggaagcugcaggacguggucaaccagaacgcccaggcccugaacacgcucgugaagcagcuguccagcaacuucggcgccaucuccagcgugcugaacgacauccucucccgccuggacaaggucgaggccgaggugcagaucgaccggcugaucaccgggcgccuccagagccugcagaccuacgugacccagcagcugauccgggcggccgagauccgcgccagcgccaaccucgccgcgaccaagauguccgagugcguccugggccagagcaagcggguggacuucugcggcaagggguaccaccugauguccuucccccagagcgccccgcacggcguggucuuccuccacgugacguacguccccgcccaggagaagaacuucaccaccgcccccgcgaucugccacgacgggaaggcccacuucccccgcgagggcguguucguguccaacgggacccacugguucgucacgcagcggaacuucuacgagccgcagaucaucaccaccgacaacaccuucgugagcggcaacugcgacguggucaucggcaucgugaacaacacgguguacgacccccugcagcccgagcuggacuccuucaaggaggagcucgacaaguacuucaagaaccacaccagccccgacgucgaccugggggacaucuccggcaucaacgccagcguggugaacauccagaaggagaucgaccgccugaacgaggucgccaagaaccucaacgagucccugaucgaccugcaggagcucgggaaguacgagcaguacaucaaguggccgugguacaucuggcugggcuucaucgccggccugaucgcgaucgugauggugaccaucaugcucugcugcaugaccagcugcugcuccugccugaaggggugcugcagcugcggcuccugcugcaaguucgacgaggacgacagcgagcccguccugaagggggugaagcuccacuacacgugaggacuaguuauaagacugacuagcccgaugggccucccaacgggcccuccuccccuccuugcaccgagauuaauaaaaaaaaaaaaaaaaaaaaaaaaaaaaaaaaaaaaaaaaaaaaaaaaaaaaaaaaaaaaaaaaaaaaaaaaaaaaaaaaaaaaaaaaaaaaaaaaaaaa

SEQ ID NO: 25393 - RNA, 4011 nt, Artificial Sequence
  SARS-CoV-2/Wuhan/WIV05/2019__EPI_ISL_402128 spike protein mRNA gc (1-1273)(S477N_D614G)
aggagaaagcuuaccauguucguguuccugguccuccugccccuggugagcucccagugcgugaaccucaccacccgcacgcagcugccgcccgccuacaccaacagcuucacccggggcgucuacuaccccgacaagguguuccgcuccagcgugcugcacuccacccaggaccucuuccugcccuucuucagcaacgucacgugguuccacgccauccacguguccgggaccaacggcaccaagcgguucgacaacccggugcugcccuucaacgacggggucuacuucgcgagcaccgagaaguccaacaucauccgcggcuggaucuucgggacgacccucgacagcaagacccagucccugcugaucgugaacaacgccaccaacguggucaucaaggugugcgaguuccaguucugcaacgaccccuuccucggcguguacuaccacaagaacaacaagagcuggauggaguccgaguuccgggucuacagcuccgccaacaacugcacguucgaguacgugagccagcccuuccugauggaccuggagggcaagcaggggaacuucaagaaccuccgcgaguucguguucaagaacaucgacggcuacuucaagaucuacuccaagcacaccccgaucaaccugguccgggaccugccccagggguucagcgcccucgagccccugguggaccugcccaucggcaucaacaucacccgcuuccagacccuccuggcccugcaccgguccuaccucacgccgggggacagcagcuccggcuggaccgcgggcgccgccgccuacuacgugggguaccugcagccccgcaccuuccugcucaaguacaacgagaacggcaccaucacggacgcggucgacugcgcccuggacccccugagcgagaccaagugcacccucaaguccuucaccguggagaaggggaucuaccagacgagcaacuuccgggugcagcccaccgaguccaucguccgcuucccgaacaucaccaaccugugccccuucggcgagguguucaacgccacccgguucgccagcgucuacgccuggaaccgcaagcggaucuccaacugcguggcggacuacagcgugcuguacaacuccgccagcuucuccacguucaagugcuacggcgucagccccaccaagcucaacgaccugugcuucaccaacguguacgccgacuccuucgugauccgcggggacgagguccggcagaucgcccccggccagaccgggaagaucgccgacuacaacuacaagcugccggacgacuucacgggcugcgugaucgcguggaacagcaacaaccucgacuccaaggucgggggcaacuacaacuaccuguaccgccuguuccgcaagagcaaccucaagcccuucgagcgggacaucuccaccgagaucuaccaggccggcaacacccccugcaacgggguggagggcuucaacugcuacuucccccugcaguccuacggguuccagccgaccaacggcgugggguaccagcccuaccggguggucgugcugagcuucgagcuccugcacgcccccgccacggugugcggccccaagaaguccaccaaccuggucaagaacaagugcgugaacuucaacuucaacggccucaccgggaccggcgugcugaccgagagcaacaagaaguuccugccguuccagcaguucgggcgcgacaucgccgacacgaccgacgcgguccgcgacccccagacccuggagauccucgacaucacccccugcagcuucggcgggguguccgugaucacgccgggcaccaacaccagcaaccaggucgccgugcuguaccagggcgugaacugcaccgagguccccguggccauccacgccgaccagcugacgcccaccuggcggguguacuccaccggcagcaacgucuuccagacccgcgccgggugccucaucggcgcggagcacgugaacaacuccuacgagugcgacauccccaucggggccggcaucugcgccagcuaccagacgcagaccaacuccccgcggcgcgcccggagcguggcgucccagagcaucaucgccuacaccaugucccugggcgccgagaacagcgucgccuacuccaacaacagcaucgccauccccaccaacuucacgaucuccgugaccaccgagauccugcccgugagcaugaccaagacgagcgucgacugcaccauguacaucugcggggacuccaccgagugcagcaaccuccugcugcaguacggcuccuucugcacccagcucaaccgcgcgcugacggggaucgccguggagcaggacaagaacacccaggagguguucgcccaggucaagcagaucuacaagacgcccccgaucaaggacuucggcggguucaacuucagccagauccugcccgaccccuccaagcccagcaagcgguccuucaucgaggaccuccuguucaacaaggugacccuggccgacgccggcuucaucaagcaguacggcgacugccucggggacaucgcggcccgcgaccugaucugcgcccagaaguucaacggccugaccgugcucccgccccugcugaccgacgagaugaucgcccaguacaccagcgcccuccuggcggggaccaucacguccggcuggaccuucggggccggcgccgcccugcagauccccuucgcgaugcagauggccuaccgguucaacggcaucggggucacccagaacgugcucuacgagaaccagaagcugaucgccaaccaguucaacagcgccaucggcaagauccaggacucccugagcuccaccgccagcgcgcucgggaagcugcaggacguggucaaccagaacgcccaggcccugaacacgcucgugaagcagcuguccagcaacuucggcgccaucuccagcgugcugaacgacauccucucccgccuggacaaggucgaggccgaggugcagaucgaccggcugaucaccgggcgccuccagagccugcagaccuacgugacccagcagcugauccgggcggccgagauccgcgccagcgccaaccucgccgcgaccaagauguccgagugcguccugggccagagcaagcggguggacuucugcggcaagggguaccaccugauguccuucccccagagcgccccgcacggcguggucuuccuccacgugacguacguccccgcccaggagaagaacuucaccaccgcccccgcgaucugccacgacgggaaggcccacuucccccgcgagggcguguucguguccaacgggacccacugguucgucacgcagcggaacuucuacgagccgcagaucaucaccaccgacaacaccuucgugagcggcaacugcgacguggucaucggcaucgugaacaacacgguguacgacccccugcagcccgagcuggacuccuucaaggaggagcucgacaaguacuucaagaaccacaccagccccgacgucgaccugggggacaucuccggcaucaacgccagcguggugaacauccagaaggagaucgaccgccugaacgaggucgccaagaaccucaacgagucccugaucgaccugcaggagcucgggaaguacgagcaguacaucaaguggccgugguacaucuggcugggcuucaucgccggccugaucgcgaucgugauggugaccaucaugcucugcugcaugaccagcugcugcuccugccugaaggggugcugcagcugcggcuccugcugcaaguucgacgaggacgacagcgagcccguccugaagggggugaagcuccacuacacgugaggacuaguuauaagacugacuagcccgaugggccucccaacgggcccuccuccccuccuugcaccgagauuaauaaaaaaaaaaaaaaaaaaaaaaaaaaaaaaaaaaaaaaaaaaaaaaaaaaaaaaaaaaaaaaaaaaaaaaaaaaaaaaaaaaaaaaaaaaaaaaaaaaaa

SEQ ID NO: 25394 - RNA, 4011 nt, Artificial Sequence
  SARS-CoV-2/Wuhan/WIV05/2019__EPI_ISL_402128 spike protein mRNA gc (1-1273)(N501Y_D614G)
aggagaaagcuuaccauguucguguuccugguccuccugccccuggugagcucccagugcgugaaccucaccacccgcacgcagcugccgcccgccuacaccaacagcuucacccggggcgucuacuaccccgacaagguguuccgcuccagcgugcugcacuccacccaggaccucuuccugcccuucuucagcaacgucacgugguuccacgccauccacguguccgggaccaacggcaccaagcgguucgacaacccggugcugcccuucaacgacggggucuacuucgcgagcaccgagaaguccaacaucauccgcggcuggaucuucgggacgacccucgacagcaagacccagucccugcugaucgugaacaacgccaccaacguggucaucaaggugugcgaguuccaguucugcaacgaccccuuccucggcguguacuaccacaagaacaacaagagcuggauggaguccgaguuccgggucuacagcuccgccaacaacugcacguucgaguacgugagccagcccuuccugauggaccuggagggcaagcaggggaacuucaagaaccuccgcgaguucguguucaagaacaucgacggcuacuucaagaucuacuccaagcacaccccgaucaaccugguccgggaccugccccagggguucagcgcccucgagccccugguggaccugcccaucggcaucaacaucacccgcuuccagacccuccuggcccugcaccgguccuaccucacgccgggggacagcagcuccggcuggaccgcgggcgccgccgccuacuacgugggguaccugcagccccgcaccuuccugcucaaguacaacgagaacggcaccaucacggacgcggucgacugcgcccuggacccccugagcgagaccaagugcacccucaaguccuucaccguggagaaggggaucuaccagacgagcaacuuccgggugcagcccaccgaguccaucguccgcuucccgaacaucaccaaccugugccccuucggcgagguguucaacgccacccgguucgccagcgucuacgccuggaaccgcaagcggaucuccaacugcguggcggacuacagcgugcuguacaacuccgccagcuucuccacguucaagugcuacggcgucagccccaccaagcucaacgaccugugcuucaccaacguguacgccgacuccuucgugauccgcggggacgagguccggcagaucgcccccggccagaccgggaagaucgccgacuacaacuacaagcugccggacgacuucacgggcugcgugaucgcguggaacagcaacaaccucgacuccaaggucgggggcaacuacaacuaccuguaccgccuguuccgcaagagcaaccucaagcccuucgagcgggacaucuccaccgagaucuaccaggccggcagcacccccugcaacgggguggagggcuucaacugcuacuucccccugcaguccuacggguuccagccgaccuacggcgugggguaccagcccuaccggguggucgugcugagcuucgagcuccugcacgcccccgccacggugugcggccccaagaaguccaccaaccuggucaagaacaagugcgugaacuucaacuucaacggccucaccgggaccggcgugcugaccgagagcaacaagaaguuccugccguuccagcaguucgggcgcgacaucgccgacacgaccgacgcgguccgcgacccccagacccuggagauccucgacaucacccccugcagcuucggcgggguguccgugaucacgccgggcaccaacaccagcaaccaggucgccgugcuguaccagggcgugaacugcaccgagguccccguggccauccacgccgaccagcugacgcccaccuggcggguguacuccaccggcagcaacgucuuccagacccgcgccgggugccucaucggcgcggagcacgugaacaacuccuacgagugcgacauccccaucggggccggcaucugcgccagcuaccagacgcagaccaacuccccgcggcgcgcccggagcguggcgucccagagcaucaucgccuacaccaugucccugggcgccgagaacagcgucgccuacuccaacaacagcaucgccauccccaccaacuucacgaucuccgugaccaccgagauccugcccgugagcaugaccaagacgagcgucgacugcaccauguacaucugcggggacuccaccgagugcagcaaccuccugcugcaguacggcuccuucugcacccagcucaaccgcgcgcugacggggaucgccguggagcaggacaagaacacccaggagguguucgcccaggucaagcagaucuacaagacgcccccgaucaaggacuucggcggguucaacuucagccagauccugcccgaccccuccaagcccagcaagcgguccuucaucgaggaccuccuguucaacaaggugacccuggccgacgccggcuucaucaagcaguacggcgacugccucggggacaucgcggcccgcgaccugaucugcgcccagaaguucaacggccugaccgugcucccgccccugcugaccgacgagaugaucgcccaguacaccagcgcccuccuggcggggaccaucacguccggcuggaccuucggggccggcgccgcccugcagauccccuucgcgaugcagauggccuaccgguucaacggcaucggggucacccagaacgugcucuacgagaaccagaagcugaucgccaaccaguucaacagcgccaucggcaagauccaggacucccugagcuccaccgccagcgcgcucgggaagcugcaggacguggucaaccagaacgcccaggcccugaacacgcucgugaagcagcuguccagcaacuucggcgccaucuccagcgugcugaacgacauccucucccgccuggacaaggucgaggccgaggugcagaucgaccggcugaucaccgggcgccuccagagccugcagaccuacgugacccagcagcugauccgggcggccgagauccgcgccagcgccaaccucgccgcgaccaagauguccgagugcguccugggccagagcaagcggguggacuucugcggcaagggguaccaccugauguccuucccccagagcgccccgcacggcguggucuuccuccacgugacguacguccccgcccaggagaagaacuucaccaccgcccccgcgaucugccacgacgggaaggcccacuucccccgcgagggcguguucguguccaacgggacccacugguucgucacgcagcggaacuucuacgagccgcagaucaucaccaccgacaacaccuucgugagcggcaacugcgacguggucaucggcaucgugaacaacacgguguacgacccccugcagcccgagcuggacuccuucaaggaggagcucgacaaguacuucaagaaccacaccagccccgacgucgaccugggggacaucuccggcaucaacgccagcguggugaacauccagaaggagaucgaccgccugaacgaggucgccaagaaccucaacgagucccugaucgaccugcaggagcucgggaaguacgagcaguacaucaaguggccgugguacaucuggcugggcuucaucgccggccugaucgcgaucgugauggugaccaucaugcucugcugcaugaccagcugcugcuccugccugaaggggugcugcagcugcggcuccugcugcaaguucgacgaggacgacagcgagcccguccugaagggggugaagcuccacuacacgugaggacuaguuauaagacugacuagcccgaugggccucccaacgggcccuccuccccuccuugcaccgagauuaauaaaaaaaaaaaaaaaaaaaaaaaaaaaaaaaaaaaaaaaaaaaaaaaaaaaaaaaaaaaaaaaaaaaaaaaaaaaaaaaaaaaaaaaaaaaaaaaaaaaa

SEQ ID NO: 25395 - RNA, 4005 nt, Artificial Sequence
  SARS-CoV-2/Wuhan/WIV05/2019__EPI_ISL_402128 spike protein mRNA gc (1-1273)(H69del_V70del_D614G)
aggagaaagcuuaccauguucguguuccugguccuccugccccuggugagcucccagugcgugaaccucaccacccgcacgcagcugccgcccgccuacaccaacagcuucacccggggcgucuacuaccccgacaagguguuccgcuccagcgugcugcacuccacccaggaccucuuccugcccuucuucagcaacgucacgugguuccacgccaucuccgggaccaacggcaccaagcgguucgacaacccggugcugcccuucaacgacggggucuacuucgcgagcaccgagaaguccaacaucauccgcggcuggaucuucgggacgacccucgacagcaagacccagucccugcugaucgugaacaacgccaccaacguggucaucaaggugugcgaguuccaguucugcaacgaccccuuccucggcguguacuaccacaagaacaacaagagcuggauggaguccgaguuccgggucuacagcuccgccaacaacugcacguucgaguacgugagccagcccuuccugauggaccuggagggcaagcaggggaacuucaagaaccuccgcgaguucguguucaagaacaucgacggcuacuucaagaucuacuccaagcacaccccgaucaaccugguccgggaccugccccagggguucagcgcccucgagccccugguggaccugcccaucggcaucaacaucacccgcuuccagacccuccuggcccugcaccgguccuaccucacgccgggggacagcagcuccggcuggaccgcgggcgccgccgccuacuacgugggguaccugcagccccgcaccuuccugcucaaguacaacgagaacggcaccaucacggacgcggucgacugcgcccuggacccccugagcgagaccaagugcacccucaaguccuucaccguggagaaggggaucuaccagacgagcaacuuccgggugcagcccaccgaguccaucguccgcuucccgaacaucaccaaccugugccccuucggcgagguguucaacgccacccgguucgccagcgucuacgccuggaaccgcaagcggaucuccaacugcguggcggacuacagcgugcuguacaacuccgccagcuucuccacguucaagugcuacggcgucagccccaccaagcucaacgaccugugcuucaccaacguguacgccgacuccuucgugauccgcggggacgagguccggcagaucgcccccggccagaccgggaagaucgccgacuacaacuacaagcugccggacgacuucacgggcugcgugaucgcguggaacagcaacaaccucgacuccaaggucgggggcaacuacaacuaccuguaccgccuguuccgcaagagcaaccucaagcccuucgagcgggacaucuccaccgagaucuaccaggccggcagcacccccugcaacgggguggagggcuucaacugcuacuucccccugcaguccuacggguuccagccgaccaacggcgugggguaccagcccuaccggguggucgugcugagcuucgagcuccugcacgcccccgccacggugugcggccccaagaaguccaccaaccuggucaagaacaagugcgugaacuucaacuucaacggccucaccgggaccggcgugcugaccgagagcaacaagaaguuccugccguuccagcaguucgggcgcgacaucgccgacacgaccgacgcgguccgcgacccccagacccuggagauccucgacaucacccccugcagcuucggcgggguguccgugaucacgccgggcaccaacaccagcaaccaggucgccgugcuguaccagggcgugaacugcaccgagguccccguggccauccacgccgaccagcugacgcccaccuggcggguguacuccaccggcagcaacgucuuccagacccgcgccgggugccucaucggcgcggagcacgugaacaacuccuacgagugcgacauccccaucggggccggcaucugcgccagcuaccagacgcagaccaacuccccgcggcgcgcccggagcguggcgucccagagcaucaucgccuacaccaugucccugggcgccgagaacagcgucgccuacuccaacaacagcaucgccauccccaccaacuucacgaucuccgugaccaccgagauccugcccgugagcaugaccaagacgagcgucgacugcaccauguacaucugcggggacuccaccgagugcagcaaccuccugcugcaguacggcuccuucugcacccagcucaaccgcgcgcugacggggaucgccguggagcaggacaagaacacccaggagguguucgcccaggucaagcagaucuacaagacgcccccgaucaaggacuucggcggguucaacuucagccagauccugcccgaccccuccaagcccagcaagcgguccuucaucgaggaccuccuguucaacaaggugacccuggccgacgccggcuucaucaagcaguacggcgacugccucggggacaucgcggcccgcgaccugaucugcgcccagaaguucaacggccugaccgugcucccgccccugcugaccgacgagaugaucgcccaguacaccagcgcccuccuggcggggaccaucacguccggcuggaccuucggggccggcgccgcccugcagauccccuucgcgaugcagauggccuaccgguucaacggcaucggggucacccagaacgugcucuacgagaaccagaagcugaucgccaaccaguucaacagcgccaucggcaagauccaggacucccugagcuccaccgccagcgcgcucgggaagcugcaggacguggucaaccagaacgcccaggcccugaacacgcucgugaagcagcuguccagcaacuucggcgccaucuccagcgugcugaacgacauccucucccgccuggacaaggucgaggccgaggugcagaucgaccggcugaucaccgggcgccuccagagccugcagaccuacgugacccagcagcugauccgggcggccgagauccgcgccagcgccaaccucgccgcgaccaagauguccgagugcguccugggccagagcaagcggguggacuucugcggcaagggguaccaccugauguccuucccccagagcgccccgcacggcguggucuuccuccacgugacguacguccccgcccaggagaagaacuucaccaccgcccccgcgaucugccacgacgggaaggcccacuucccccgcgagggcguguucguguccaacgggacccacugguucgucacgcagcggaacuucuacgagccgcagaucaucaccaccgacaacaccuucgugagcggcaacugcgacguggucaucggcaucgugaacaacacgguguacgacccccugcagcccgagcuggacuccuucaaggaggagcucgacaaguacuucaagaaccacaccagccccgacgucgaccugggggacaucuccggcaucaacgccagcguggugaacauccagaaggagaucgaccgccugaacgaggucgccaagaaccucaacgagucccugaucgaccugcaggagcucgggaaguacgagcaguacaucaaguggccgugguacaucuggcugggcuucaucgccggccugaucgcgaucgugauggugaccaucaugcucugcugcaugaccagcugcugcuccugccugaaggggugcugcagcugcggcuccugcugcaaguucgacgaggacgacagcgagcccguccugaagggggugaagcuccacuacacgugaggacuaguuauaagacugacuagcccgaugggccucccaacgggcccuccuccccuccuugcaccgagauuaauaaaaaaaaaaaaaaaaaaaaaaaaaaaaaaaaaaaaaaaaaaaaaaaaaaaaaaaaaaaaaaaaaaaaaaaaaaaaaaaaaaaaaaaaaaaaaaaaaaaa

SEQ ID NO: 25396 - RNA, 4011 nt, Artificial Sequence
  SARS-CoV-2/Wuhan/WIV05/2019__EPI_ISL_402128 spike protein mRNA gc (1-1273)(Y453F_D614G)
aggagaaagcuuaccauguucguguuccugguccuccugccccuggugagcucccagugcgugaaccucaccacccgcacgcagcugccgcccgccuacaccaacagcuucacccggggcgucuacuaccccgacaagguguuccgcuccagcgugcugcacuccacccaggaccucuuccugcccuucuucagcaacgucacgugguuccacgccauccacguguccgggaccaacggcaccaagcgguucgacaacccggugcugcccuucaacgacggggucuacuucgcgagcaccgagaaguccaacaucauccgcggcuggaucuucgggacgacccucgacagcaagacccagucccugcugaucgugaacaacgccaccaacguggucaucaaggugugcgaguuccaguucugcaacgaccccuuccucggcguguacuaccacaagaacaacaagagcuggauggaguccgaguuccgggucuacagcuccgccaacaacugcacguucgaguacgugagccagcccuuccugauggaccuggagggcaagcaggggaacuucaagaaccuccgcgaguucguguucaagaacaucgacggcuacuucaagaucuacuccaagcacaccccgaucaaccugguccgggaccugccccagggguucagcgcccucgagccccugguggaccugcccaucggcaucaacaucacccgcuuccagacccuccuggcccugcaccgguccuaccucacgccgggggacagcagcuccggcuggaccgcgggcgccgccgccuacuacgugggguaccugcagccccgcaccuuccugcucaaguacaacgagaacggcaccaucacggacgcggucgacugcgcccuggacccccugagcgagaccaagugcacccucaaguccuucaccguggagaaggggaucuaccagacgagcaacuuccgggugcagcccaccgaguccaucguccgcuucccgaacaucaccaaccugugccccuucggcgagguguucaacgccacccgguucgccagcgucuacgccuggaaccgcaagcggaucuccaacugcguggcggacuacagcgugcuguacaacuccgccagcuucuccacguucaagugcuacggcgucagccccaccaagcucaacgaccugugcuucaccaacguguacgccgacuccuucgugauccgcggggacgagguccggcagaucgcccccggccagaccgggaagaucgccgacuacaacuacaagcugccggacgacuucacgggcugcgugaucgcguggaacagcaacaaccucgacuccaaggucgggggcaacuacaacuaccuguuccgccuguuccgcaagagcaaccucaagcccuucgagcgggacaucuccaccgagaucuaccaggccggcagcacccccugcaacgggguggagggcuucaacugcuacuucccccugcaguccuacggguuccagccgaccaacggcgugggguaccagcccuaccggguggucgugcugagcuucgagcuccugcacgcccccgccacggugugcggccccaagaaguccaccaaccuggucaagaacaagugcgugaacuucaacuucaacggccucaccgggaccggcgugcugaccgagagcaacaagaaguuccugccguuccagcaguucgggcgcgacaucgccgacacgaccgacgcgguccgcgacccccagacccuggagauccucgacaucacccccugcagcuucggcgggguguccgugaucacgccgggcaccaacaccagcaaccaggucgccgugcuguaccagggcgugaacugcaccgagguccccguggccauccacgccgaccagcugacgcccaccuggcggguguacuccaccggcagcaacgucuuccagacccgcgccgggugccucaucggcgcggagcacgugaacaacuccuacgagugcgacauccccaucggggccggcaucugcgccagcuaccagacgcagaccaacuccccgcggcgcgcccggagcguggcgucccagagcaucaucgccuacaccaugucccugggcgccgagaacagcgucgccuacuccaacaacagcaucgccauccccaccaacuucacgaucuccgugaccaccgagauccugcccgugagcaugaccaagacgagcgucgacugcaccauguacaucugcggggacuccaccgagugcagcaaccuccugcugcaguacggcuccuucugcacccagcucaaccgcgcgcugacggggaucgccguggagcaggacaagaacacccaggagguguucgcccaggucaagcagaucuacaagacgcccccgaucaaggacuucggcggguucaacuucagccagauccugcccgaccccuccaagcccagcaagcgguccuucaucgaggaccuccuguucaacaaggugacccuggccgacgccggcuucaucaagcaguacggcgacugccucggggacaucgcggcccgcgaccugaucugcgcccagaaguucaacggccugaccgugcucccgccccugcugaccgacgagaugaucgcccaguacaccagcgcccuccuggcggggaccaucacguccggcuggaccuucggggccggcgccgcccugcagauccccuucgcgaugcagauggccuaccgguucaacggcaucggggucacccagaacgugcucuacgagaaccagaagcugaucgccaaccaguucaacagcgccaucggcaagauccaggacucccugagcuccaccgccagcgcgcucgggaagcugcaggacguggucaaccagaacgcccaggcccugaacacgcucgugaagcagcuguccagcaacuucggcgccaucuccagcgugcugaacgacauccucucccgccuggacaaggucgaggccgaggugcagaucgaccggcugaucaccgggcgccuccagagccugcagaccuacgugacccagcagcugauccgggcggccgagauccgcgccagcgccaaccucgccgcgaccaagauguccgagugcguccugggccagagcaagcggguggacuucugcggcaagggguaccaccugauguccuucccccagagcgccccgcacggcguggucuuccuccacgugacguacguccccgcccaggagaagaacuucaccaccgcccccgcgaucugccacgacgggaaggcccacuucccccgcgagggcguguucguguccaacgggacccacugguucgucacgcagcggaacuucuacgagccgcagaucaucaccaccgacaacaccuucgugagcggcaacugcgacguggucaucggcaucgugaacaacacgguguacgacccccugcagcccgagcuggacuccuucaaggaggagcucgacaaguacuucaagaaccacaccagccccgacgucgaccugggggacaucuccggcaucaacgccagcguggugaacauccagaaggagaucgaccgccugaacgaggucgccaagaaccucaacgagucccugaucgaccugcaggagcucgggaaguacgagcaguacaucaaguggccgugguacaucuggcugggcuucaucgccggccugaucgcgaucgugauggugaccaucaugcucugcugcaugaccagcugcugcuccugccugaaggggugcugcagcugcggcuccugcugcaaguucgacgaggacgacagcgagcccguccugaagggggugaagcuccacuacacgugaggacuaguuauaagacugacuagcccgaugggccucccaacgggcccuccuccccuccuugcaccgagauuaauaaaaaaaaaaaaaaaaaaaaaaaaaaaaaaaaaaaaaaaaaaaaaaaaaaaaaaaaaaaaaaaaaaaaaaaaaaaaaaaaaaaaaaaaaaaaaaaaaaaa

SEQ ID NO: 25397 - RNA, 4011 nt, Artificial Sequence
  SARS-CoV-2/Wuhan/WIV05/2019__EPI_ISL_402128 spike protein mRNA gc (1-1273)(D614G_I692V)
aggagaaagcuuaccauguucguguuccugguccuccugccccuggugagcucccagugcgugaaccucaccacccgcacgcagcugccgcccgccuacaccaacagcuucacccggggcgucuacuaccccgacaagguguuccgcuccagcgugcugcacuccacccaggaccucuuccugcccuucuucagcaacgucacgugguuccacgccauccacguguccgggaccaacggcaccaagcgguucgacaacccggugcugcccuucaacgacggggucuacuucgcgagcaccgagaaguccaacaucauccgcggcuggaucuucgggacgacccucgacagcaagacccagucccugcugaucgugaacaacgccaccaacguggucaucaaggugugcgaguuccaguucugcaacgaccccuuccucggcguguacuaccacaagaacaacaagagcuggauggaguccgaguuccgggucuacagcuccgccaacaacugcacguucgaguacgugagccagcccuuccugauggaccuggagggcaagcaggggaacuucaagaaccuccgcgaguucguguucaagaacaucgacggcuacuucaagaucuacuccaagcacaccccgaucaaccugguccgggaccugccccagggguucagcgcccucgagccccugguggaccugcccaucggcaucaacaucacccgcuuccagacccuccuggcccugcaccgguccuaccucacgccgggggacagcagcuccggcuggaccgcgggcgccgccgccuacuacgugggguaccugcagccccgcaccuuccugcucaaguacaacgagaacggcaccaucacggacgcggucgacugcgcccuggacccccugagcgagaccaagugcacccucaaguccuucaccguggagaaggggaucuaccagacgagcaacuuccgggugcagcccaccgaguccaucguccgcuucccgaacaucaccaaccugugccccuucggcgagguguucaacgccacccgguucgccagcgucuacgccuggaaccgcaagcggaucuccaacugcguggcggacuacagcgugcuguacaacuccgccagcuucuccacguucaagugcuacggcgucagccccaccaagcucaacgaccugugcuucaccaacguguacgccgacuccuucgugauccgcggggacgagguccggcagaucgcccccggccagaccgggaagaucgccgacuacaacuacaagcugccggacgacuucacgggcugcgugaucgcguggaacagcaacaaccucgacuccaaggucgggggcaacuacaacuaccuguaccgccuguuccgcaagagcaaccucaagcccuucgagcgggacaucuccaccgagaucuaccaggccggcagcacccccugcaacgggguggagggcuucaacugcuacuucccccugcaguccuacggguuccagccgaccaacggcgugggguaccagcccuaccggguggucgugcugagcuucgagcuccugcacgcccccgccacggugugcggccccaagaaguccaccaaccuggucaagaacaagugcgugaacuucaacuucaacggccucaccgggaccggcgugcugaccgagagcaacaagaaguuccugccguuccagcaguucgggcgcgacaucgccgacacgaccgacgcgguccgcgacccccagacccuggagauccucgacaucacccccugcagcuucggcgggguguccgugaucacgccgggcaccaacaccagcaaccaggucgccgugcuguaccagggcgugaacugcaccgagguccccguggccauccacgccgaccagcugacgcccaccuggcggguguacuccaccggcagcaacgucuuccagacccgcgccgggugccucaucggcgcggagcacgugaacaacuccuacgagugcgacauccccaucggggccggcaucugcgccagcuaccagacgcagaccaacuccccgcggcgcgcccggagcguggcgucccagagcgucaucgccuacaccaugucccugggcgccgagaacagcgucgccuacuccaacaacagcaucgccauccccaccaacuucacgaucuccgugaccaccgagauccugcccgugagcaugaccaagacgagcgucgacugcaccauguacaucugcggggacuccaccgagugcagcaaccuccugcugcaguacggcuccuucugcacccagcucaaccgcgcgcugacggggaucgccguggagcaggacaagaacacccaggagguguucgcccaggucaagcagaucuacaagacgcccccgaucaaggacuucggcggguucaacuucagccagauccugcccgaccccuccaagcccagcaagcgguccuucaucgaggaccuccuguucaacaaggugacccuggccgacgccggcuucaucaagcaguacggcgacugccucggggacaucgcggcccgcgaccugaucugcgcccagaaguucaacggccugaccgugcucccgccccugcugaccgacgagaugaucgcccaguacaccagcgcccuccuggcggggaccaucacguccggcuggaccuucggggccggcgccgcccugcagauccccuucgcgaugcagauggccuaccgguucaacggcaucggggucacccagaacgugcucuacgagaaccagaagcugaucgccaaccaguucaacagcgccaucggcaagauccaggacucccugagcuccaccgccagcgcgcucgggaagcugcaggacguggucaaccagaacgcccaggcccugaacacgcucgugaagcagcuguccagcaacuucggcgccaucuccagcgugcugaacgacauccucucccgccuggacaaggucgaggccgaggugcagaucgaccggcugaucaccgggcgccuccagagccugcagaccuacgugacccagcagcugauccgggcggccgagauccgcgccagcgccaaccucgccgcgaccaagauguccgagugcguccugggccagagcaagcggguggacuucugcggcaagggguaccaccugauguccuucccccagagcgccccgcacggcguggucuuccuccacgugacguacguccccgcccaggagaagaacuucaccaccgcccccgcgaucugccacgacgggaaggcccacuucccccgcgagggcguguucguguccaacgggacccacugguucgucacgcagcggaacuucuacgagccgcagaucaucaccaccgacaacaccuucgugagcggcaacugcgacguggucaucggcaucgugaacaacacgguguacgacccccugcagcccgagcuggacuccuucaaggaggagcucgacaaguacuucaagaaccacaccagccccgacgucgaccugggggacaucuccggcaucaacgccagcguggugaacauccagaaggagaucgaccgccugaacgaggucgccaagaaccucaacgagucccugaucgaccugcaggagcucgggaaguacgagcaguacaucaaguggccgugguacaucuggcugggcuucaucgccggccugaucgcgaucgugauggugaccaucaugcucugcugcaugaccagcugcugcuccugccugaaggggugcugcagcugcggcuccugcugcaaguucgacgaggacgacagcgagcccguccugaagggggugaagcuccacuacacgugaggacuaguuauaagacugacuagcccgaugggccucccaacgggcccuccuccccuccuugcaccgagauuaauaaaaaaaaaaaaaaaaaaaaaaaaaaaaaaaaaaaaaaaaaaaaaaaaaaaaaaaaaaaaaaaaaaaaaaaaaaaaaaaaaaaaaaaaaaaaaaaaaaaa

SEQ ID NO: 25398 - RNA, 4011 nt, Artificial Sequence
  SARS-CoV-2/Wuhan/WIV05/2019__EPI_ISL_402128 spike protein mRNA gc (1-1273)(D614G_M1229I)
aggagaaagcuuaccauguucguguuccugguccuccugccccuggugagcucccagugcgugaaccucaccacccgcacgcagcugccgcccgccuacaccaacagcuucacccggggcgucuacuaccccgacaagguguuccgcuccagcgugcugcacuccacccaggaccucuuccugcccuucuucagcaacgucacgugguuccacgccauccacguguccgggaccaacggcaccaagcgguucgacaacccggugcugcccuucaacgacggggucuacuucgcgagcaccgagaaguccaacaucauccgcggcuggaucuucgggacgacccucgacagcaagacccagucccugcugaucgugaacaacgccaccaacguggucaucaaggugugcgaguuccaguucugcaacgaccccuuccucggcguguacuaccacaagaacaacaagagcuggauggaguccgaguuccgggucuacagcuccgccaacaacugcacguucgaguacgugagccagcccuuccugauggaccuggagggcaagcaggggaacuucaagaaccuccgcgaguucguguucaagaacaucgacggcuacuucaagaucuacuccaagcacaccccgaucaaccugguccgggaccugccccagggguucagcgcccucgagccccugguggaccugcccaucggcaucaacaucacccgcuuccagacccuccuggcccugcaccgguccuaccucacgccgggggacagcagcuccggcuggaccgcgggcgccgccgccuacuacgugggguaccugcagccccgcaccuuccugcucaaguacaacgagaacggcaccaucacggacgcggucgacugcgcccuggacccccugagcgagaccaagugcacccucaaguccuucaccguggagaaggggaucuaccagacgagcaacuuccgggugcagcccaccgaguccaucguccgcuucccgaacaucaccaaccugugccccuucggcgagguguucaacgccacccgguucgccagcgucuacgccuggaaccgcaagcggaucuccaacugcguggcggacuacagcgugcuguacaacuccgccagcuucuccacguucaagugcuacggcgucagccccaccaagcucaacgaccugugcuucaccaacguguacgccgacuccuucgugauccgcggggacgagguccggcagaucgcccccggccagaccgggaagaucgccgacuacaacuacaagcugccggacgacuucacgggcugcgugaucgcguggaacagcaacaaccucgacuccaaggucgggggcaacuacaacuaccuguaccgccuguuccgcaagagcaaccucaagcccuucgagcgggacaucuccaccgagaucuaccaggccggcagcacccccugcaacgggguggagggcuucaacugcuacuucccccugcaguccuacggguuccagccgaccaacggcgugggguaccagcccuaccggguggucgugcugagcuucgagcuccugcacgcccccgccacggugugcggccccaagaaguccaccaaccuggucaagaacaagugcgugaacuucaacuucaacggccucaccgggaccggcgugcugaccgagagcaacaagaaguuccugccguuccagcaguucgggcgcgacaucgccgacacgaccgacgcgguccgcgacccccagacccuggagauccucgacaucacccccugcagcuucggcgggguguccgugaucacgccgggcaccaacaccagcaaccaggucgccgugcuguaccagggcgugaacugcaccgagguccccguggccauccacgccgaccagcugacgcccaccuggcggguguacuccaccggcagcaacgucuuccagacccgcgccgggugccucaucggcgcggagcacgugaacaacuccuacgagugcgacauccccaucggggccggcaucugcgccagcuaccagacgcagaccaacuccccgcggcgcgcccggagcguggcgucccagagcaucaucgccuacaccaugucccugggcgccgagaacagcgucgccuacuccaacaacagcaucgccauccccaccaacuucacgaucuccgugaccaccgagauccugcccgugagcaugaccaagacgagcgucgacugcaccauguacaucugcggggacuccaccgagugcagcaaccuccugcugcaguacggcuccuucugcacccagcucaaccgcgcgcugacggggaucgccguggagcaggacaagaacacccaggagguguucgcccaggucaagcagaucuacaagacgcccccgaucaaggacuucggcggguucaacuucagccagauccugcccgaccccuccaagcccagcaagcgguccuucaucgaggaccuccuguucaacaaggugacccuggccgacgccggcuucaucaagcaguacggcgacugccucggggacaucgcggcccgcgaccugaucugcgcccagaaguucaacggccugaccgugcucccgccccugcugaccgacgagaugaucgcccaguacaccagcgcccuccuggcggggaccaucacguccggcuggaccuucggggccggcgccgcccugcagauccccuucgcgaugcagauggccuaccgguucaacggcaucggggucacccagaacgugcucuacgagaaccagaagcugaucgccaaccaguucaacagcgccaucggcaagauccaggacucccugagcuccaccgccagcgcgcucgggaagcugcaggacguggucaaccagaacgcccaggcccugaacacgcucgugaagcagcuguccagcaacuucggcgccaucuccagcgugcugaacgacauccucucccgccuggacaaggucgaggccgaggugcagaucgaccggcugaucaccgggcgccuccagagccugcagaccuacgugacccagcagcugauccgggcggccgagauccgcgccagcgccaaccucgccgcgaccaagauguccgagugcguccugggccagagcaagcggguggacuucugcggcaagggguaccaccugauguccuucccccagagcgccccgcacggcguggucuuccuccacgugacguacguccccgcccaggagaagaacuucaccaccgcccccgcgaucugccacgacgggaaggcccacuucccccgcgagggcguguucguguccaacgggacccacugguucgucacgcagcggaacuucuacgagccgcagaucaucaccaccgacaacaccuucgugagcggcaacugcgacguggucaucggcaucgugaacaacacgguguacgacccccugcagcccgagcuggacuccuucaaggaggagcucgacaaguacuucaagaaccacaccagccccgacgucgaccugggggacaucuccggcaucaacgccagcguggugaacauccagaaggagaucgaccgccugaacgaggucgccaagaaccucaacgagucccugaucgaccugcaggagcucgggaaguacgagcaguacaucaaguggccgugguacaucuggcugggcuucaucgccggccugaucgcgaucgugaucgugaccaucaugcucugcugcaugaccagcugcugcuccugccugaaggggugcugcagcugcggcuccugcugcaaguucgacgaggacgacagcgagcccguccugaagggggugaagcuccacuacacgugaggacuaguuauaagacugacuagcccgaugggccucccaacgggcccuccuccccuccuugcaccgagauuaauaaaaaaaaaaaaaaaaaaaaaaaaaaaaaaaaaaaaaaaaaaaaaaaaaaaaaaaaaaaaaaaaaaaaaaaaaaaaaaaaaaaaaaaaaaaaaaaaaaaa

SEQ ID NO: 25399 - RNA, 4005 nt, Artificial Sequence
  SARS-CoV-2/Wuhan/WIV05/2019__EPI_ISL_402128 spike protein mRNA gc (1-1273)(H69del_V70del_A222V_Y453F_S477N_D614G_I692V)
aggagaaagcuuaccauguucguguuccugguccuccugccccuggugagcucccagugcgugaaccucaccacccgcacgcagcugccgcccgccuacaccaacagcuucacccggggcgucuacuaccccgacaagguguuccgcuccagcgugcugcacuccacccaggaccucuuccugcccuucuucagcaacgucacgugguuccacgccaucuccgggaccaacggcaccaagcgguucgacaacccggugcugcccuucaacgacggggucuacuucgcgagcaccgagaaguccaacaucauccgcggcuggaucuucgggacgacccucgacagcaagacccagucccugcugaucgugaacaacgccaccaacguggucaucaaggugugcgaguuccaguucugcaacgaccccuuccucggcguguacuaccacaagaacaacaagagcuggauggaguccgaguuccgggucuacagcuccgccaacaacugcacguucgaguacgugagccagcccuuccugauggaccuggagggcaagcaggggaacuucaagaaccuccgcgaguucguguucaagaacaucgacggcuacuucaagaucuacuccaagcacaccccgaucaaccugguccgggaccugccccagggguucagcguccucgagccccugguggaccugcccaucggcaucaacaucacccgcuuccagacccuccuggcccugcaccgguccuaccucacgccgggggacagcagcuccggcuggaccgcgggcgccgccgccuacuacgugggguaccugcagccccgcaccuuccugcucaaguacaacgagaacggcaccaucacggacgcggucgacugcgcccuggacccccugagcgagaccaagugcacccucaaguccuucaccguggagaaggggaucuaccagacgagcaacuuccgggugcagcccaccgaguccaucguccgcuucccgaacaucaccaaccugugccccuucggcgagguguucaacgccacccgguucgccagcgucuacgccuggaaccgcaagcggaucuccaacugcguggcggacuacagcgugcuguacaacuccgccagcuucuccacguucaagugcuacggcgucagccccaccaagcucaacgaccugugcuucaccaacguguacgccgacuccuucgugauccgcggggacgagguccggcagaucgcccccggccagaccgggaagaucgccgacuacaacuacaagcugccggacgacuucacgggcugcgugaucgcguggaacagcaacaaccucgacuccaaggucgggggcaacuacaacuaccuguuccgccuguuccgcaagagcaaccucaagcccuucgagcgggacaucuccaccgagaucuaccaggccggcaacacccccugcaacgggguggagggcuucaacugcuacuucccccugcaguccuacggguuccagccgaccaacggcgugggguaccagcccuaccggguggucgugcugagcuucgagcuccugcacgcccccgccacggugugcggccccaagaaguccaccaaccuggucaagaacaagugcgugaacuucaacuucaacggccucaccgggaccggcgugcugaccgagagcaacaagaaguuccugccguuccagcaguucgggcgcgacaucgccgacacgaccgacgcgguccgcgacccccagacccuggagauccucgacaucacccccugcagcuucggcgggguguccgugaucacgccgggcaccaacaccagcaaccaggucgccgugcuguaccagggcgugaacugcaccgagguccccguggccauccacgccgaccagcugacgcccaccuggcggguguacuccaccggcagcaacgucuuccagacccgcgccgggugccucaucggcgcggagcacgugaacaacuccuacgagugcgacauccccaucggggccggcaucugcgccagcuaccagacgcagaccaacuccccgcggcgcgcccggagcguggcgucccagagcgucaucgccuacaccaugucccugggcgccgagaacagcgucgccuacuccaacaacagcaucgccauccccaccaacuucacgaucuccgugaccaccgagauccugcccgugagcaugaccaagacgagcgucgacugcaccauguacaucugcggggacuccaccgagugcagcaaccuccugcugcaguacggcuccuucugcacccagcucaaccgcgcgcugacggggaucgccguggagcaggacaagaacacccaggagguguucgcccaggucaagcagaucuacaagacgcccccgaucaaggacuucggcggguucaacuucagccagauccugcccgaccccuccaagcccagcaagcgguccuucaucgaggaccuccuguucaacaaggugacccuggccgacgccggcuucaucaagcaguacggcgacugccucggggacaucgcggcccgcgaccugaucugcgcccagaaguucaacggccugaccgugcucccgccccugcugaccgacgagaugaucgcccaguacaccagcgcccuccuggcggggaccaucacguccggcuggaccuucggggccggcgccgcccugcagauccccuucgcgaugcagauggccuaccgguucaacggcaucggggucacccagaacgugcucuacgagaaccagaagcugaucgccaaccaguucaacagcgccaucggcaagauccaggacucccugagcuccaccgccagcgcgcucgggaagcugcaggacguggucaaccagaacgcccaggcccugaacacgcucgugaagcagcuguccagcaacuucggcgccaucuccagcgugcugaacgacauccucucccgccuggacaaggucgaggccgaggugcagaucgaccggcugaucaccgggcgccuccagagccugcagaccuacgugacccagcagcugauccgggcggccgagauccgcgccagcgccaaccucgccgcgaccaagauguccgagugcguccugggccagagcaagcggguggacuucugcggcaagggguaccaccugauguccuucccccagagcgccccgcacggcguggucuuccuccacgugacguacguccccgcccaggagaagaacuucaccaccgcccccgcgaucugccacgacgggaaggcccacuucccccgcgagggcguguucguguccaacgggacccacugguucgucacgcagcggaacuucuacgagccgcagaucaucaccaccgacaacaccuucgugagcggcaacugcgacguggucaucggcaucgugaacaacacgguguacgacccccugcagcccgagcuggacuccuucaaggaggagcucgacaaguacuucaagaaccacaccagccccgacgucgaccugggggacaucuccggcaucaacgccagcguggugaacauccagaaggagaucgaccgccugaacgaggucgccaagaaccucaacgagucccugaucgaccugcaggagcucgggaaguacgagcaguacaucaaguggccgugguacaucuggcugggcuucaucgccggccugaucgcgaucgugauggugaccaucaugcucugcugcaugaccagcugcugcuccugccugaaggggugcugcagcugcggcuccugcugcaaguucgacgaggacgacagcgagcccguccugaagggggugaagcuccacuacacgugaggacuaguuauaagacugacuagcccgaugggccucccaacgggcccuccuccccuccuugcaccgagauuaauaaaaaaaaaaaaaaaaaaaaaaaaaaaaaaaaaaaaaaaaaaaaaaaaaaaaaaaaaaaaaaaaaaaaaaaaaaaaaaaaaaaaaaaaaaaaaaaaaaaa

SEQ ID NO: 25400 - RNA, 4005 nt, Artificial Sequence
  SARS-CoV-2/Wuhan/WIV05/2019__EPI_ISL_402128 spike protein mRNA gc (1-1273)(H69del_V70del_Y453F_D614G_I692V_M1229I)
aggagaaagcuuaccauguucguguuccugguccuccugccccuggugagcucccagugcgugaaccucaccacccgcacgcagcugccgcccgccuacaccaacagcuucacccggggcgucuacuaccccgacaagguguuccgcuccagcgugcugcacuccacccaggaccucuuccugcccuucuucagcaacgucacgugguuccacgccaucuccgggaccaacggcaccaagcgguucgacaacccggugcugcccuucaacgacggggucuacuucgcgagcaccgagaaguccaacaucauccgcggcuggaucuucgggacgacccucgacagcaagacccagucccugcugaucgugaacaacgccaccaacguggucaucaaggugugcgaguuccaguucugcaacgaccccuuccucggcguguacuaccacaagaacaacaagagcuggauggaguccgaguuccgggucuacagcuccgccaacaacugcacguucgaguacgugagccagcccuuccugauggaccuggagggcaagcaggggaacuucaagaaccuccgcgaguucguguucaagaacaucgacggcuacuucaagaucuacuccaagcacaccccgaucaaccugguccgggaccugccccagggguucagcgcccucgagccccugguggaccugcccaucggcaucaacaucacccgcuuccagacccuccuggcccugcaccgguccuaccucacgccgggggacagcagcuccggcuggaccgcgggcgccgccgccuacuacgugggguaccugcagccccgcaccuuccugcucaaguacaacgagaacggcaccaucacggacgcggucgacugcgcccuggacccccugagcgagaccaagugcacccucaaguccuucaccguggagaaggggaucuaccagacgagcaacuuccgggugcagcccaccgaguccaucguccgcuucccgaacaucaccaaccugugccccuucggcgagguguucaacgccacccgguucgccagcgucuacgccuggaaccgcaagcggaucuccaacugcguggcggacuacagcgugcuguacaacuccgccagcuucuccacguucaagugcuacggcgucagccccaccaagcucaacgaccugugcuucaccaacguguacgccgacuccuucgugauccgcggggacgagguccggcagaucgcccccggccagaccgggaagaucgccgacuacaacuacaagcugccggacgacuucacgggcugcgugaucgcguggaacagcaacaaccucgacuccaaggucgggggcaacuacaacuaccuguuccgccuguuccgcaagagcaaccucaagcccuucgagcgggacaucuccaccgagaucuaccaggccggcagcacccccugcaacgggguggagggcuucaacugcuacuucccccugcaguccuacggguuccagccgaccaacggcgugggguaccagcccuaccggguggucgugcugagcuucgagcuccugcacgcccccgccacggugugcggccccaagaaguccaccaaccuggucaagaacaagugcgugaacuucaacuucaacggccucaccgggaccggcgugcugaccgagagcaacaagaaguuccugccguuccagcaguucgggcgcgacaucgccgacacgaccgacgcgguccgcgacccccagacccuggagauccucgacaucacccccugcagcuucggcgggguguccgugaucacgccgggcaccaacaccagcaaccaggucgccgugcuguaccagggcgugaacugcaccgagguccccguggccauccacgccgaccagcugacgcccaccuggcggguguacuccaccggcagcaacgucuuccagacccgcgccgggugccucaucggcgcggagcacgugaacaacuccuacgagugcgacauccccaucggggccggcaucugcgccagcuaccagacgcagaccaacuccccgcggcgcgcccggagcguggcgucccagagcgugaucgccuacaccaugucccugggcgccgagaacagcgucgccuacuccaacaacagcaucgccauccccaccaacuucacgaucuccgugaccaccgagauccugcccgugagcaugaccaagacgagcgucgacugcaccauguacaucugcggggacuccaccgagugcagcaaccuccugcugcaguacggcuccuucugcacccagcucaaccgcgcgcugacggggaucgccguggagcaggacaagaacacccaggagguguucgcccaggucaagcagaucuacaagacgcccccgaucaaggacuucggcggguucaacuucagccagauccugcccgaccccuccaagcccagcaagcgguccuucaucgaggaccuccuguucaacaaggugacccuggccgacgccggcuucaucaagcaguacggcgacugccucggggacaucgcggcccgcgaccugaucugcgcccagaaguucaacggccugaccgugcucccgccccugcugaccgacgagaugaucgcccaguacaccagcgcccuccuggcggggaccaucacguccggcuggaccuucggggccggcgccgcccugcagauccccuucgcgaugcagauggccuaccgguucaacggcaucggggucacccagaacgugcucuacgagaaccagaagcugaucgccaaccaguucaacagcgccaucggcaagauccaggacucccugagcuccaccgccagcgcgcucgggaagcugcaggacguggucaaccagaacgcccaggcccugaacacgcucgugaagcagcuguccagcaacuucggcgccaucuccagcgugcugaacgacauccucucccgccuggacaaggucgaggccgaggugcagaucgaccggcugaucaccgggcgccuccagagccugcagaccuacgugacccagcagcugauccgggcggccgagauccgcgccagcgccaaccucgccgcgaccaagauguccgagugcguccugggccagagcaagcggguggacuucugcggcaagggguaccaccugauguccuucccccagagcgccccgcacggcguggucuuccuccacgugacguacguccccgcccaggagaagaacuucaccaccgcccccgcgaucugccacgacgggaaggcccacuucccccgcgagggcguguucguguccaacgggacccacugguucgucacgcagcggaacuucuacgagccgcagaucaucaccaccgacaacaccuucgugagcggcaacugcgacguggucaucggcaucgugaacaacacgguguacgacccccugcagcccgagcuggacuccuucaaggaggagcucgacaaguacuucaagaaccacaccagccccgacgucgaccugggggacaucuccggcaucaacgccagcguggugaacauccagaaggagaucgaccgccugaacgaggucgccaagaaccucaacgagucccugaucgaccugcaggagcucgggaaguacgagcaguacaucaaguggccgugguacaucuggcugggcuucaucgccggccugaucgcgaucgugaucgugaccaucaugcucugcugcaugaccagcugcugcuccugccugaaggggugcugcagcugcggcuccugcugcaaguucgacgaggacgacagcgagcccguccugaagggggugaagcuccacuacacgugaggacuaguuauaagacugacuagcccgaugggccucccaacgggcccuccuccccuccuugcaccgagauuaauaaaaaaaaaaaaaaaaaaaaaaaaaaaaaaaaaaaaaaaaaaaaaaaaaaaaaaaaaaaaaaaaaaaaaaaaaaaaaaaaaaaaaaaaaaaaaaaaaaaa

SEQ ID NO: 25401 - RNA, 4002 nt, Artificial Sequence
  SARS-CoV-2/Wuhan/WIV05/2019__EPI_ISL_402128 spike protein mRNA gc (1-1273)(H69del_V70del_Y144del_N501Y_A570D_D614G_P681H_T716I_S982 A_D1118H)
aggagaaagcuuaccauguucguguuccugguccuccugccccuggugagcucccagugcgugaaccucaccacccgcacgcagcugccgcccgccuacaccaacagcuucacccggggcgucuacuaccccgacaagguguuccgcuccagcgugcugcacuccacccaggaccucuuccugcccuucuucagcaacgucacgugguuccacgccaucuccgggaccaacggcaccaagcgguucgacaacccggugcugcccuucaacgacggggucuacuucgcgagcaccgagaaguccaacaucauccgcggcuggaucuucgggacgacccucgacagcaagacccagucccugcugaucgugaacaacgccaccaacguggucaucaaggugugcgaguuccaguucugcaacgaccccuuccucggcguguaccacaagaacaacaagagcuggauggaguccgaguuccgggucuacagcuccgccaacaacugcacguucgaguacgugagccagcccuuccugauggaccuggagggcaagcaggggaacuucaagaaccuccgcgaguucguguucaagaacaucgacggcuacuucaagaucuacuccaagcacaccccgaucaaccugguccgggaccugccccagggguucagcgcccucgagccccugguggaccugcccaucggcaucaacaucacccgcuuccagacccuccuggcccugcaccgguccuaccucacgccgggggacagcagcuccggcuggaccgcgggcgccgccgccuacuacgugggguaccugcagccccgcaccuuccugcucaaguacaacgagaacggcaccaucacggacgcggucgacugcgcccuggacccccugagcgagaccaagugcacccucaaguccuucaccguggagaaggggaucuaccagacgagcaacuuccgggugcagcccaccgaguccaucguccgcuucccgaacaucaccaaccugugccccuucggcgagguguucaacgccacccgguucgccagcgucuacgccuggaaccgcaagcggaucuccaacugcguggcggacuacagcgugcuguacaacuccgccagcuucuccacguucaagugcuacggcgucagccccaccaagcucaacgaccugugcuucaccaacguguacgccgacuccuucgugauccgcggggacgagguccggcagaucgcccccggccagaccgggaagaucgccgacuacaacuacaagcugccggacgacuucacgggcugcgugaucgcguggaacagcaacaaccucgacuccaaggucgggggcaacuacaacuaccuguaccgccuguuccgcaagagcaaccucaagcccuucgagcgggacaucuccaccgagaucuaccaggccggcagcacccccugcaacgggguggagggcuucaacugcuacuucccccugcaguccuacggguuccagccgaccuacggcgugggguaccagcccuaccggguggucgugcugagcuucgagcuccugcacgcccccgccacggugugcggccccaagaaguccaccaaccuggucaagaacaagugcgugaacuucaacuucaacggccucaccgggaccggcgugcugaccgagagcaacaagaaguuccugccguuccagcaguucgggcgcgacaucgacgacacgaccgacgcgguccgcgacccccagacccuggagauccucgacaucacccccugcagcuucggcgggguguccgugaucacgccgggcaccaacaccagcaaccaggucgccgugcuguaccagggcgugaacugcaccgagguccccguggccauccacgccgaccagcugacgcccaccuggcggguguacuccaccggcagcaacgucuuccagacccgcgccgggugccucaucggcgcggagcacgugaacaacuccuacgagugcgacauccccaucggggccggcaucugcgccagcuaccagacgcagaccaacucccaccggcgcgcccggagcguggcgucccagagcaucaucgccuacaccaugucccugggcgccgagaacagcgucgccuacuccaacaacagcaucgccauccccaucaacuucacgaucuccgugaccaccgagauccugcccgugagcaugaccaagacgagcgucgacugcaccauguacaucugcggggacuccaccgagugcagcaaccuccugcugcaguacggcuccuucugcacccagcucaaccgcgcgcugacggggaucgccguggagcaggacaagaacacccaggagguguucgcccaggucaagcagaucuacaagacgcccccgaucaaggacuucggcggguucaacuucagccagauccugcccgaccccuccaagcccagcaagcgguccuucaucgaggaccuccuguucaacaaggugacccuggccgacgccggcuucaucaagcaguacggcgacugccucggggacaucgcggcccgcgaccugaucugcgcccagaaguucaacggccugaccgugcucccgccccugcugaccgacgagaugaucgcccaguacaccagcgcccuccuggcggggaccaucacguccggcuggaccuucggggccggcgccgcccugcagauccccuucgcgaugcagauggccuaccgguucaacggcaucggggucacccagaacgugcucuacgagaaccagaagcugaucgccaaccaguucaacagcgccaucggcaagauccaggacucccugagcuccaccgccagcgcgcucgggaagcugcaggacguggucaaccagaacgcccaggcccugaacacgcucgugaagcagcuguccagcaacuucggcgccaucuccagcgugcugaacgacauccucgcccgccuggacaaggucgaggccgaggugcagaucgaccggcugaucaccgggcgccuccagagccugcagaccuacgugacccagcagcugauccgggcggccgagauccgcgccagcgccaaccucgccgcgaccaagauguccgagugcguccugggccagagcaagcggguggacuucugcggcaagggguaccaccugauguccuucccccagagcgccccgcacggcguggucuuccuccacgugacguacguccccgcccaggagaagaacuucaccaccgcccccgcgaucugccacgacgggaaggcccacuucccccgcgagggcguguucguguccaacgggacccacugguucgucacgcagcggaacuucuacgagccgcagaucaucaccacccacaacaccuucgugagcggcaacugcgacguggucaucggcaucgugaacaacacgguguacgacccccugcagcccgagcuggacuccuucaaggaggagcucgacaaguacuucaagaaccacaccagccccgacgucgaccugggggacaucuccggcaucaacgccagcguggugaacauccagaaggagaucgaccgccugaacgaggucgccaagaaccucaacgagucccugaucgaccugcaggagcucgggaaguacgagcaguacaucaaguggccgugguacaucuggcugggcuucaucgccggccugaucgcgaucgugauggugaccaucaugcucugcugcaugaccagcugcugcuccugccugaaggggugcugcagcugcggcuccugcugcaaguucgacgaggacgacagcgagcccguccugaagggggugaagcuccacuacacgugaggacuaguuauaagacugacuagcccgaugggccucccaacgggcccuccuccccuccuugcaccgagauuaauaaaaaaaaaaaaaaaaaaaaaaaaaaaaaaaaaaaaaaaaaaaaaaaaaaaaaaaaaaaaaaaaaaaaaaaaaaaaaaaaaaaaaaaaaaaaaaaaaaaa

SEQ ID NO: 25402 - RNA, 4011 nt, Artificial Sequence
  SARS-CoV-2/Wuhan/WIV05/2019__EPI_ISL_402128 spike protein mRNA gc (1-1273)(K417N_E484K_N501Y_D614G)
aggagaaagcuuaccauguucguguuccugguccuccugccccuggugagcucccagugcgugaaccucaccacccgcacgcagcugccgcccgccuacaccaacagcuucacccggggcgucuacuaccccgacaagguguuccgcuccagcgugcugcacuccacccaggaccucuuccugcccuucuucagcaacgucacgugguuccacgccauccacguguccgggaccaacggcaccaagcgguucgacaacccggugcugcccuucaacgacggggucuacuucgcgagcaccgagaaguccaacaucauccgcggcuggaucuucgggacgacccucgacagcaagacccagucccugcugaucgugaacaacgccaccaacguggucaucaaggugugcgaguuccaguucugcaacgaccccuuccucggcguguacuaccacaagaacaacaagagcuggauggaguccgaguuccgggucuacagcuccgccaacaacugcacguucgaguacgugagccagcccuuccugauggaccuggagggcaagcaggggaacuucaagaaccuccgcgaguucguguucaagaacaucgacggcuacuucaagaucuacuccaagcacaccccgaucaaccugguccgggaccugccccagggguucagcgcccucgagccccugguggaccugcccaucggcaucaacaucacccgcuuccagacccuccuggcccugcaccgguccuaccucacgccgggggacagcagcuccggcuggaccgcgggcgccgccgccuacuacgugggguaccugcagccccgcaccuuccugcucaaguacaacgagaacggcaccaucacggacgcggucgacugcgcccuggacccccugagcgagaccaagugcacccucaaguccuucaccguggagaaggggaucuaccagacgagcaacuuccgggugcagcccaccgaguccaucguccgcuucccgaacaucaccaaccugugccccuucggcgagguguucaacgccacccgguucgccagcgucuacgccuggaaccgcaagcggaucuccaacugcguggcggacuacagcgugcuguacaacuccgccagcuucuccacguucaagugcuacggcgucagccccaccaagcucaacgaccugugcuucaccaacguguacgccgacuccuucgugauccgcggggacgagguccggcagaucgcccccggccagaccgggaacaucgccgacuacaacuacaagcugccggacgacuucacgggcugcgugaucgcguggaacagcaacaaccucgacuccaaggucgggggcaacuacaacuaccuguaccgccuguuccgcaagagcaaccucaagcccuucgagcgggacaucuccaccgagaucuaccaggccggcagcacccccugcaacggggugaagggcuucaacugcuacuucccccugcaguccuacggguuccagccgaccuacggcgugggguaccagcccuaccggguggucgugcugagcuucgagcuccugcacgcccccgccacggugugcggccccaagaaguccaccaaccuggucaagaacaagugcgugaacuucaacuucaacggccucaccgggaccggcgugcugaccgagagcaacaagaaguuccugccguuccagcaguucgggcgcgacaucgccgacacgaccgacgcgguccgcgacccccagacccuggagauccucgacaucacccccugcagcuucggcgggguguccgugaucacgccgggcaccaacaccagcaaccaggucgccgugcuguaccagggcgugaacugcaccgagguccccguggccauccacgccgaccagcugacgcccaccuggcggguguacuccaccggcagcaacgucuuccagacccgcgccgggugccucaucggcgcggagcacgugaacaacuccuacgagugcgacauccccaucggggccggcaucugcgccagcuaccagacgcagaccaacuccccgcggcgcgcccggagcguggcgucccagagcaucaucgccuacaccaugucccugggcgccgagaacagcgucgccuacuccaacaacagcaucgccauccccaccaacuucacgaucuccgugaccaccgagauccugcccgugagcaugaccaagacgagcgucgacugcaccauguacaucugcggggacuccaccgagugcagcaaccuccugcugcaguacggcuccuucugcacccagcucaaccgcgcgcugacggggaucgccguggagcaggacaagaacacccaggagguguucgcccaggucaagcagaucuacaagacgcccccgaucaaggacuucggcggguucaacuucagccagauccugcccgaccccuccaagcccagcaagcgguccuucaucgaggaccuccuguucaacaaggugacccuggccgacgccggcuucaucaagcaguacggcgacugccucggggacaucgcggcccgcgaccugaucugcgcccagaaguucaacggccugaccgugcucccgccccugcugaccgacgagaugaucgcccaguacaccagcgcccuccuggcggggaccaucacguccggcuggaccuucggggccggcgccgcccugcagauccccuucgcgaugcagauggccuaccgguucaacggcaucggggucacccagaacgugcucuacgagaaccagaagcugaucgccaaccaguucaacagcgccaucggcaagauccaggacucccugagcuccaccgccagcgcgcucgggaagcugcaggacguggucaaccagaacgcccaggcccugaacacgcucgugaagcagcuguccagcaacuucggcgccaucuccagcgugcugaacgacauccucucccgccuggacaaggucgaggccgaggugcagaucgaccggcugaucaccgggcgccuccagagccugcagaccuacgugacccagcagcugauccgggcggccgagauccgcgccagcgccaaccucgccgcgaccaagauguccgagugcguccugggccagagcaagcggguggacuucugcggcaagggguaccaccugauguccuucccccagagcgccccgcacggcguggucuuccuccacgugacguacguccccgcccaggagaagaacuucaccaccgcccccgcgaucugccacgacgggaaggcccacuucccccgcgagggcguguucguguccaacgggacccacugguucgucacgcagcggaacuucuacgagccgcagaucaucaccaccgacaacaccuucgugagcggcaacugcgacguggucaucggcaucgugaacaacacgguguacgacccccugcagcccgagcuggacuccuucaaggaggagcucgacaaguacuucaagaaccacaccagccccgacgucgaccugggggacaucuccggcaucaacgccagcguggugaacauccagaaggagaucgaccgccugaacgaggucgccaagaaccucaacgagucccugaucgaccugcaggagcucgggaaguacgagcaguacaucaaguggccgugguacaucuggcugggcuucaucgccggccugaucgcgaucgugauggugaccaucaugcucugcugcaugaccagcugcugcuccugccugaaggggugcugcagcugcggcuccugcugcaaguucgacgaggacgacagcgagcccguccugaagggggugaagcuccacuacacgugaggacuaguuauaagacugacuagcccgaugggccucccaacgggcccuccuccccuccuugcaccgagauuaauaaaaaaaaaaaaaaaaaaaaaaaaaaaaaaaaaaaaaaaaaaaaaaaaaaaaaaaaaaaaaaaaaaaaaaaaaaaaaaaaaaaaaaaaaaaaaaaaaaaa

SEQ ID NO: 25403 - RNA, 4002 nt, Artificial Sequence
  SARS-CoV-2/Wuhan/WIV05/2019__EPI_ISL_402128 spike protein mRNA gc (1-1273)(L18F_D80A_D215G_L242del_A243del_L244del_R246I_K417N_E484 K_N501Y_D614G_A701V)
aggagaaagcuuaccauguucguguuccugguccuccugccccuggugagcucccagugcgugaacuucaccacccgcacgcagcugccgcccgccuacaccaacagcuucacccggggcgucuacuaccccgacaagguguuccgcuccagcgugcugcacuccacccaggaccucuuccugcccuucuucagcaacgucacgugguuccacgccauccacguguccgggaccaacggcaccaagcgguucgccaacccggugcugcccuucaacgacggggucuacuucgcgagcaccgagaaguccaacaucauccgcggcuggaucuucgggacgacccucgacagcaagacccagucccugcugaucgugaacaacgccaccaacguggucaucaaggugugcgaguuccaguucugcaacgaccccuuccucggcguguacuaccacaagaacaacaagagcuggauggaguccgaguuccgggucuacagcuccgccaacaacugcacguucgaguacgugagccagcccuuccugauggaccuggagggcaagcaggggaacuucaagaaccuccgcgaguucguguucaagaacaucgacggcuacuucaagaucuacuccaagcacaccccgaucaaccugguccggggccugccccagggguucagcgcccucgagccccugguggaccugcccaucggcaucaacaucacccgcuuccagacccuccacaucuccuaccucacgccgggggacagcagcuccggcuggaccgcgggcgccgccgccuacuacgugggguaccugcagccccgcaccuuccugcucaaguacaacgagaacggcaccaucacggacgcggucgacugcgcccuggacccccugagcgagaccaagugcacccucaaguccuucaccguggagaaggggaucuaccagacgagcaacuuccgggugcagcccaccgaguccaucguccgcuucccgaacaucaccaaccugugccccuucggcgagguguucaacgccacccgguucgccagcgucuacgccuggaaccgcaagcggaucuccaacugcguggcggacuacagcgugcuguacaacuccgccagcuucuccacguucaagugcuacggcgucagccccaccaagcucaacgaccugugcuucaccaacguguacgccgacuccuucgugauccgcggggacgagguccggcagaucgcccccggccagaccgggaacaucgccgacuacaacuacaagcugccggacgacuucacgggcugcgugaucgcguggaacagcaacaaccucgacuccaaggucgggggcaacuacaacuaccuguaccgccuguuccgcaagagcaaccucaagcccuucgagcgggacaucuccaccgagaucuaccaggccggcagcacccccugcaacggggugaagggcuucaacugcuacuucccccugcaguccuacggguuccagccgaccuacggcgugggguaccagcccuaccggguggucgugcugagcuucgagcuccugcacgcccccgccacggugugcggccccaagaaguccaccaaccuggucaagaacaagugcgugaacuucaacuucaacggccucaccgggaccggcgugcugaccgagagcaacaagaaguuccugccguuccagcaguucgggcgcgacaucgccgacacgaccgacgcgguccgcgacccccagacccuggagauccucgacaucacccccugcagcuucggcgggguguccgugaucacgccgggcaccaacaccagcaaccaggucgccgugcuguaccagggcgugaacugcaccgagguccccguggccauccacgccgaccagcugacgcccaccuggcggguguacuccaccggcagcaacgucuuccagacccgcgccgggugccucaucggcgcggagcacgugaacaacuccuacgagugcgacauccccaucggggccggcaucugcgccagcuaccagacgcagaccaacuccccgcggcgcgcccggagcguggcgucccagagcaucaucgccuacaccaugucccugggcguggagaacagcgucgccuacuccaacaacagcaucgccauccccaccaacuucacgaucuccgugaccaccgagauccugcccgugagcaugaccaagacgagcgucgacugcaccauguacaucugcggggacuccaccgagugcagcaaccuccugcugcaguacggcuccuucugcacccagcucaaccgcgcgcugacggggaucgccguggagcaggacaagaacacccaggagguguucgcccaggucaagcagaucuacaagacgcccccgaucaaggacuucggcggguucaacuucagccagauccugcccgaccccuccaagcccagcaagcgguccuucaucgaggaccuccuguucaacaaggugacccuggccgacgccggcuucaucaagcaguacggcgacugccucggggacaucgcggcccgcgaccugaucugcgcccagaaguucaacggccugaccgugcucccgccccugcugaccgacgagaugaucgcccaguacaccagcgcccuccuggcggggaccaucacguccggcuggaccuucggggccggcgccgcccugcagauccccuucgcgaugcagauggccuaccgguucaacggcaucggggucacccagaacgugcucuacgagaaccagaagcugaucgccaaccaguucaacagcgccaucggcaagauccaggacucccugagcuccaccgccagcgcgcucgggaagcugcaggacguggucaaccagaacgcccaggcccugaacacgcucgugaagcagcuguccagcaacuucggcgccaucuccagcgugcugaacgacauccucucccgccuggacaaggucgaggccgaggugcagaucgaccggcugaucaccgggcgccuccagagccugcagaccuacgugacccagcagcugauccgggcggccgagauccgcgccagcgccaaccucgccgcgaccaagauguccgagugcguccugggccagagcaagcggguggacuucugcggcaagggguaccaccugauguccuucccccagagcgccccgcacggcguggucuuccuccacgugacguacguccccgcccaggagaagaacuucaccaccgcccccgcgaucugccacgacgggaaggcccacuucccccgcgagggcguguucguguccaacgggacccacugguucgucacgcagcggaacuucuacgagccgcagaucaucaccaccgacaacaccuucgugagcggcaacugcgacguggucaucggcaucgugaacaacacgguguacgacccccugcagcccgagcuggacuccuucaaggaggagcucgacaaguacuucaagaaccacaccagccccgacgucgaccugggggacaucuccggcaucaacgccagcguggugaacauccagaaggagaucgaccgccugaacgaggucgccaagaaccucaacgagucccugaucgaccugcaggagcucgggaaguacgagcaguacaucaaguggccgugguacaucuggcugggcuucaucgccggccugaucgcgaucgugauggugaccaucaugcucugcugcaugaccagcugcugcuccugccugaaggggugcugcagcugcggcuccugcugcaaguucgacgaggacgacagcgagcccguccugaagggggugaagcuccacuacacgugaggacuaguuauaagacugacuagcccgaugggccucccaacgggcccuccuccccuccuugcaccgagauuaauaaaaaaaaaaaaaaaaaaaaaaaaaaaaaaaaaaaaaaaaaaaaaaaaaaaaaaaaaaaaaaaaaaaaaaaaaaaaaaaaaaaaaaaaaaaaaaaaaaaa

SEQ ID NO: 25404 - RNA, 4011 nt, Artificial Sequence
  SARS-CoV-2/Wuhan/WIV05/2019__EPI_ISL_402128 spike protein mRNA gc (1-1273)(E484K_D614G)
aggagaaagcuuaccauguucguguuccugguccuccugccccuggugagcucccagugcgugaaccucaccacccgcacgcagcugccgcccgccuacaccaacagcuucacccggggcgucuacuaccccgacaagguguuccgcuccagcgugcugcacuccacccaggaccucuuccugcccuucuucagcaacgucacgugguuccacgccauccacguguccgggaccaacggcaccaagcgguucgacaacccggugcugcccuucaacgacggggucuacuucgcgagcaccgagaaguccaacaucauccgcggcuggaucuucgggacgacccucgacagcaagacccagucccugcugaucgugaacaacgccaccaacguggucaucaaggugugcgaguuccaguucugcaacgaccccuuccucggcguguacuaccacaagaacaacaagagcuggauggaguccgaguuccgggucuacagcuccgccaacaacugcacguucgaguacgugagccagcccuuccugauggaccuggagggcaagcaggggaacuucaagaaccuccgcgaguucguguucaagaacaucgacggcuacuucaagaucuacuccaagcacaccccgaucaaccugguccgggaccugccccagggguucagcgcccucgagccccugguggaccugcccaucggcaucaacaucacccgcuuccagacccuccuggcccugcaccgguccuaccucacgccgggggacagcagcuccggcuggaccgcgggcgccgccgccuacuacgugggguaccugcagccccgcaccuuccugcucaaguacaacgagaacggcaccaucacggacgcggucgacugcgcccuggacccccugagcgagaccaagugcacccucaaguccuucaccguggagaaggggaucuaccagacgagcaacuuccgggugcagcccaccgaguccaucguccgcuucccgaacaucaccaaccugugccccuucggcgagguguucaacgccacccgguucgccagcgucuacgccuggaaccgcaagcggaucuccaacugcguggcggacuacagcgugcuguacaacuccgccagcuucuccacguucaagugcuacggcgucagccccaccaagcucaacgaccugugcuucaccaacguguacgccgacuccuucgugauccgcggggacgagguccggcagaucgcccccggccagaccgggaagaucgccgacuacaacuacaagcugccggacgacuucacgggcugcgugaucgcguggaacagcaacaaccucgacuccaaggucgggggcaacuacaacuaccuguaccgccuguuccgcaagagcaaccucaagcccuucgagcgggacaucuccaccgagaucuaccaggccggcagcacccccugcaacggggugaagggcuucaacugcuacuucccccugcaguccuacggguuccagccgaccaacggcgugggguaccagcccuaccggguggucgugcugagcuucgagcuccugcacgcccccgccacggugugcggccccaagaaguccaccaaccuggucaagaacaagugcgugaacuucaacuucaacggccucaccgggaccggcgugcugaccgagagcaacaagaaguuccugccguuccagcaguucgggcgcgacaucgccgacacgaccgacgcgguccgcgacccccagacccuggagauccucgacaucacccccugcagcuucggcgggguguccgugaucacgccgggcaccaacaccagcaaccaggucgccgugcuguaccagggcgugaacugcaccgagguccccguggccauccacgccgaccagcugacgcccaccuggcggguguacuccaccggcagcaacgucuuccagacccgcgccgggugccucaucggcgcggagcacgugaacaacuccuacgagugcgacauccccaucggggccggcaucugcgccagcuaccagacgcagaccaacuccccgcggcgcgcccggagcguggcgucccagagcaucaucgccuacaccaugucccugggcgccgagaacagcgucgccuacuccaacaacagcaucgccauccccaccaacuucacgaucuccgugaccaccgagauccugcccgugagcaugaccaagacgagcgucgacugcaccauguacaucugcggggacuccaccgagugcagcaaccuccugcugcaguacggcuccuucugcacccagcucaaccgcgcgcugacggggaucgccguggagcaggacaagaacacccaggagguguucgcccaggucaagcagaucuacaagacgcccccgaucaaggacuucggcggguucaacuucagccagauccugcccgaccccuccaagcccagcaagcgguccuucaucgaggaccuccuguucaacaaggugacccuggccgacgccggcuucaucaagcaguacggcgacugccucggggacaucgcggcccgcgaccugaucugcgcccagaaguucaacggccugaccgugcucccgccccugcugaccgacgagaugaucgcccaguacaccagcgcccuccuggcggggaccaucacguccggcuggaccuucggggccggcgccgcccugcagauccccuucgcgaugcagauggccuaccgguucaacggcaucggggucacccagaacgugcucuacgagaaccagaagcugaucgccaaccaguucaacagcgccaucggcaagauccaggacucccugagcuccaccgccagcgcgcucgggaagcugcaggacguggucaaccagaacgcccaggcccugaacacgcucgugaagcagcuguccagcaacuucggcgccaucuccagcgugcugaacgacauccucucccgccuggacaaggucgaggccgaggugcagaucgaccggcugaucaccgggcgccuccagagccugcagaccuacgugacccagcagcugauccgggcggccgagauccgcgccagcgccaaccucgccgcgaccaagauguccgagugcguccugggccagagcaagcggguggacuucugcggcaagggguaccaccugauguccuucccccagagcgccccgcacggcguggucuuccuccacgugacguacguccccgcccaggagaagaacuucaccaccgcccccgcgaucugccacgacgggaaggcccacuucccccgcgagggcguguucguguccaacgggacccacugguucgucacgcagcggaacuucuacgagccgcagaucaucaccaccgacaacaccuucgugagcggcaacugcgacguggucaucggcaucgugaacaacacgguguacgacccccugcagcccgagcuggacuccuucaaggaggagcucgacaaguacuucaagaaccacaccagccccgacgucgaccugggggacaucuccggcaucaacgccagcguggugaacauccagaaggagaucgaccgccugaacgaggucgccaagaaccucaacgagucccugaucgaccugcaggagcucgggaaguacgagcaguacaucaaguggccgugguacaucuggcugggcuucaucgccggccugaucgcgaucgugauggugaccaucaugcucugcugcaugaccagcugcugcuccugccugaaggggugcugcagcugcggcuccugcugcaaguucgacgaggacgacagcgagcccguccugaagggggugaagcuccacuacacgugaggacuaguuauaagacugacuagcccgaugggccucccaacgggcccuccuccccuccuugcaccgagauuaauaaaaaaaaaaaaaaaaaaaaaaaaaaaaaaaaaaaaaaaaaaaaaaaaaaaaaaaaaaaaaaaaaaaaaaaaaaaaaaaaaaaaaaaaaaaaaaaaaaaa

SEQ ID NO: 25405 - RNA, 4011 nt, Artificial Sequence
  SARS-CoV-2/Wuhan/WIV05/2019__EPI_ISL_402128 spike protein mRNA gc (1-1273)(L18F_T20N_P26S_D138Y_R190S_K417T_E484K_N501Y_D614G_H655Y _T1027I)
aggagaaagcuuaccauguucguguuccugguccuccugccccuggugagcucccagugcgugaacuucaccaaccgcacgcagcugccgagcgccuacaccaacagcuucacccggggcgucuacuaccccgacaagguguuccgcuccagcgugcugcacuccacccaggaccucuuccugcccuucuucagcaacgucacgugguuccacgccauccacguguccgggaccaacggcaccaagcgguucgacaacccggugcugcccuucaacgacggggucuacuucgcgagcaccgagaaguccaacaucauccgcggcuggaucuucgggacgacccucgacagcaagacccagucccugcugaucgugaacaacgccaccaacguggucaucaaggugugcgaguuccaguucugcaacuaccccuuccucggcguguacuaccacaagaacaacaagagcuggauggaguccgaguuccgggucuacagcuccgccaacaacugcacguucgaguacgugagccagcccuuccugauggaccuggagggcaagcaggggaacuucaagaaccucagcgaguucguguucaagaacaucgacggcuacuucaagaucuacuccaagcacaccccgaucaaccugguccgggaccugccccagggguucagcgcccucgagccccugguggaccugcccaucggcaucaacaucacccgcuuccagacccuccuggcccugcaccgguccuaccucacgccgggggacagcagcuccggcuggaccgcgggcgccgccgccuacuacgugggguaccugcagccccgcaccuuccugcucaaguacaacgagaacggcaccaucacggacgcggucgacugcgcccuggacccccugagcgagaccaagugcacccucaaguccuucaccguggagaaggggaucuaccagacgagcaacuuccgggugcagcccaccgaguccaucguccgcuucccgaacaucaccaaccugugccccuucggcgagguguucaacgccacccgguucgccagcgucuacgccuggaaccgcaagcggaucuccaacugcguggcggacuacagcgugcuguacaacuccgccagcuucuccacguucaagugcuacggcgucagccccaccaagcucaacgaccugugcuucaccaacguguacgccgacuccuucgugauccgcggggacgagguccggcagaucgcccccggccagaccgggaccaucgccgacuacaacuacaagcugccggacgacuucacgggcugcgugaucgcguggaacagcaacaaccucgacuccaaggucgggggcaacuacaacuaccuguaccgccuguuccgcaagagcaaccucaagcccuucgagcgggacaucuccaccgagaucuaccaggccggcagcacccccugcaacggggugaagggcuucaacugcuacuucccccugcaguccuacggguuccagccgaccuacggcgugggguaccagcccuaccggguggucgugcugagcuucgagcuccugcacgcccccgccacggugugcggccccaagaaguccaccaaccuggucaagaacaagugcgugaacuucaacuucaacggccucaccgggaccggcgugcugaccgagagcaacaagaaguuccugccguuccagcaguucgggcgcgacaucgccgacacgaccgacgcgguccgcgacccccagacccuggagauccucgacaucacccccugcagcuucggcgggguguccgugaucacgccgggcaccaacaccagcaaccaggucgccgugcuguaccagggcgugaacugcaccgagguccccguggccauccacgccgaccagcugacgcccaccuggcggguguacuccaccggcagcaacgucuuccagacccgcgccgggugccucaucggcgcggaguacgugaacaacuccuacgagugcgacauccccaucggggccggcaucugcgccagcuaccagacgcagaccaacuccccgcggcgcgcccggagcguggcgucccagagcaucaucgccuacaccaugucccugggcgccgagaacagcgucgccuacuccaacaacagcaucgccauccccaccaacuucacgaucuccgugaccaccgagauccugcccgugagcaugaccaagacgagcgucgacugcaccauguacaucugcggggacuccaccgagugcagcaaccuccugcugcaguacggcuccuucugcacccagcucaaccgcgcgcugacggggaucgccguggagcaggacaagaacacccaggagguguucgcccaggucaagcagaucuacaagacgcccccgaucaaggacuucggcggguucaacuucagccagauccugcccgaccccuccaagcccagcaagcgguccuucaucgaggaccuccuguucaacaaggugacccuggccgacgccggcuucaucaagcaguacggcgacugccucggggacaucgcggcccgcgaccugaucugcgcccagaaguucaacggccugaccgugcucccgccccugcugaccgacgagaugaucgcccaguacaccagcgcccuccuggcggggaccaucacguccggcuggaccuucggggccggcgccgcccugcagauccccuucgcgaugcagauggccuaccgguucaacggcaucggggucacccagaacgugcucuacgagaaccagaagcugaucgccaaccaguucaacagcgccaucggcaagauccaggacucccugagcuccaccgccagcgcgcucgggaagcugcaggacguggucaaccagaacgcccaggcccugaacacgcucgugaagcagcuguccagcaacuucggcgccaucuccagcgugcugaacgacauccucucccgccuggacaaggucgaggccgaggugcagaucgaccggcugaucaccgggcgccuccagagccugcagaccuacgugacccagcagcugauccgggcggccgagauccgcgccagcgccaaccucgccgcgaucaagauguccgagugcguccugggccagagcaagcggguggacuucugcggcaagggguaccaccugauguccuucccccagagcgccccgcacggcguggucuuccuccacgugacguacguccccgcccaggagaagaacuucaccaccgcccccgcgaucugccacgacgggaaggcccacuucccccgcgagggcguguucguguccaacgggacccacugguucgucacgcagcggaacuucuacgagccgcagaucaucaccaccgacaacaccuucgugagcggcaacugcgacguggucaucggcaucgugaacaacacgguguacgacccccugcagcccgagcuggacuccuucaaggaggagcucgacaaguacuucaagaaccacaccagccccgacgucgaccugggggacaucuccggcaucaacgccagcguggugaacauccagaaggagaucgaccgccugaacgaggucgccaagaaccucaacgagucccugaucgaccugcaggagcucgggaaguacgagcaguacaucaaguggccgugguacaucuggcugggcuucaucgccggccugaucgcgaucgugauggugaccaucaugcucugcugcaugaccagcugcugcuccugccugaaggggugcugcagcugcggcuccugcugcaaguucgacgaggacgacagcgagcccguccugaagggggugaagcuccacuacacgugaggacuaguuauaagacugacuagcccgaugggccucccaacgggcccuccuccccuccuugcaccgagauuaauaaaaaaaaaaaaaaaaaaaaaaaaaaaaaaaaaaaaaaaaaaaaaaaaaaaaaaaaaaaaaaaaaaaaaaaaaaaaaaaaaaaaaaaaaaaaaaaaaaaa

SEQ ID NO: 25406 - RNA, 4011 nt, Artificial Sequence
  SARS-CoV-2/Wuhan/WIV05/2019__EPI_ISL_402128 spike protein mRNA gc (1-1273)(S13I_W152C_L452R_D614G)
aggagaaagcuuaccauguucguguuccugguccuccugccccuggugagcauccagugcgugaaccucaccacccgcacgcagcugccgcccgccuacaccaacagcuucacccggggcgucuacuaccccgacaagguguuccgcuccagcgugcugcacuccacccaggaccucuuccugcccuucuucagcaacgucacgugguuccacgccauccacguguccgggaccaacggcaccaagcgguucgacaacccggugcugcccuucaacgacggggucuacuucgcgagcaccgagaaguccaacaucauccgcggcuggaucuucgggacgacccucgacagcaagacccagucccugcugaucgugaacaacgccaccaacguggucaucaaggugugcgaguuccaguucugcaacgaccccuuccucggcguguacuaccacaagaacaacaagagcugcauggaguccgaguuccgggucuacagcuccgccaacaacugcacguucgaguacgugagccagcccuuccugauggaccuggagggcaagcaggggaacuucaagaaccuccgcgaguucguguucaagaacaucgacggcuacuucaagaucuacuccaagcacaccccgaucaaccugguccgggaccugccccagggguucagcgcccucgagccccugguggaccugcccaucggcaucaacaucacccgcuuccagacccuccuggcccugcaccgguccuaccucacgccgggggacagcagcuccggcuggaccgcgggcgccgccgccuacuacgugggguaccugcagccccgcaccuuccugcucaaguacaacgagaacggcaccaucacggacgcggucgacugcgcccuggacccccugagcgagaccaagugcacccucaaguccuucaccguggagaaggggaucuaccagacgagcaacuuccgggugcagcccaccgaguccaucguccgcuucccgaacaucaccaaccugugccccuucggcgagguguucaacgccacccgguucgccagcgucuacgccuggaaccgcaagcggaucuccaacugcguggcggacuacagcgugcuguacaacuccgccagcuucuccacguucaagugcuacggcgucagccccaccaagcucaacgaccugugcuucaccaacguguacgccgacuccuucgugauccgcggggacgagguccggcagaucgcccccggccagaccgggaagaucgccgacuacaacuacaagcugccggacgacuucacgggcugcgugaucgcguggaacagcaacaaccucgacuccaaggucgggggcaacuacaacuaccgcuaccgccuguuccgcaagagcaaccucaagcccuucgagcgggacaucuccaccgagaucuaccaggccggcagcacccccugcaacgggguggagggcuucaacugcuacuucccccugcaguccuacggguuccagccgaccaacggcgugggguaccagcccuaccggguggucgugcugagcuucgagcuccugcacgcccccgccacggugugcggccccaagaaguccaccaaccuggucaagaacaagugcgugaacuucaacuucaacggccucaccgggaccggcgugcugaccgagagcaacaagaaguuccugccguuccagcaguucgggcgcgacaucgccgacacgaccgacgcgguccgcgacccccagacccuggagauccucgacaucacccccugcagcuucggcgggguguccgugaucacgccgggcaccaacaccagcaaccaggucgccgugcuguaccagggcgugaacugcaccgagguccccguggccauccacgccgaccagcugacgcccaccuggcggguguacuccaccggcagcaacgucuuccagacccgcgccgggugccucaucggcgcggagcacgugaacaacuccuacgagugcgacauccccaucggggccggcaucugcgccagcuaccagacgcagaccaacuccccgcggcgcgcccggagcguggcgucccagagcaucaucgccuacaccaugucccugggcgccgagaacagcgucgccuacuccaacaacagcaucgccauccccaccaacuucacgaucuccgugaccaccgagauccugcccgugagcaugaccaagacgagcgucgacugcaccauguacaucugcggggacuccaccgagugcagcaaccuccugcugcaguacggcuccuucugcacccagcucaaccgcgcgcugacggggaucgccguggagcaggacaagaacacccaggagguguucgcccaggucaagcagaucuacaagacgcccccgaucaaggacuucggcggguucaacuucagccagauccugcccgaccccuccaagcccagcaagcgguccuucaucgaggaccuccuguucaacaaggugacccuggccgacgccggcuucaucaagcaguacggcgacugccucggggacaucgcggcccgcgaccugaucugcgcccagaaguucaacggccugaccgugcucccgccccugcugaccgacgagaugaucgcccaguacaccagcgcccuccuggcggggaccaucacguccggcuggaccuucggggccggcgccgcccugcagauccccuucgcgaugcagauggccuaccgguucaacggcaucggggucacccagaacgugcucuacgagaaccagaagcugaucgccaaccaguucaacagcgccaucggcaagauccaggacucccugagcuccaccgccagcgcgcucgggaagcugcaggacguggucaaccagaacgcccaggcccugaacacgcucgugaagcagcuguccagcaacuucggcgccaucuccagcgugcugaacgacauccucucccgccuggacaaggucgaggccgaggugcagaucgaccggcugaucaccgggcgccuccagagccugcagaccuacgugacccagcagcugauccgggcggccgagauccgcgccagcgccaaccucgccgcgaccaagauguccgagugcguccugggccagagcaagcggguggacuucugcggcaagggguaccaccugauguccuucccccagagcgccccgcacggcguggucuuccuccacgugacguacguccccgcccaggagaagaacuucaccaccgcccccgcgaucugccacgacgggaaggcccacuucccccgcgagggcguguucguguccaacgggacccacugguucgucacgcagcggaacuucuacgagccgcagaucaucaccaccgacaacaccuucgugagcggcaacugcgacguggucaucggcaucgugaacaacacgguguacgacccccugcagcccgagcuggacuccuucaaggaggagcucgacaaguacuucaagaaccacaccagccccgacgucgaccugggggacaucuccggcaucaacgccagcguggugaacauccagaaggagaucgaccgccugaacgaggucgccaagaaccucaacgagucccugaucgaccugcaggagcucgggaaguacgagcaguacaucaaguggccgugguacaucuggcugggcuucaucgccggccugaucgcgaucgugauggugaccaucaugcucugcugcaugaccagcugcugcuccugccugaaggggugcugcagcugcggcuccugcugcaaguucgacgaggacgacagcgagcccguccugaagggggugaagcuccacuacacgugaggacuaguuauaagacugacuagcccgaugggccucccaacgggcccuccuccccuccuugcaccgagauuaauaaaaaaaaaaaaaaaaaaaaaaaaaaaaaaaaaaaaaaaaaaaaaaaaaaaaaaaaaaaaaaaaaaaaaaaaaaaaaaaaaaaaaaaaaaaaaaaaaaaa

SEQ ID NO: 25407 - RNA, 4011 nt, Artificial Sequence; identical to SEQ ID NO: 25389
  SARS-CoV-2/Wuhan/WIV05/2019__EPI_ISL_402128 spike protein mRNA gc (1-1273)

SEQ ID NO: 25408 - RNA, 4011 nt, Artificial Sequence
  SARS-CoV-2/Wuhan/WIV05/2019__EPI_ISL_402128 spike protein mRNA gc (1-1273)(D614G)
aggagaaagcuuaccauguucguguuccugguccuccugccccuggugagcucccagugcgugaaccucaccacccgcacgcagcugccgcccgccuacaccaacagcuucacccggggcgucuacuaccccgacaagguguuccgcuccagcgugcugcacuccacccaggaccucuuccugcccuucuucagcaacgucacgugguuccacgccauccacguguccgggaccaacggcaccaagcgguucgacaacccggugcugcccuucaacgacggggucuacuucgcgagcaccgagaaguccaacaucauccgcggcuggaucuucgggacgacccucgacagcaagacccagucccugcugaucgugaacaacgccaccaacguggucaucaaggugugcgaguuccaguucugcaacgaccccuuccucggcguguacuaccacaagaacaacaagagcuggauggaguccgaguuccgggucuacagcuccgccaacaacugcacguucgaguacgugagccagcccuuccugauggaccuggagggcaagcaggggaacuucaagaaccuccgcgaguucguguucaagaacaucgacggcuacuucaagaucuacuccaagcacaccccgaucaaccugguccgggaccugccccagggguucagcgcccucgagccccugguggaccugcccaucggcaucaacaucacccgcuuccagacccuccuggcccugcaccgguccuaccucacgccgggggacagcagcuccggcuggaccgcgggcgccgccgccuacuacgugggguaccugcagccccgcaccuuccugcucaaguacaacgagaacggcaccaucacggacgcggucgacugcgcccuggacccccugagcgagaccaagugcacccucaaguccuucaccguggagaaggggaucuaccagacgagcaacuuccgggugcagcccaccgaguccaucguccgcuucccgaacaucaccaaccugugccccuucggcgagguguucaacgccacccgguucgccagcgucuacgccuggaaccgcaagcggaucuccaacugcguggcggacuacagcgugcuguacaacuccgccagcuucuccacguucaagugcuacggcgucagccccaccaagcucaacgaccugugcuucaccaacguguacgccgacuccuucgugauccgcggggacgagguccggcagaucgcccccggccagaccgggaagaucgccgacuacaacuacaagcugccggacgacuucacgggcugcgugaucgcguggaacagcaacaaccucgacuccaaggucgggggcaacuacaacuaccuguaccgccuguuccgcaagagcaaccucaagcccuucgagcgggacaucuccaccgagaucuaccaggccggcagcacccccugcaacgggguggagggcuucaacugcuacuucccccugcaguccuacggguuccagccgaccaacggcgugggguaccagcccuaccggguggucgugcugagcuucgagcuccugcacgcccccgccacggugugcggccccaagaaguccaccaaccuggucaagaacaagugcgugaacuucaacuucaacggccucaccgggaccggcgugcugaccgagagcaacaagaaguuccugccguuccagcaguucgggcgcgacaucgccgacacgaccgacgcgguccgcgacccccagacccuggagauccucgacaucacccccugcagcuucggcgggguguccgugaucacgccgggcaccaacaccagcaaccaggucgccgugcuguaccagggcgugaacugcaccgagguccccguggccauccacgccgaccagcugacgcccaccuggcggguguacuccaccgggagcaacgucuuccagacccgcgccggcugccucaucggggcggagcacgugaacaacuccuacgagugcgacauccccaucggcgccggcaucugcgccagcuaccagacgcagaccaacuccccgcggcgcgcccggagcguggcgucccagagcaucaucgccuacaccaugucccugggggccgagaacagcgucgccuacuccaacaacagcaucgccauccccaccaacuucacgaucuccgugaccaccgagauccugcccgugagcaugaccaagacgagcgucgacugcaccauguacaucugcggcgacuccaccgagugcagcaaccuccugcugcaguacggguccuucugcacccagcucaaccgcgcgcugacgggcaucgccguggagcaggacaagaacacccaggagguguucgcccaggucaagcagaucuacaagacgcccccgaucaaggacuucgggggcuucaacuucagccagauccugcccgaccccuccaagcccagcaagcgguccuucaucgaggaccuccuguucaacaaggugacccuggccgacgccggcuucaucaagcaguacggggacugccucggcgacaucgcggcccgcgaccugaucugcgcccagaaguucaacgggcugaccgugcucccgccccugcugaccgacgagaugaucgcccaguacaccagcgcccuccuggcgggcaccaucacguccggguggaccuucggcgccggcgccgcccugcagauccccuucgcgaugcagauggccuaccgguucaacgggaucggcgucacccagaacgugcucuacgagaaccagaagcugaucgccaaccaguucaacagcgccaucgggaagauccaggacucccugagcuccaccgccagcgcgcucggcaagcugcaggacguggucaaccagaacgcccaggcccugaacacgcucgugaagcagcuguccagcaacuucggggccaucuccagcgugcugaacgacauccucucccgccuggacaaggucgaggccgaggugcagaucgaccggcugaucaccggccgccuccagagccugcagaccuacgugacccagcagcugauccgggcggccgagauccgcgccagcgccaaccucgccgcgaccaagauguccgagugcguccugggccagagcaagcggguggacuucugcgggaagggcuaccaccugauguccuucccccagagcgccccgcacgggguggucuuccuccacgugacguacguccccgcccaggagaagaacuucaccaccgcccccgcgaucugccacgacggcaaggcccacuucccccgcgaggggguguucguguccaacggcacccacugguucgucacgcagcggaacuucuacgagccgcagaucaucaccaccgacaacaccuucgugagcggcaacugcgacguggucaucgggaucgugaacaacacgguguacgacccccugcagcccgagcuggacuccuucaaggaggagcucgacaaguacuucaagaaccacaccagccccgacgucgaccugggcgacaucuccgggaucaacgccagcguggugaacauccagaaggagaucgaccgccugaacgaggucgccaagaaccucaacgagucccugaucgaccugcaggagcucggcaaguacgagcaguacaucaaguggccgugguacaucuggcugggcuucaucgccgggcugaucgcgaucgugauggugaccaucaugcucugcugcaugaccagcugcugcuccugccugaagggcugcugcagcugcggguccugcugcaaguucgacgaggacgacagcgagcccguccugaagggcgugaagcuccacuacacgugaggacuaguuauaagacugacuagcccgaugggccucccaacgggcccuccuccccuccuugcaccgagauuaauaaaaaaaaaaaaaaaaaaaaaaaaaaaaaaaaaaaaaaaaaaaaaaaaaaaaaaaaaaaaaaaaaaaaaaaaaaaaaaaaaaaaaaaaaaaaaaaaaaaa

SEQ ID NO: 25409 - RNA, 4011 nt, Artificial Sequence
  SARS-CoV-2/Wuhan/WIV05/2019__EPI_ISL_402128 spike protein mRNA gc (1-1273)(A222V_D614G)
aggagaaagcuuaccauguucguguuccugguccuccugccccuggugagcucccagugcgugaaccucaccacccgcacgcagcugccgcccgccuacaccaacagcuucacccggggcgucuacuaccccgacaagguguuccgcuccagcgugcugcacuccacccaggaccucuuccugcccuucuucagcaacgucacgugguuccacgccauccacguguccgggaccaacggcaccaagcgguucgacaacccggugcugcccuucaacgacggggucuacuucgcgagcaccgagaaguccaacaucauccgcggcuggaucuucgggacgacccucgacagcaagacccagucccugcugaucgugaacaacgccaccaacguggucaucaaggugugcgaguuccaguucugcaacgaccccuuccucggcguguacuaccacaagaacaacaagagcuggauggaguccgaguuccgggucuacagcuccgccaacaacugcacguucgaguacgugagccagcccuuccugauggaccuggagggcaagcaggggaacuucaagaaccuccgcgaguucguguucaagaacaucgacggcuacuucaagaucuacuccaagcacaccccgaucaaccugguccgggaccugccccagggguucagcgugcucgagccccugguggaccugcccaucggcaucaacaucacccgcuuccagacccuccuggcccugcaccgguccuaccucacgccgggggacagcagcuccggcuggaccgccggcgcggccgccuacuacgucggguaccugcagccccgcaccuuccugcucaaguacaacgagaacggcaccaucacggacgccguggacugcgcgcuggacccccugagcgagaccaagugcacccucaaguccuucaccguggagaaggggaucuaccagacgagcaacuuccggguccagcccaccgaguccaucgugcgcuucccgaacaucaccaaccugugccccuucggcgaggucuucaacgccacccgguucgccagcguguacgccuggaaccgcaagcggaucuccaacugcguggccgacuacagcguccuguacaacuccgcgagcuucuccacguucaagugcuacggcgugagccccaccaagcucaacgaccugugcuucaccaacguguacgccgacuccuucgucauccgcggggacgaggugcggcagaucgcccccggccagaccgggaagaucgccgacuacaacuacaagcugccggacgacuucacgggcugcgugaucgccuggaacagcaacaaccucgacuccaaggucgggggcaacuacaacuaccuguaccgccuguuccgcaagagcaaccucaagcccuucgagcgggacaucuccaccgagaucuaccaggcgggcagcacccccugcaacgggguggagggcuucaacugcuacuucccccugcaguccuacggguuccagccgaccaacggcgugggguaccagcccuaccgggucguggugcugagcuucgagcuccugcacgcccccgccacggucugcggccccaagaaguccaccaaccuggugaagaacaagugcgugaacuucaacuucaacggccucaccgggaccggcguccugaccgagagcaacaagaaguuccugccguuccagcaguucgggcgcgacaucgccgacacgaccgacgccgugcgcgacccccagacccuggagauccucgacaucacccccugcagcuucggcgggguguccgucaucacgccgggcaccaacaccagcaaccagguggcggugcuguaccagggcgucaacugcaccgaggugcccguggccauccacgccgaccagcugacgcccaccuggcgggucuacuccaccgggagcaacguguuccagacccgcgccggcugccucaucggggccgagcacgugaacaacuccuacgagugcgacauccccaucggcgcgggcaucugcgccagcuaccagacgcagaccaacuccccgcggcgcgcccggagcgucgccucccagagcaucaucgcguacaccaugucccugggggccgagaacagcguggccuacuccaacaacagcaucgccauccccaccaacuucacgaucuccgugaccaccgagauccugcccgucagcaugaccaagacgagcguggacugcaccauguacaucugcggcgacuccaccgagugcagcaaccuccugcugcaguacggguccuucugcacccagcucaaccgcgcccugacgggcaucgcgguggagcaggacaagaacacccaggaggucuucgcccaggugaagcagaucuacaagacgcccccgaucaaggacuucgggggcuucaacuucagccagauccugcccgaccccuccaagcccagcaagcgguccuucaucgaggaccuccuguucaacaaggugacccuggccgacgccggcuucaucaagcaguacggggacugccucggcgacaucgccgcgcgcgaccugaucugcgcccagaaguucaacgggcugaccguccucccgccccugcugaccgacgagaugaucgcccaguacaccagcgcccuccuggccggcaccaucacguccggguggaccuucggcgcgggcgccgcccugcagauccccuucgccaugcagauggcguaccgguucaacgggaucggcgugacccagaacgugcucuacgagaaccagaagcugaucgccaaccaguucaacagcgccaucgggaagauccaggacucccugagcuccaccgccagcgcccucggcaagcugcaggacgucgugaaccagaacgcgcaggcccugaacacgcucgugaagcagcuguccagcaacuucggggccaucuccagcguccugaacgacauccucucccgccuggacaagguggaggccgaggugcagaucgaccggcugaucaccggccgccuccagagccugcagaccuacgucacccagcagcugauccgggccgcggagauccgcgccagcgccaaccucgccgccaccaagauguccgagugcgugcugggccagagcaagcggguggacuucugcgggaagggcuaccaccugauguccuucccccagagcgcgccgcacggggucguguuccuccacgucacguacgugcccgcccaggagaagaacuucaccaccgcccccgccaucugccacgacggcaaggcgcacuucccccgcgaggggguguucgucuccaacggcacccacugguucgugacgcagcggaacuucuacgagccgcagaucaucaccaccgacaacaccuucgugagcggcaacugcgacgucgugaucgggaucgugaacaacacggucuacgacccccugcagcccgagcuggacuccuucaaggaggagcucgacaaguacuucaagaaccacaccagccccgacguggaccugggcgacaucuccgggaucaacgccagcguggucaacauccagaaggagaucgaccgccugaacgagguggccaagaaccucaacgagucccugaucgaccugcaggagcucggcaaguacgagcaguacaucaaguggccgugguacaucuggcugggcuucaucgccgggcugaucgccaucgugauggucaccaucaugcucugcugcaugaccagcugcugcuccugccugaagggcugcugcagcugcggguccugcugcaaguucgacgaggacgacagcgagcccgugcugaagggcgugaagcuccacuacacgugaggacuaguuauaagacugacuagcccgaugggccucccaacgggcccuccuccccuccuugcaccgagauuaauaaaaaaaaaaaaaaaaaaaaaaaaaaaaaaaaaaaaaaaaaaaaaaaaaaaaaaaaaaaaaaaaaaaaaaaaaaaaaaaaaaaaaaaaaaaaaaaaaaaa

SEQ ID NO: 25410 - RNA, 4011 nt, Artificial Sequence
  SARS-CoV-2/Wuhan/WIV05/2019__EPI_ISL_402128 spike protein mRNA gc (1-1273)(N439K_D614G)
aggagaaagcuuaccauguucguguuccugguccuccugccccuggugagcucccagugcgugaaccucaccacccgcacgcagcugccgcccgccuacaccaacagcuucacccggggcgucuacuaccccgacaagguguuccgcuccagcgugcugcacuccacccaggaccucuuccugcccuucuucagcaacgucacgugguuccacgccauccacguguccgggaccaacggcaccaagcgguucgacaacccggugcugcccuucaacgacggggucuacuucgcgagcaccgagaaguccaacaucauccgcggcuggaucuucgggacgacccucgacagcaagacccagucccugcugaucgugaacaacgccaccaacguggucaucaaggugugcgaguuccaguucugcaacgaccccuuccucggcguguacuaccacaagaacaacaagagcuggauggaguccgaguuccgggucuacagcuccgccaacaacugcacguucgaguacgugagccagcccuuccugauggaccuggagggcaagcaggggaacuucaagaaccuccgcgaguucguguucaagaacaucgacggcuacuucaagaucuacuccaagcacaccccgaucaaccugguccgggaccugccccagggguucagcgcccucgagccccugguggaccugcccaucggcaucaacaucacccgcuuccagacccuccuggcccugcaccgguccuaccucacgccgggggacagcagcuccggcuggaccgcgggcgccgccgccuacuacgugggguaccugcagccccgcaccuuccugcucaaguacaacgagaacggcaccaucacggacgcggucgacugcgcccuggacccccugagcgagaccaagugcacccucaaguccuucaccguggagaaggggaucuaccagacgagcaacuuccgggugcagcccaccgaguccaucguccgcuucccgaacaucaccaaccugugccccuucggcgagguguucaacgccacccgguucgccagcgucuacgccuggaaccgcaagcggaucuccaacugcguggcggacuacagcgugcuguacaacuccgccagcuucuccacguucaagugcuacggcgucagccccaccaagcucaacgaccugugcuucaccaacguguacgccgacuccuucgugauccgcggggacgagguccggcagaucgcccccggccagaccgggaagaucgccgacuacaacuacaagcugccggacgacuucacgggcugcgugaucgcguggaacagcaagaaccucgacuccaaggucgggggcaacuacaacuaccuguaccgccuguuccgcaagagcaaccucaagcccuucgagcgggacaucuccaccgagaucuaccaggccggcagcacccccugcaacgggguggagggcuucaacugcuacuucccccugcaguccuacggguuccagccgaccaacggcgugggguaccagcccuaccggguggucgugcugagcuucgagcuccugcacgcccccgccacggugugcggccccaagaaguccaccaaccuggucaagaacaagugcgugaacuucaacuucaacggccucaccgggaccggcgugcugaccgagagcaacaagaaguuccugccguuccagcaguucgggcgcgacaucgccgacacgaccgacgcgguccgcgacccccagacccuggagauccucgacaucacccccugcagcuucggcgggguguccgugaucacgccgggcaccaacaccagcaaccaggucgccgugcuguaccagggcgugaacugcaccgagguccccguggccauccacgccgaccagcugacgcccaccuggcggguguacuccaccgggagcaacgucuuccagacccgcgccggcugccucaucggggcggagcacgugaacaacuccuacgagugcgacauccccaucggcgccggcaucugcgccagcuaccagacgcagaccaacuccccgcggcgcgcccggagcguggcgucccagagcaucaucgccuacaccaugucccugggggccgagaacagcgucgccuacuccaacaacagcaucgccauccccaccaacuucacgaucuccgugaccaccgagauccugcccgugagcaugaccaagacgagcgucgacugcaccauguacaucugcggcgacuccaccgagugcagcaaccuccugcugcaguacggguccuucugcacccagcucaaccgcgcgcugacgggcaucgccguggagcaggacaagaacacccaggagguguucgcccaggucaagcagaucuacaagacgcccccgaucaaggacuucgggggcuucaacuucagccagauccugcccgaccccuccaagcccagcaagcgguccuucaucgaggaccuccuguucaacaaggugacccuggccgacgccggcuucaucaagcaguacggggacugccucggcgacaucgcggcccgcgaccugaucugcgcccagaaguucaacgggcugaccgugcucccgccccugcugaccgacgagaugaucgcccaguacaccagcgcccuccuggcgggcaccaucacguccggguggaccuucggcgccggcgccgcccugcagauccccuucgcgaugcagauggccuaccgguucaacgggaucggcgucacccagaacgugcucuacgagaaccagaagcugaucgccaaccaguucaacagcgccaucgggaagauccaggacucccugagcuccaccgccagcgcgcucggcaagcugcaggacguggucaaccagaacgcccaggcccugaacacgcucgugaagcagcuguccagcaacuucggggccaucuccagcgugcugaacgacauccucucccgccuggacaaggucgaggccgaggugcagaucgaccggcugaucaccggccgccuccagagccugcagaccuacgugacccagcagcugauccgggcggccgagauccgcgccagcgccaaccucgccgcgaccaagauguccgagugcguccugggccagagcaagcggguggacuucugcgggaagggcuaccaccugauguccuucccccagagcgccccgcacgggguggucuuccuccacgugacguacguccccgcccaggagaagaacuucaccaccgcccccgcgaucugccacgacggcaaggcccacuucccccgcgaggggguguucguguccaacggcacccacugguucgucacgcagcggaacuucuacgagccgcagaucaucaccaccgacaacaccuucgugagcggcaacugcgacguggucaucgggaucgugaacaacacgguguacgacccccugcagcccgagcuggacuccuucaaggaggagcucgacaaguacuucaagaaccacaccagccccgacgucgaccugggcgacaucuccgggaucaacgccagcguggugaacauccagaaggagaucgaccgccugaacgaggucgccaagaaccucaacgagucccugaucgaccugcaggagcucggcaaguacgagcaguacaucaaguggccgugguacaucuggcugggcuucaucgccgggcugaucgcgaucgugauggugaccaucaugcucugcugcaugaccagcugcugcuccugccugaagggcugcugcagcugcggguccugcugcaaguucgacgaggacgacagcgagcccguccugaagggcgugaagcuccacuacacgugaggacuaguuauaagacugacuagcccgaugggccucccaacgggcccuccuccccuccuugcaccgagauuaauaaaaaaaaaaaaaaaaaaaaaaaaaaaaaaaaaaaaaaaaaaaaaaaaaaaaaaaaaaaaaaaaaaaaaaaaaaaaaaaaaaaaaaaaaaaaaaaaaaaa

SEQ ID NO: 25411 - RNA, 4011 nt, Artificial Sequence
  SARS-CoV-2/Wuhan/WIV05/2019__EPI_ISL_402128 spike protein mRNA gc (1-1273)(S477N_D614G)
aggagaaagcuuaccauguucguguuccugguccuccugccccuggugagcucccagugcgugaaccucaccacccgcacgcagcugccgcccgccuacaccaacagcuucacccggggcgucuacuaccccgacaagguguuccgcuccagcgugcugcacuccacccaggaccucuuccugcccuucuucagcaacgucacgugguuccacgccauccacguguccgggaccaacggcaccaagcgguucgacaacccggugcugcccuucaacgacggggucuacuucgcgagcaccgagaaguccaacaucauccgcggcuggaucuucgggacgacccucgacagcaagacccagucccugcugaucgugaacaacgccaccaacguggucaucaaggugugcgaguuccaguucugcaacgaccccuuccucggcguguacuaccacaagaacaacaagagcuggauggaguccgaguuccgggucuacagcuccgccaacaacugcacguucgaguacgugagccagcccuuccugauggaccuggagggcaagcaggggaacuucaagaaccuccgcgaguucguguucaagaacaucgacggcuacuucaagaucuacuccaagcacaccccgaucaaccugguccgggaccugccccagggguucagcgcccucgagccccugguggaccugcccaucggcaucaacaucacccgcuuccagacccuccuggcccugcaccgguccuaccucacgccgggggacagcagcuccggcuggaccgcgggcgccgccgccuacuacgugggguaccugcagccccgcaccuuccugcucaaguacaacgagaacggcaccaucacggacgcggucgacugcgcccuggacccccugagcgagaccaagugcacccucaaguccuucaccguggagaaggggaucuaccagacgagcaacuuccgggugcagcccaccgaguccaucguccgcuucccgaacaucaccaaccugugccccuucggcgagguguucaacgccacccgguucgccagcgucuacgccuggaaccgcaagcggaucuccaacugcguggcggacuacagcgugcuguacaacuccgccagcuucuccacguucaagugcuacggcgucagccccaccaagcucaacgaccugugcuucaccaacguguacgccgacuccuucgugauccgcggggacgagguccggcagaucgcccccggccagaccgggaagaucgccgacuacaacuacaagcugccggacgacuucacgggcugcgugaucgcguggaacagcaacaaccucgacuccaaggucgggggcaacuacaacuaccuguaccgccuguuccgcaagagcaaccucaagcccuucgagcgggacaucuccaccgagaucuaccaggccggcaacacccccugcaacgggguggagggcuucaacugcuacuucccccugcagagcuacggguuccagccgaccaacggcgugggguaccagcccuaccggguggucgugcuguccuucgagcuccugcacgcccccgccacggugugcggccccaagaaguccaccaaccuggucaagaacaagugcgugaacuucaacuucaacggccucaccgggaccggcgugcugaccgagagcaacaagaaguuccugccguuccagcaguucgggcgcgacaucgccgacacgaccgacgcgguccgcgacccccagacccuggagauccucgacaucacccccugcagcuucggcggggugagcgugaucacgccgggcaccaacaccuccaaccaggucgccgugcuguaccagggcgugaacugcaccgagguccccguggccauccacgccgaccagcugacgcccaccuggcggguguacagcaccggguccaacgucuuccagacccgcgccggcugccucaucggggcggagcacgugaacaacagcuacgagugcgacauccccaucggcgccggcaucugcgccuccuaccagacgcagaccaacagcccgcggcgcgcccgguccguggcgagccaguccaucaucgccuacaccaugagccugggggccgagaacuccgucgccuacagcaacaacuccaucgccauccccaccaacuucacgaucagcgugaccaccgagauccugcccguguccaugaccaagacgagcgucgacugcaccauguacaucugcggcgacagcaccgagugcuccaaccuccugcugcaguacgggagcuucugcacccagcucaaccgcgcgcugacgggcaucgccguggagcaggacaagaacacccaggagguguucgcccaggucaagcagaucuacaagacgcccccgaucaaggacuucgggggcuucaacuucucccagauccugcccgaccccagcaagcccuccaagcggagcuucaucgaggaccuccuguucaacaaggugacccuggccgacgccggcuucaucaagcaguacggggacugccucggcgacaucgcggcccgcgaccugaucugcgcccagaaguucaacgggcugaccgugcucccgccccugcugaccgacgagaugaucgcccaguacaccuccgcccuccuggcgggcaccaucacgagcggguggaccuucggcgccggcgccgcccugcagauccccuucgcgaugcagauggccuaccgguucaacgggaucggcgucacccagaacgugcucuacgagaaccagaagcugaucgccaaccaguucaacuccgccaucgggaagauccaggacagccuguccagcaccgccuccgcgcucggcaagcugcaggacguggucaaccagaacgcccaggcccugaacacgcucgugaagcagcugagcuccaacuucggggccaucagcuccgugcugaacgacauccucagccgccuggacaaggucgaggccgaggugcagaucgaccggcugaucaccggccgccuccagucccugcagaccuacgugacccagcagcugauccgggcggccgagauccgcgccagcgccaaccucgccgcgaccaagaugagcgagugcguccugggccaguccaagcggguggacuucugcgggaagggcuaccaccugaugagcuucccccaguccgccccgcacgggguggucuuccuccacgugacguacguccccgcccaggagaagaacuucaccaccgcccccgcgaucugccacgacggcaaggcccacuucccccgcgaggggguguucgugagcaacggcacccacugguucgucacgcagcggaacuucuacgagccgcagaucaucaccaccgacaacaccuucguguccggcaacugcgacguggucaucgggaucgugaacaacacgguguacgacccccugcagcccgagcuggacagcuucaaggaggagcucgacaaguacuucaagaaccacaccucccccgacgucgaccugggcgacaucagcgggaucaacgccuccguggugaacauccagaaggagaucgaccgccugaacgaggucgccaagaaccucaacgagagccugaucgaccugcaggagcucggcaaguacgagcaguacaucaaguggccgugguacaucuggcugggcuucaucgccgggcugaucgcgaucgugauggugaccaucaugcucugcugcaugaccuccugcugcagcugccugaagggcugcugcuccugcgggagcugcugcaaguucgacgaggacgacuccgagcccguccugaagggcgugaagcuccacuacacgugaggacuaguuauaagacugacuagcccgaugggccucccaacgggcccuccuccccuccuugcaccgagauuaauaaaaaaaaaaaaaaaaaaaaaaaaaaaaaaaaaaaaaaaaaaaaaaaaaaaaaaaaaaaaaaaaaaaaaaaaaaaaaaaaaaaaaaaaaaaaaaaaaaaa

SEQ ID NO: 25412 - RNA, 4011 nt, Artificial Sequence
  SARS-CoV-2/Wuhan/WIV05/2019__EPI_ISL_402128 spike protein mRNA gc (1-1273)(N501Y_D614G)
aggagaaagcuuaccauguucguguuccugguccuccugccccuggugagcucccagugcgugaaccucaccacccgcacgcagcugccgcccgccuacaccaacagcuucacccggggcgucuacuaccccgacaagguguuccgcuccagcgugcugcacuccacccaggaccucuuccugcccuucuucagcaacgucacgugguuccacgccauccacguguccgggaccaacggcaccaagcgguucgacaacccggugcugcccuucaacgacggggucuacuucgcgagcaccgagaaguccaacaucauccgcggcuggaucuucgggacgacccucgacagcaagacccagucccugcugaucgugaacaacgccaccaacguggucaucaaggugugcgaguuccaguucugcaacgaccccuuccucggcguguacuaccacaagaacaacaagagcuggauggaguccgaguuccgggucuacagcuccgccaacaacugcacguucgaguacgugagccagcccuuccugauggaccuggagggcaagcaggggaacuucaagaaccuccgcgaguucguguucaagaacaucgacggcuacuucaagaucuacuccaagcacaccccgaucaaccugguccgggaccugccccagggguucagcgcccucgagccccugguggaccugcccaucggcaucaacaucacccgcuuccagacccuccuggcccugcaccgguccuaccucacgccgggggacagcagcuccggcuggaccgcgggcgccgccgccuacuacgugggguaccugcagccccgcaccuuccugcucaaguacaacgagaacggcaccaucacggacgcggucgacugcgcccuggacccccugagcgagaccaagugcacccucaaguccuucaccguggagaaggggaucuaccagacgagcaacuuccgggugcagcccaccgaguccaucguccgcuucccgaacaucaccaaccugugccccuucggcgagguguucaacgccacccgguucgccagcgucuacgccuggaaccgcaagcggaucuccaacugcguggcggacuacagcgugcuguacaacuccgccagcuucuccacguucaagugcuacggcgucagccccaccaagcucaacgaccugugcuucaccaacguguacgccgacuccuucgugauccgcggggacgagguccggcagaucgcccccggccagaccgggaagaucgccgacuacaacuacaagcugccggacgacuucacgggcugcgugaucgcguggaacagcaacaaccucgacuccaaggucgggggcaacuacaacuaccuguaccgccuguuccgcaagagcaaccucaagcccuucgagcgggacaucuccaccgagaucuaccaggccggcagcacccccugcaacgggguggagggcuucaacugcuacuucccccugcaguccuacggguuccagccgaccuacggcgugggguaccagcccuaccggguggucgugcugagcuucgagcuccugcacgcccccgccacggugugcggccccaagaaguccaccaaccuggucaagaacaagugcgugaacuucaacuucaacggccucaccgggaccggcgugcugaccgagagcaacaagaaguuccugccguuccagcaguucgggcgcgacaucgccgacacgaccgacgcgguccgcgacccccagacccuggagauccucgacaucacccccugcagcuucggcgggguguccgugaucacgccgggcaccaacaccagcaaccaggucgccgugcuguaccagggcgugaacugcaccgagguccccguggccauccacgccgaccagcugacgcccaccuggcggguguacuccaccgggagcaacgucuuccagacccgcgccggcugccucaucggggcggagcacgugaacaacuccuacgagugcgacauccccaucggcgccggcaucugcgccagcuaccagacgcagaccaacuccccgcggcgcgcccggagcguggcgucccagagcaucaucgccuacaccaugucccugggggccgagaacagcgucgccuacuccaacaacagcaucgccauccccaccaacuucacgaucuccgugaccaccgagauccugcccgugagcaugaccaagacgagcgucgacugcaccauguacaucugcggcgacuccaccgagugcagcaaccuccugcugcaguacggguccuucugcacccagcucaaccgcgcgcugacgggcaucgccguggagcaggacaagaacacccaggagguguucgcccaggucaagcagaucuacaagacgcccccgaucaaggacuucgggggcuucaacuucagccagauccugcccgaccccuccaagcccagcaagcgguccuucaucgaggaccuccuguucaacaaggugacccuggccgacgccggcuucaucaagcaguacggggacugccucggcgacaucgcggcccgcgaccugaucugcgcccagaaguucaacgggcugaccgugcucccgccccugcugaccgacgagaugaucgcccaguacaccagcgcccuccuggcgggcaccaucacguccggguggaccuucggcgccggcgccgcccugcagauccccuucgcgaugcagauggccuaccgguucaacgggaucggcgucacccagaacgugcucuacgagaaccagaagcugaucgccaaccaguucaacagcgccaucgggaagauccaggacucccugagcuccaccgccagcgcgcucggcaagcugcaggacguggucaaccagaacgcccaggcccugaacacgcucgugaagcagcuguccagcaacuucggggccaucuccagcgugcugaacgacauccucucccgccuggacaaggucgaggccgaggugcagaucgaccggcugaucaccggccgccuccagagccugcagaccuacgugacccagcagcugauccgggcggccgagauccgcgccagcgccaaccucgccgcgaccaagauguccgagugcguccugggccagagcaagcggguggacuucugcgggaagggcuaccaccugauguccuucccccagagcgccccgcacgggguggucuuccuccacgugacguacguccccgcccaggagaagaacuucaccaccgcccccgcgaucugccacgacggcaaggcccacuucccccgcgaggggguguucguguccaacggcacccacugguucgucacgcagcggaacuucuacgagccgcagaucaucaccaccgacaacaccuucgugagcggcaacugcgacguggucaucgggaucgugaacaacacgguguacgacccccugcagcccgagcuggacuccuucaaggaggagcucgacaaguacuucaagaaccacaccagccccgacgucgaccugggcgacaucuccgggaucaacgccagcguggugaacauccagaaggagaucgaccgccugaacgaggucgccaagaaccucaacgagucccugaucgaccugcaggagcucggcaaguacgagcaguacaucaaguggccgugguacaucuggcugggcuucaucgccgggcugaucgcgaucgugauggugaccaucaugcucugcugcaugaccagcugcugcuccugccugaagggcugcugcagcugcggguccugcugcaaguucgacgaggacgacagcgagcccguccugaagggcgugaagcuccacuacacgugaggacuaguuauaagacugacuagcccgaugggccucccaacgggcccuccuccccuccuugcaccgagauuaauaaaaaaaaaaaaaaaaaaaaaaaaaaaaaaaaaaaaaaaaaaaaaaaaaaaaaaaaaaaaaaaaaaaaaaaaaaaaaaaaaaaaaaaaaaaaaaaaaaaa

SEQ ID NO: 25413 - RNA, 4005 nt, Artificial Sequence
  SARS-CoV-2/Wuhan/WIV05/2019__EPI_ISL_402128 spike protein mRNA gc (1-1273)(H69del_V70del_D614G)
aggagaaagcuuaccauguucguguuccugguccuccugccccuggugagcucccagugcgugaaccucaccacccgcacgcagcugccgcccgccuacaccaacagcuucacccggggcgucuacuaccccgacaagguguuccgcuccagcgugcugcacuccacccaggaccucuuccugcccuucuucagcaacgucacgugguuccacgccaucuccgggaccaacggcaccaagcgguucgacaacccggugcugcccuucaacgacgggguguacuucgcgagcaccgagaaguccaacaucauccgcggcuggaucuucgggacgacccucgacagcaagacccagucccugcugaucgucaacaacgccaccaacguggugaucaaggucugcgaguuccaguucugcaacgaccccuuccucggcguguacuaccacaagaacaacaagagcuggauggaguccgaguuccggguguacagcuccgccaacaacugcacguucgaguacgucagccagcccuuccugauggaccuggagggcaagcaggggaacuucaagaaccuccgcgaguucguguucaagaacaucgacggcuacuucaagaucuacuccaagcacaccccgaucaaccuggugcgggaccugccccagggguucagcgcccucgagccccuggucgaccugcccaucggcaucaacaucacccgcuuccagacccuccuggcccugcaccgguccuaccucacgccgggggacagcagcuccggcuggaccgcgggcgccgccgccuacuacgugggguaccugcagccccgcaccuuccugcucaaguacaacgagaacggcaccaucacggacgcgguggacugcgcccuggacccccugagcgagaccaagugcacccucaaguccuucaccgucgagaaggggaucuaccagacgagcaacuuccgggugcagcccaccgaguccaucgugcgcuucccgaacaucaccaaccugugccccuucggcgaggucuucaacgccacccgguucgccagcguguacgccuggaaccgcaagcggaucuccaacugcgucgcggacuacagcgugcuguacaacuccgccagcuucuccacguucaagugcuacggcgugagccccaccaagcucaacgaccugugcuucaccaacgucuacgccgacuccuucgugauccgcggggacgaggugcggcagaucgcccccggccagaccgggaagaucgccgacuacaacuacaagcugccggacgacuucacgggcugcgucaucgcguggaacagcaacaaccucgacuccaaggucgggggcaacuacaacuaccuguaccgccuguuccgcaagagcaaccucaagcccuucgagcgggacaucuccaccgagaucuaccaggccggcagcacccccugcaacgggguggagggcuucaacugcuacuucccccugcaguccuacggguuccagccgaccaacggcgugggguaccagcccuaccggguggugguccugagcuucgagcuccugcacgcccccgccacggugugcggccccaagaaguccaccaaccuggugaagaacaagugcgucaacuucaacuucaacggccucaccgggaccggcgugcugaccgagagcaacaagaaguuccugccguuccagcaguucgggcgcgacaucgccgacacgaccgacgcggugcgcgacccccagacccuggagauccucgacaucacccccugcagcuucggcggggucuccgugaucacgccgggcaccaacaccagcaaccagguggccguccuguaccagggcgugaacugcaccgaggugcccgucgccauccacgccgaccagcugacgcccaccuggcggguguacuccaccgggagcaacguguuccagacccgcgccggcugccucaucggggcggagcacgucaacaacuccuacgagugcgacauccccaucggcgccggcaucugcgccagcuaccagacgcagaccaacuccccgcggcgcgcccggagcguggcgucccagagcaucaucgccuacaccaugucccugggggccgagaacagcguggccuacuccaacaacagcaucgccauccccaccaacuucacgaucuccgucaccaccgagauccugcccgugagcaugaccaagacgagcguggacugcaccauguacaucugcggcgacuccaccgagugcagcaaccuccugcugcaguacggguccuucugcacccagcucaaccgcgcgcugacgggcaucgccgucgagcaggacaagaacacccaggagguguucgcccaggugaagcagaucuacaagacgcccccgaucaaggacuucgggggcuucaacuucagccagauccugcccgaccccuccaagcccagcaagcgguccuucaucgaggaccuccuguucaacaaggucacccuggccgacgccggcuucaucaagcaguacggggacugccucggcgacaucgcggcccgcgaccugaucugcgcccagaaguucaacgggcugaccgugcucccgccccugcugaccgacgagaugaucgcccaguacaccagcgcccuccuggcgggcaccaucacguccggguggaccuucggcgccggcgccgcccugcagauccccuucgcgaugcagauggccuaccgguucaacgggaucggcgugacccagaacguccucuacgagaaccagaagcugaucgccaaccaguucaacagcgccaucgggaagauccaggacucccugagcuccaccgccagcgcgcucggcaagcugcaggacguggugaaccagaacgcccaggcccugaacacgcucgucaagcagcuguccagcaacuucggggccaucuccagcgugcugaacgacauccucucccgccuggacaagguggaggccgagguccagaucgaccggcugaucaccggccgccuccagagccugcagaccuacgugacccagcagcugauccgggcggccgagauccgcgccagcgccaaccucgccgcgaccaagauguccgagugcgugcugggccagagcaagcgggucgacuucugcgggaagggcuaccaccugauguccuucccccagagcgccccgcacggggugguguuccuccacgucacguacgugcccgcccaggagaagaacuucaccaccgcccccgcgaucugccacgacggcaaggcccacuucccccgcgagggggucuucguguccaacggcacccacugguucgugacgcagcggaacuucuacgagccgcagaucaucaccaccgacaacaccuucgucagcggcaacugcgacguggugaucgggaucgucaacaacacgguguacgacccccugcagcccgagcuggacuccuucaaggaggagcucgacaaguacuucaagaaccacaccagccccgacguggaccugggcgacaucuccgggaucaacgccagcgucgugaacauccagaaggagaucgaccgccugaacgagguggccaagaaccucaacgagucccugaucgaccugcaggagcucggcaaguacgagcaguacaucaaguggccgugguacaucuggcugggcuucaucgccgggcugaucgcgaucgucauggugaccaucaugcucugcugcaugaccagcugcugcuccugccugaagggcugcugcagcugcggguccugcugcaaguucgacgaggacgacagcgagcccgugcugaagggcgucaagcuccacuacacgugaggacuaguuauaagacugacuagcccgaugggccucccaacgggcccuccuccccuccuugcaccgagauuaauaaaaaaaaaaaaaaaaaaaaaaaaaaaaaaaaaaaaaaaaaaaaaaaaaaaaaaaaaaaaaaaaaaaaaaaaaaaaaaaaaaaaaaaaaaaaaaaaaaaa

SEQ ID NO: 25414 - RNA, 4011 nt, Artificial Sequence
  SARS-CoV-2/Wuhan/WIV05/2019__EPI_ISL_402128 spike protein mRNA gc (1-1273)(Y453F_D614G)
aggagaaagcuuaccauguucguguuccugguccuccugccccuggugagcucccagugcgugaaccucaccacccgcacgcagcugccgcccgccuacaccaacagcuucacccggggcgucuacuaccccgacaagguguuccgcuccagcgugcugcacuccacccaggaccucuuccugcccuucuucagcaacgucacgugguuccacgccauccacguguccgggaccaacggcaccaagcgguucgacaacccggugcugcccuucaacgacggggucuacuucgcgagcaccgagaaguccaacaucauccgcggcuggaucuucgggacgacccucgacagcaagacccagucccugcugaucgugaacaacgccaccaacguggucaucaaggugugcgaguuccaguucugcaacgaccccuuccucggcguguacuaccacaagaacaacaagagcuggauggaguccgaguuccgggucuacagcuccgccaacaacugcacguucgaguacgugagccagcccuuccugauggaccuggagggcaagcaggggaacuucaagaaccuccgcgaguucguguucaagaacaucgacggcuacuucaagaucuacuccaagcacaccccgaucaaccugguccgggaccugccccagggguucagcgcccucgagccccugguggaccugcccaucggcaucaacaucacccgcuuccagacccuccuggcccugcaccgguccuaccucacgccgggggacagcagcuccggcuggaccgcgggcgccgccgccuacuacgugggguaccugcagccccgcaccuuccugcucaaguacaacgagaacggcaccaucacggacgcggucgacugcgcccuggacccccugagcgagaccaagugcacccucaaguccuucaccguggagaaggggaucuaccagacgagcaacuuccgggugcagcccaccgaguccaucguccgcuucccgaacaucaccaaccugugccccuucggcgagguguucaacgccacccgguucgccagcgucuacgccuggaaccgcaagcggaucuccaacugcguggcggacuacagcgugcuguacaacuccgccagcuucuccacguucaagugcuacggcgucagccccaccaagcucaacgaccugugcuucaccaacguguacgccgacuccuucgugauccgcggggacgagguccggcagaucgcccccggccagaccgggaagaucgccgacuacaacuacaagcugccggacgacuucacgggcugcgugaucgcguggaacagcaacaaccucgacuccaaggucgggggcaacuacaacuaccuguuccgccuguuccgcaagagcaaccucaagcccuucgagcgggacaucuccaccgagaucuaccaggccggcagcacccccugcaacgggguggagggcuucaacugcuacuucccccugcaguccuacggguuccagccgaccaacggcgugggguaccagcccuaccggguggucgugcugagcuucgagcuccugcacgcccccgccacggugugcggccccaagaaguccaccaaccuggucaagaacaagugcgugaacuucaacuucaacggccucaccgggaccggcgugcugaccgagagcaacaagaaguuccugccguuccagcaguucgggcgcgacaucgccgacacgaccgacgcgguccgcgacccccagacccuggagauccucgacaucacccccugcagcuucggcgggguguccgugaucacgccgggcaccaacaccagcaaccaggucgccgugcuguaccagggcgugaacugcaccgagguccccguggccauccacgccgaccagcugacgcccaccuggcggguguacuccaccgggagcaacgucuuccagacccgcgccggcugccucaucggggcggagcacgugaacaacuccuacgagugcgacauccccaucggcgccggcaucugcgccagcuaccagacgcagaccaacuccccgcggcgcgcccggagcguggcgucccagagcaucaucgccuacaccaugucccugggggccgagaacagcgucgccuacuccaacaacagcaucgccauccccaccaacuucacgaucuccgugaccaccgagauccugcccgugagcaugaccaagacgagcgucgacugcaccauguacaucugcggcgacuccaccgagugcagcaaccuccugcugcaguacggguccuucugcacccagcucaaccgcgcgcugacgggcaucgccguggagcaggacaagaacacccaggagguguucgcccaggucaagcagaucuacaagacgcccccgaucaaggacuucgggggcuucaacuucagccagauccugcccgaccccuccaagcccagcaagcgguccuucaucgaggaccuccuguucaacaaggugacccuggccgacgccggcuucaucaagcaguacggggacugccucggcgacaucgcggcccgcgaccugaucugcgcccagaaguucaacgggcugaccgugcucccgccccugcugaccgacgagaugaucgcccaguacaccagcgcccuccuggcgggcaccaucacguccggguggaccuucggcgccggcgccgcccugcagauccccuucgcgaugcagauggccuaccgguucaacgggaucggcgucacccagaacgugcucuacgagaaccagaagcugaucgccaaccaguucaacagcgccaucgggaagauccaggacucccugagcuccaccgccagcgcgcucggcaagcugcaggacguggucaaccagaacgcccaggcccugaacacgcucgugaagcagcuguccagcaacuucggggccaucuccagcgugcugaacgacauccucucccgccuggacaaggucgaggccgaggugcagaucgaccggcugaucaccggccgccuccagagccugcagaccuacgugacccagcagcugauccgggcggccgagauccgcgccagcgccaaccucgccgcgaccaagauguccgagugcguccugggccagagcaagcggguggacuucugcgggaagggcuaccaccugauguccuucccccagagcgccccgcacgggguggucuuccuccacgugacguacguccccgcccaggagaagaacuucaccaccgcccccgcgaucugccacgacggcaaggcccacuucccccgcgaggggguguucguguccaacggcacccacugguucgucacgcagcggaacuucuacgagccgcagaucaucaccaccgacaacaccuucgugagcggcaacugcgacguggucaucgggaucgugaacaacacgguguacgacccccugcagcccgagcuggacuccuucaaggaggagcucgacaaguacuucaagaaccacaccagccccgacgucgaccugggcgacaucuccgggaucaacgccagcguggugaacauccagaaggagaucgaccgccugaacgaggucgccaagaaccucaacgagucccugaucgaccugcaggagcucggcaaguacgagcaguacaucaaguggccgugguacaucuggcugggcuucaucgccgggcugaucgcgaucgugauggugaccaucaugcucugcugcaugaccagcugcugcuccugccugaagggcugcugcagcugcggguccugcugcaaguucgacgaggacgacagcgagcccguccugaagggcgugaagcuccacuacacgugaggacuaguuauaagacugacuagcccgaugggccucccaacgggcccuccuccccuccuugcaccgagauuaauaaaaaaaaaaaaaaaaaaaaaaaaaaaaaaaaaaaaaaaaaaaaaaaaaaaaaaaaaaaaaaaaaaaaaaaaaaaaaaaaaaaaaaaaaaaaaaaaaaaa

SEQ ID NO: 25415 - RNA, 4011 nt, Artificial Sequence
  SARS-CoV-2/Wuhan/WIV05/2019__EPI_ISL_402128 spike protein mRNA gc (1-1273)(D614G_I692V)
aggagaaagcuuaccauguucguguuccugguccuccugccccuggugagcucccagugcgugaaccucaccacccgcacgcagcugccgcccgccuacaccaacagcuucacccggggcgucuacuaccccgacaagguguuccgcuccagcgugcugcacuccacccaggaccucuuccugcccuucuucagcaacgucacgugguuccacgccauccacguguccgggaccaacggcaccaagcgguucgacaacccggugcugcccuucaacgacggggucuacuucgcgagcaccgagaaguccaacaucauccgcggcuggaucuucgggacgacccucgacagcaagacccagucccugcugaucgugaacaacgccaccaacguggucaucaaggugugcgaguuccaguucugcaacgaccccuuccucggcguguacuaccacaagaacaacaagagcuggauggaguccgaguuccgggucuacagcuccgccaacaacugcacguucgaguacgugagccagcccuuccugauggaccuggagggcaagcaggggaacuucaagaaccuccgcgaguucguguucaagaacaucgacggcuacuucaagaucuacuccaagcacaccccgaucaaccugguccgggaccugccccagggguucagcgcccucgagccccugguggaccugcccaucggcaucaacaucacccgcuuccagacccuccuggcccugcaccgguccuaccucacgccgggggacagcagcuccggcuggaccgcgggcgccgccgccuacuacgugggguaccugcagccccgcaccuuccugcucaaguacaacgagaacggcaccaucacggacgcggucgacugcgcccuggacccccugagcgagaccaagugcacccucaaguccuucaccguggagaaggggaucuaccagacgagcaacuuccgggugcagcccaccgaguccaucguccgcuucccgaacaucaccaaccugugccccuucggcgagguguucaacgccacccgguucgccagcgucuacgccuggaaccgcaagcggaucuccaacugcguggcggacuacagcgugcuguacaacuccgccagcuucuccacguucaagugcuacggcgucagccccaccaagcucaacgaccugugcuucaccaacguguacgccgacuccuucgugauccgcggggacgagguccggcagaucgcccccggccagaccgggaagaucgccgacuacaacuacaagcugccggacgacuucacgggcugcgugaucgcguggaacagcaacaaccucgacuccaaggucgggggcaacuacaacuaccuguaccgccuguuccgcaagagcaaccucaagcccuucgagcgggacaucuccaccgagaucuaccaggccggcagcacccccugcaacgggguggagggcuucaacugcuacuucccccugcaguccuacggguuccagccgaccaacggcgugggguaccagcccuaccggguggucgugcugagcuucgagcuccugcacgcccccgccacggugugcggccccaagaaguccaccaaccuggucaagaacaagugcgugaacuucaacuucaacggccucaccgggaccggcgugcugaccgagagcaacaagaaguuccugccguuccagcaguucgggcgcgacaucgccgacacgaccgacgcgguccgcgacccccagacccuggagauccucgacaucacccccugcagcuucggcgggguguccgugaucacgccgggcaccaacaccagcaaccaggucgccgugcuguaccagggcgugaacugcaccgagguccccguggccauccacgccgaccagcugacgcccaccuggcggguguacuccaccgggagcaacgucuuccagacccgcgccggcugccucaucggggcggagcacgugaacaacuccuacgagugcgacauccccaucggcgccggcaucugcgccagcuaccagacgcagaccaacuccccgcggcgcgcccggagcguggcgucccagagcgucaucgccuacaccaugucccugggggccgagaacagcguggccuacuccaacaacagcaucgccauccccaccaacuucacgaucuccgugaccaccgagauccugcccgucagcaugaccaagacgagcguggacugcaccauguacaucugcggcgacuccaccgagugcagcaaccuccugcugcaguacggguccuucugcacccagcucaaccgcgcgcugacgggcaucgccguggagcaggacaagaacacccaggaggucuucgcccaggugaagcagaucuacaagacgcccccgaucaaggacuucgggggcuucaacuucagccagauccugcccgaccccuccaagcccagcaagcgguccuucaucgaggaccuccuguucaacaaggugacccuggccgacgccggcuucaucaagcaguacggggacugccucggcgacaucgcggcccgcgaccugaucugcgcccagaaguucaacgggcugaccguccucccgccccugcugaccgacgagaugaucgcccaguacaccagcgcccuccuggcgggcaccaucacguccggguggaccuucggcgccggcgccgcccugcagauccccuucgcgaugcagauggccuaccgguucaacgggaucggcgugacccagaacgugcucuacgagaaccagaagcugaucgccaaccaguucaacagcgccaucgggaagauccaggacucccugagcuccaccgccagcgcgcucggcaagcugcaggacgucgugaaccagaacgcccaggcccugaacacgcucgugaagcagcuguccagcaacuucggggccaucuccagcguccugaacgacauccucucccgccuggacaagguggaggccgaggugcagaucgaccggcugaucaccggccgccuccagagccugcagaccuacgucacccagcagcugauccgggcggccgagauccgcgccagcgccaaccucgccgcgaccaagauguccgagugcgugcugggccagagcaagcggguggacuucugcgggaagggcuaccaccugauguccuucccccagagcgccccgcacggggucguguuccuccacgucacguacgugcccgcccaggagaagaacuucaccaccgcccccgcgaucugccacgacggcaaggcccacuucccccgcgaggggguguucgucuccaacggcacccacugguucgugacgcagcggaacuucuacgagccgcagaucaucaccaccgacaacaccuucgugagcggcaacugcgacgucgugaucgggaucgugaacaacacggucuacgacccccugcagcccgagcuggacuccuucaaggaggagcucgacaaguacuucaagaaccacaccagccccgacguggaccugggcgacaucuccgggaucaacgccagcguggucaacauccagaaggagaucgaccgccugaacgagguggccaagaaccucaacgagucccugaucgaccugcaggagcucggcaaguacgagcaguacaucaaguggccgugguacaucuggcugggcuucaucgccgggcugaucgcgaucgugauggucaccaucaugcucugcugcaugaccagcugcugcuccugccugaagggcugcugcagcugcggguccugcugcaaguucgacgaggacgacagcgagcccgugcugaagggcgugaagcuccacuacacgugaggacuaguuauaagacugacuagcccgaugggccucccaacgggcccuccuccccuccuugcaccgagauuaauaaaaaaaaaaaaaaaaaaaaaaaaaaaaaaaaaaaaaaaaaaaaaaaaaaaaaaaaaaaaaaaaaaaaaaaaaaaaaaaaaaaaaaaaaaaaaaaaaaaa

SEQ ID NO: 25416 - RNA, 4011 nt, Artificial Sequence
  SARS-CoV-2/Wuhan/WIV05/2019__EPI_ISL_402128 spike protein mRNA gc (1-1273)(D614G_M1229I)
aggagaaagcuuaccauguucguguuccugguccuccugccccuggugagcucccagugcgugaaccucaccacccgcacgcagcugccgcccgccuacaccaacagcuucacccggggcgucuacuaccccgacaagguguuccgcuccagcgugcugcacuccacccaggaccucuuccugcccuucuucagcaacgucacgugguuccacgccauccacguguccgggaccaacggcaccaagcgguucgacaacccggugcugcccuucaacgacggggucuacuucgcgagcaccgagaaguccaacaucauccgcggcuggaucuucgggacgacccucgacagcaagacccagucccugcugaucgugaacaacgccaccaacguggucaucaaggugugcgaguuccaguucugcaacgaccccuuccucggcguguacuaccacaagaacaacaagagcuggauggaguccgaguuccgggucuacagcuccgccaacaacugcacguucgaguacgugagccagcccuuccugauggaccuggagggcaagcaggggaacuucaagaaccuccgcgaguucguguucaagaacaucgacggcuacuucaagaucuacuccaagcacaccccgaucaaccugguccgggaccugccccagggguucagcgcccucgagccccugguggaccugcccaucggcaucaacaucacccgcuuccagacccuccuggcccugcaccgguccuaccucacgccgggggacagcagcuccggcuggaccgcgggcgccgccgccuacuacgugggguaccugcagccccgcaccuuccugcucaaguacaacgagaacggcaccaucacggacgcggucgacugcgcccuggacccccugagcgagaccaagugcacccucaaguccuucaccguggagaaggggaucuaccagacgagcaacuuccgggugcagcccaccgaguccaucguccgcuucccgaacaucaccaaccugugccccuucggcgagguguucaacgccacccgguucgccagcgucuacgccuggaaccgcaagcggaucuccaacugcguggcggacuacagcgugcuguacaacuccgccagcuucuccacguucaagugcuacggcgucagccccaccaagcucaacgaccugugcuucaccaacguguacgccgacuccuucgugauccgcggggacgagguccggcagaucgcccccggccagaccgggaagaucgccgacuacaacuacaagcugccggacgacuucacgggcugcgugaucgcguggaacagcaacaaccucgacuccaaggucgggggcaacuacaacuaccuguaccgccuguuccgcaagagcaaccucaagcccuucgagcgggacaucuccaccgagaucuaccaggccggcagcacccccugcaacgggguggagggcuucaacugcuacuucccccugcaguccuacggguuccagccgaccaacggcgugggguaccagcccuaccggguggucgugcugagcuucgagcuccugcacgcccccgccacggugugcggccccaagaaguccaccaaccuggucaagaacaagugcgugaacuucaacuucaacggccucaccgggaccggcgugcugaccgagagcaacaagaaguuccugccguuccagcaguucgggcgcgacaucgccgacacgaccgacgcgguccgcgacccccagacccuggagauccucgacaucacccccugcagcuucggcgggguguccgugaucacgccgggcaccaacaccagcaaccaggucgccgugcuguaccagggcgugaacugcaccgagguccccguggccauccacgccgaccagcugacgcccaccuggcggguguacuccaccgggagcaacgucuuccagacccgcgccggcugccucaucggggcggagcacgugaacaacuccuacgagugcgacauccccaucggcgccggcaucugcgccagcuaccagacgcagaccaacuccccgcggcgcgcccggagcguggcgucccagagcaucaucgccuacaccaugucccugggggccgagaacagcgucgccuacuccaacaacagcaucgccauccccaccaacuucacgaucuccgugaccaccgagauccugcccgugagcaugaccaagacgagcgucgacugcaccauguacaucugcggcgacuccaccgagugcagcaaccuccugcugcaguacggguccuucugcacccagcucaaccgcgcgcugacgggcaucgccguggagcaggacaagaacacccaggagguguucgcccaggucaagcagaucuacaagacgcccccgaucaaggacuucgggggcuucaacuucagccagauccugcccgaccccuccaagcccagcaagcgguccuucaucgaggaccuccuguucaacaaggugacccuggccgacgccggcuucaucaagcaguacggggacugccucggcgacaucgcggcccgcgaccugaucugcgcccagaaguucaacgggcugaccgugcucccgccccugcugaccgacgagaugaucgcccaguacaccagcgcccuccuggcgggcaccaucacguccggguggaccuucggcgccggcgccgcccugcagauccccuucgcgaugcagauggccuaccgguucaacgggaucggcgucacccagaacgugcucuacgagaaccagaagcugaucgccaaccaguucaacagcgccaucgggaagauccaggacucccugagcuccaccgccagcgcgcucggcaagcugcaggacguggucaaccagaacgcccaggcccugaacacgcucgugaagcagcuguccagcaacuucggggccaucuccagcgugcugaacgacauccucucccgccuggacaaggucgaggccgaggugcagaucgaccggcugaucaccggccgccuccagagccugcagaccuacgugacccagcagcugauccgggcggccgagauccgcgccagcgccaaccucgccgcgaccaagauguccgagugcguccugggccagagcaagcggguggacuucugcgggaagggcuaccaccugauguccuucccccagagcgccccgcacgggguggucuuccuccacgugacguacguccccgcccaggagaagaacuucaccaccgcccccgcgaucugccacgacggcaaggcccacuucccccgcgaggggguguucguguccaacggcacccacugguucgucacgcagcggaacuucuacgagccgcagaucaucaccaccgacaacaccuucgugagcggcaacugcgacguggucaucgggaucgugaacaacacgguguacgacccccugcagcccgagcuggacuccuucaaggaggagcucgacaaguacuucaagaaccacaccagccccgacgucgaccugggcgacaucuccgggaucaacgccagcguggugaacauccagaaggagaucgaccgccugaacgaggucgccaagaaccucaacgagucccugaucgaccugcaggagcucggcaaguacgagcaguacaucaaguggccgugguacaucuggcugggcuucaucgccgggcugaucgcgaucgugaucgugaccaucaugcucugcugcaugaccagcugcugcuccugccugaagggcugcugcagcugcggguccugcugcaaguucgacgaggacgacagcgagcccguccugaagggcgugaagcuccacuacacgugaggacuaguuauaagacugacuagcccgaugggccucccaacgggcccuccuccccuccuugcaccgagauuaauaaaaaaaaaaaaaaaaaaaaaaaaaaaaaaaaaaaaaaaaaaaaaaaaaaaaaaaaaaaaaaaaaaaaaaaaaaaaaaaaaaaaaaaaaaaaaaaaaaaa

SEQ ID NO: 25417 - RNA, 4005 nt, Artificial Sequence
  SARS-CoV-2/Wuhan/WIV05/2019__EPI_ISL_402128 spike protein mRNA gc (1-1273)(H69del_V70del_A222V_Y453F_S477N_D614G_I692V)
aggagaaagcuuaccauguucguguuccugguccuccugccccuggugagcucccagugcgugaaccucaccacccgcacgcagcugccgcccgccuacaccaacagcuucacccggggcgucuacuaccccgacaagguguuccgcuccagcgugcugcacuccacccaggaccucuuccugcccuucuucagcaacgucacgugguuccacgccaucuccgggaccaacggcaccaagcgguucgacaacccggugcugcccuucaacgacgggguguacuucgcgagcaccgagaaguccaacaucauccgcggcuggaucuucgggacgacccucgacagcaagacccagucccugcugaucgucaacaacgccaccaacguggugaucaaggucugcgaguuccaguucugcaacgaccccuuccucggcguguacuaccacaagaacaacaagagcuggauggaguccgaguuccggguguacagcuccgccaacaacugcacguucgaguacgucagccagcccuuccugauggaccuggagggcaagcaggggaacuucaagaaccuccgcgaguucguguucaagaacaucgacggcuacuucaagaucuacuccaagcacaccccgaucaaccuggugcgggaccugccccagggguucagcguccucgagccccugguggaccugcccaucggcaucaacaucacccgcuuccagacccuccuggcccugcaccgguccuaccucacgccgggggacagcagcuccggcuggaccgccggcgcggccgccuacuacgugggguaccugcagccccgcaccuuccugcucaaguacaacgagaacggcaccaucacggacgccgucgacugcgcgcuggacccccugagcgagaccaagugcacccucaaguccuucaccguggagaaggggaucuaccagacgagcaacuuccgggugcagcccaccgaguccaucguccgcuucccgaacaucaccaaccugugccccuucggcgagguguucaacgccacccgguucgccagcgucuacgccuggaaccgcaagcggaucuccaacugcguggccgacuacagcgugcuguacaacuccgcgagcuucuccacguucaagugcuacggcgucagccccaccaagcucaacgaccugugcuucaccaacguguacgccgacuccuucgugauccgcggggacgagguccggcagaucgcccccggccagaccgggaagaucgccgacuacaacuacaagcugccggacgacuucacgggcugcgugaucgccuggaacagcaacaaccucgacuccaaggucgggggcaacuacaacuaccuguuccgccuguuccgcaagagcaaccucaagcccuucgagcgggacaucuccaccgagaucuaccaggcgggcaacacccccugcaacgggguggagggcuucaacugcuacuucccccugcagagcuacggguuccagccgaccaacggcgugggguaccagcccuaccggguggucgugcuguccuucgagcuccugcacgcccccgccacggugugcggccccaagaaguccaccaaccuggucaagaacaagugcgugaacuucaacuucaacggccucaccgggaccggcgugcugaccgagagcaacaagaaguuccugccguuccagcaguucgggcgcgacaucgccgacacgaccgacgccguccgcgacccccagacccuggagauccucgacaucacccccugcagcuucggcggggugagcgugaucacgccgggcaccaacaccuccaaccaggucgcggugcuguaccagggcgugaacugcaccgagguccccguggccauccacgccgaccagcugacgcccaccuggcggguguacagcaccggguccaacgucuuccagacccgcgccggcugccucaucggggccgagcacgugaacaacagcuacgagugcgacauccccaucggcgcgggcaucugcgccuccuaccagacgcagaccaacagcccgcggcgcgcccgguccguggccagccaguccgucaucgcguacaccaugagccugggggccgagaacuccguggccuacagcaacaacuccaucgccauccccaccaacuucacgaucagcgugaccaccgagauccugcccgucuccaugaccaagacgagcguggacugcaccauguacaucugcggcgacagcaccgagugcuccaaccuccugcugcaguacgggagcuucugcacccagcucaaccgcgcccugacgggcaucgcgguggagcaggacaagaacacccaggaggucuucgcccaggugaagcagaucuacaagacgcccccgaucaaggacuucgggggcuucaacuucucccagauccugcccgaccccagcaagcccuccaagcggagcuucaucgaggaccuccuguucaacaaggugacccuggccgacgccggcuucaucaagcaguacggggacugccucggcgacaucgccgcgcgcgaccugaucugcgcccagaaguucaacgggcugaccguccucccgccccugcugaccgacgagaugaucgcccaguacaccuccgcccuccuggccggcaccaucacgagcggguggaccuucggcgcgggcgccgcccugcagauccccuucgccaugcagauggcguaccgguucaacgggaucggcgugacccagaacgugcucuacgagaaccagaagcugaucgccaaccaguucaacuccgccaucgggaagauccaggacagccuguccagcaccgccuccgcccucggcaagcugcaggacgucgugaaccagaacgcgcaggcccugaacacgcucgugaagcagcugagcuccaacuucggggccaucagcuccguccugaacgacauccucagccgccuggacaagguggaggccgaggugcagaucgaccggcugaucaccggccgccuccagucccugcagaccuacgucacccagcagcugauccgggccgcggagauccgcgccagcgccaaccucgccgccaccaagaugagcgagugcgugcugggccaguccaagcggguggacuucugcgggaagggcuaccaccugaugagcuucccccaguccgcgccgcacggggucguguuccuccacgucacguacgugcccgcccaggagaagaacuucaccaccgcccccgccaucugccacgacggcaaggcgcacuucccccgcgaggggguguucgucagcaacggcacccacugguucgugacgcagcggaacuucuacgagccgcagaucaucaccaccgacaacaccuucguguccggcaacugcgacgucgugaucgggaucgugaacaacacggucuacgacccccugcagcccgagcuggacagcuucaaggaggagcucgacaaguacuucaagaaccacaccucccccgacguggaccugggcgacaucagcgggaucaacgccuccguggucaacauccagaaggagaucgaccgccugaacgagguggccaagaaccucaacgagagccugaucgaccugcaggagcucggcaaguacgagcaguacaucaaguggccgugguacaucuggcugggcuucaucgccgggcugaucgccaucgugauggucaccaucaugcucugcugcaugaccuccugcugcagcugccugaagggcugcugcuccugcgggagcugcugcaaguucgacgaggacgacuccgagcccgugcugaagggcgugaagcuccacuacacgugaggacuaguuauaagacugacuagcccgaugggccucccaacgggcccuccuccccuccuugcaccgagauuaauaaaaaaaaaaaaaaaaaaaaaaaaaaaaaaaaaaaaaaaaaaaaaaaaaaaaaaaaaaaaaaaaaaaaaaaaaaaaaaaaaaaaaaaaaaaaaaaaaaaa

SEQ ID NO: 25418 - RNA, 4005 nt, Artificial Sequence
  SARS-CoV-2/Wuhan/WIV05/2019__EPI_ISL_402128 spike protein mRNA gc (1-1273)(H69del_V70del_Y453F_D614G_I692V_M1229I)
aggagaaagcuuaccauguucguguuccugguccuccugccccuggugagcucccagugcgugaaccucaccacccgcacgcagcugccgcccgccuacaccaacagcuucacccggggcgucuacuaccccgacaagguguuccgcuccagcgugcugcacuccacccaggaccucuuccugcccuucuucagcaacgucacgugguuccacgccaucuccgggaccaacggcaccaagcgguucgacaacccggugcugcccuucaacgacgggguguacuucgcgagcaccgagaaguccaacaucauccgcggcuggaucuucgggacgacccucgacagcaagacccagucccugcugaucgucaacaacgccaccaacguggugaucaaggucugcgaguuccaguucugcaacgaccccuuccucggcguguacuaccacaagaacaacaagagcuggauggaguccgaguuccggguguacagcuccgccaacaacugcacguucgaguacgucagccagcccuuccugauggaccuggagggcaagcaggggaacuucaagaaccuccgcgaguucguguucaagaacaucgacggcuacuucaagaucuacuccaagcacaccccgaucaaccuggugcgggaccugccccagggguucagcgcccucgagccccuggucgaccugcccaucggcaucaacaucacccgcuuccagacccuccuggcccugcaccgguccuaccucacgccgggggacagcagcuccggcuggaccgcgggcgccgccgccuacuacgugggguaccugcagccccgcaccuuccugcucaaguacaacgagaacggcaccaucacggacgcgguggacugcgcccuggacccccugagcgagaccaagugcacccucaaguccuucaccgucgagaaggggaucuaccagacgagcaacuuccgggugcagcccaccgaguccaucgugcgcuucccgaacaucaccaaccugugccccuucggcgaggucuucaacgccacccgguucgccagcguguacgccuggaaccgcaagcggaucuccaacugcgucgcggacuacagcgugcuguacaacuccgccagcuucuccacguucaagugcuacggcgugagccccaccaagcucaacgaccugugcuucaccaacgucuacgccgacuccuucgugauccgcggggacgaggugcggcagaucgcccccggccagaccgggaagaucgccgacuacaacuacaagcugccggacgacuucacgggcugcgucaucgcguggaacagcaacaaccucgacuccaaggucgggggcaacuacaacuaccuguuccgccuguuccgcaagagcaaccucaagcccuucgagcgggacaucuccaccgagaucuaccaggccggcagcacccccugcaacgggguggagggcuucaacugcuacuucccccugcaguccuacggguuccagccgaccaacggcgugggguaccagcccuaccggguggugguccugagcuucgagcuccugcacgcccccgccacggugugcggccccaagaaguccaccaaccuggugaagaacaagugcgucaacuucaacuucaacggccucaccgggaccggcgugcugaccgagagcaacaagaaguuccugccguuccagcaguucgggcgcgacaucgccgacacgaccgacgcggugcgcgacccccagacccuggagauccucgacaucacccccugcagcuucggcggggucuccgugaucacgccgggcaccaacaccagcaaccagguggccguccuguaccagggcgugaacugcaccgaggugcccgucgccauccacgccgaccagcugacgcccaccuggcggguguacuccaccgggagcaacguguuccagacccgcgccggcugccucaucggggcggagcacgucaacaacuccuacgagugcgacauccccaucggcgccggcaucugcgccagcuaccagacgcagaccaacuccccgcggcgcgcccggagcguggcgucccagagcgugaucgccuacaccaugucccugggggccgagaacagcgucgccuacuccaacaacagcaucgccauccccaccaacuucacgaucuccgugaccaccgagauccugcccgugagcaugaccaagacgagcgucgacugcaccauguacaucugcggcgacuccaccgagugcagcaaccuccugcugcaguacggguccuucugcacccagcucaaccgcgcgcugacgggcaucgccguggagcaggacaagaacacccaggagguguucgcccaggucaagcagaucuacaagacgcccccgaucaaggacuucgggggcuucaacuucagccagauccugcccgaccccuccaagcccagcaagcgguccuucaucgaggaccuccuguucaacaaggugacccuggccgacgccggcuucaucaagcaguacggggacugccucggcgacaucgcggcccgcgaccugaucugcgcccagaaguucaacgggcugaccgugcucccgccccugcugaccgacgagaugaucgcccaguacaccagcgcccuccuggcgggcaccaucacguccggguggaccuucggcgccggcgccgcccugcagauccccuucgcgaugcagauggccuaccgguucaacgggaucggcgucacccagaacgugcucuacgagaaccagaagcugaucgccaaccaguucaacagcgccaucgggaagauccaggacucccugagcuccaccgccagcgcgcucggcaagcugcaggacguggucaaccagaacgcccaggcccugaacacgcucgugaagcagcuguccagcaacuucggggccaucuccagcgugcugaacgacauccucucccgccuggacaaggucgaggccgaggugcagaucgaccggcugaucaccggccgccuccagagccugcagaccuacgugacccagcagcugauccgggcggccgagauccgcgccagcgccaaccucgccgcgaccaagauguccgagugcguccugggccagagcaagcggguggacuucugcgggaagggcuaccaccugauguccuucccccagagcgccccgcacgggguggucuuccuccacgugacguacguccccgcccaggagaagaacuucaccaccgcccccgcgaucugccacgacggcaaggcccacuucccccgcgaggggguguucguguccaacggcacccacugguucgucacgcagcggaacuucuacgagccgcagaucaucaccaccgacaacaccuucgugagcggcaacugcgacguggucaucgggaucgugaacaacacgguguacgacccccugcagcccgagcuggacuccuucaaggaggagcucgacaaguacuucaagaaccacaccagccccgacgucgaccugggcgacaucuccgggaucaacgccagcguggugaacauccagaaggagaucgaccgccugaacgaggucgccaagaaccucaacgagucccugaucgaccugcaggagcucggcaaguacgagcaguacaucaaguggccgugguacaucuggcugggcuucaucgccgggcugaucgcgaucgugaucgugaccaucaugcucugcugcaugaccagcugcugcuccugccugaagggcugcugcagcugcggguccugcugcaaguucgacgaggacgacagcgagcccguccugaagggcgugaagcuccacuacacgugaggacuaguuauaagacugacuagcccgaugggccucccaacgggcccuccuccccuccuugcaccgagauuaauaaaaaaaaaaaaaaaaaaaaaaaaaaaaaaaaaaaaaaaaaaaaaaaaaaaaaaaaaaaaaaaaaaaaaaaaaaaaaaaaaaaaaaaaaaaaaaaaaaaa

SEQ ID NO: 25419 - RNA, 4002 nt, Artificial Sequence
  SARS-CoV-2/Wuhan/WIV05/2019__EPI_ISL_402128 spike protein mRNA gc (1-1273)(H69del_V70del_Y144del_N501Y_A570D_D614G_P681H_T716I_S982 A_D1118H)
aggagaaagcuuaccauguucguguuccugguccuccugccccuggugagcucccagugcgugaaccucaccacccgcacgcagcugccgcccgccuacaccaacagcuucacccggggcgucuacuaccccgacaagguguuccgcuccagcgugcugcacuccacccaggaccucuuccugcccuucuucagcaacgucacgugguuccacgccaucuccgggaccaacggcaccaagcgguucgacaacccggugcugcccuucaacgacgggguguacuucgcgagcaccgagaaguccaacaucauccgcggcuggaucuucgggacgacccucgacagcaagacccagucccugcugaucgucaacaacgccaccaacguggugaucaaggucugcgaguuccaguucugcaacgaccccuuccucggcguguaccacaagaacaacaagagcuggauggaguccgaguuccggguguacagcuccgccaacaacugcacguucgaguacgucagccagcccuuccugauggaccuggagggcaagcaggggaacuucaagaaccuccgcgaguucguguucaagaacaucgacggcuacuucaagaucuacuccaagcacaccccgaucaaccuggugcgggaccugccccagggguucagcgcccucgagccccuggucgaccugcccaucggcaucaacaucacccgcuuccagacccuccuggcccugcaccgguccuaccucacgccgggggacagcagcuccggcuggaccgcgggcgccgccgccuacuacgugggguaccugcagccccgcaccuuccugcucaaguacaacgagaacggcaccaucacggacgcgguggacugcgcccuggacccccugagcgagaccaagugcacccucaaguccuucaccgucgagaaggggaucuaccagacgagcaacuuccgggugcagcccaccgaguccaucgugcgcuucccgaacaucaccaaccugugccccuucggcgaggucuucaacgccacccgguucgccagcguguacgccuggaaccgcaagcggaucuccaacugcgucgcggacuacagcgugcuguacaacuccgccagcuucuccacguucaagugcuacggcgugagccccaccaagcucaacgaccugugcuucaccaacgucuacgccgacuccuucgugauccgcggggacgaggugcggcagaucgcccccggccagaccgggaagaucgccgacuacaacuacaagcugccggacgacuucacgggcugcgucaucgcguggaacagcaacaaccucgacuccaaggucgggggcaacuacaacuaccuguaccgccuguuccgcaagagcaaccucaagcccuucgagcgggacaucuccaccgagaucuaccaggccggcagcacccccugcaacgggguggagggcuucaacugcuacuucccccugcaguccuacggguuccagccgaccuacggcgugggguaccagcccuaccggguggugguccugagcuucgagcuccugcacgcccccgccacggugugcggccccaagaaguccaccaaccuggugaagaacaagugcgucaacuucaacuucaacggccucaccgggaccggcgugcugaccgagagcaacaagaaguuccugccguuccagcaguucgggcgcgacaucgacgacacgaccgacgccgugcgcgacccccagacccuggagauccucgacaucacccccugcagcuucggcggggucuccgugaucacgccgggcaccaacaccagcaaccagguggcgguccuguaccagggcgugaacugcaccgaggugcccgucgccauccacgccgaccagcugacgcccaccuggcggguguacuccaccgggagcaacguguuccagacccgcgccggcugccucaucggggccgagcacgucaacaacuccuacgagugcgacauccccaucggcgcgggcaucugcgccagcuaccagacgcagaccaacucccaccggcgcgcccggagcguggccucccagagcaucaucgcguacaccaugucccugggggccgagaacagcguggccuacuccaacaacagcaucgccaucccgaucaacuucaccaucuccgucacgaccgagauccugcccgugagcaugaccaagaccagcguggacugcacgauguacaucugcggcgacuccaccgagugcagcaaccuccugcugcaguacggguccuucugcacccagcucaaccgcgcccugaccggcaucgcggucgagcaggacaagaacacgcaggagguguucgcccaggugaagcagaucuacaagaccccgcccaucaaggacuucgggggcuucaacuucagccagauccugcccgaccccuccaagcccagcaagcgguccuucaucgaggaccuccuguucaacaaggucacccuggccgacgccggcuucaucaagcaguacggggacugccucggcgacaucgccgcgcgcgaccugaucugcgcccagaaguucaacgggcugaccgugcugcccccgcuccugacggacgagaugaucgcccaguacaccagcgcccuccuggccggcaccaucaccuccggguggacguucggcgcgggcgccgcccugcagauccccuucgccaugcagauggcguaccgguucaacgggaucggcgugacccagaacguccucuacgagaaccagaagcugaucgccaaccaguucaacagcgccaucgggaagauccaggacucccugagcuccaccgccagcgcccucggcaagcugcaggacguggugaaccagaacgcgcaggcccugaacacccucgucaagcagcuguccagcaacuucggggccaucuccagcgugcugaacgacauccucgcccgccuggacaagguggaggccgagguccagaucgaccggcugaucacgggccgccuccagucccugcagaccuacgugacccagcagcugauccgggcggccgagauccgcgccagcgccaaccucgccgcgaccaagaugagcgagugcgugcugggccaguccaagcgggucgacuucugcgggaagggcuaccaccugaugagcuucccccaguccgcgccccacggggugguguuccuccacgucaccuacgugccggcccaggagaagaacuucacgaccgcccccgccaucugccacgacggcaaggcccacuucccccgcgagggggucuucgugagcaacggcacccacugguucgugacccagcggaacuucuacgagccccagaucaucacgacccacaacaccuucgucuccggcaacugcgacguggugaucgggaucgucaacaacaccguguacgacccgcugcagcccgagcuggacagcuucaaggaggagcucgacaaguacuucaagaaccacacgucccccgacguggaccugggcgacaucagcgggaucaacgccuccgucgugaacauccagaaggagaucgaccgccugaacgagguggccaagaaccucaacgagagccugaucgaccugcaggagcucggcaaguacgagcaguacaucaaguggcccugguacaucuggcugggcuucaucgccgggcugaucgcgaucgucauggugaccaucaugcucugcugcaugaccuccugcugcagcugccugaagggcugcugcuccugcgggagcugcugcaaguucgacgaggacgacuccgagccggugcugaagggcgucaagcuccacuacaccugaggacuaguuauaagacugacuagcccgaugggccucccaacgggcccuccuccccuccuugcaccgagauuaauaaaaaaaaaaaaaaaaaaaaaaaaaaaaaaaaaaaaaaaaaaaaaaaaaaaaaaaaaaaaaaaaaaaaaaaaaaaaaaaaaaaaaaaaaaaaaaaaaaaa

SEQ ID NO: 25420 - RNA, 4011 nt, Artificial Sequence
  SARS-CoV-2/Wuhan/WIV05/2019__EPI_ISL_402128 spike protein mRNA gc (1-1273)(K417N_E484K_N501Y_D614G)
aggagaaagcuuaccauguucguguuccugguccuccugccccuggugagcucccagugcgugaaccucaccacccgcacgcagcugccgcccgccuacaccaacagcuucacccggggcgucuacuaccccgacaagguguuccgcuccagcgugcugcacuccacccaggaccucuuccugcccuucuucagcaacgucacgugguuccacgccauccacguguccgggaccaacggcaccaagcgguucgacaacccggugcugcccuucaacgacggggucuacuucgcgagcaccgagaaguccaacaucauccgcggcuggaucuucgggacgacccucgacagcaagacccagucccugcugaucgugaacaacgccaccaacguggucaucaaggugugcgaguuccaguucugcaacgaccccuuccucggcguguacuaccacaagaacaacaagagcuggauggaguccgaguuccgggucuacagcuccgccaacaacugcacguucgaguacgugagccagcccuuccugauggaccuggagggcaagcaggggaacuucaagaaccuccgcgaguucguguucaagaacaucgacggcuacuucaagaucuacuccaagcacaccccgaucaaccugguccgggaccugccccagggguucagcgcccucgagccccugguggaccugcccaucggcaucaacaucacccgcuuccagacccuccuggcccugcaccgguccuaccucacgccgggggacagcagcuccggcuggaccgcgggcgccgccgccuacuacgugggguaccugcagccccgcaccuuccugcucaaguacaacgagaacggcaccaucacggacgcggucgacugcgcccuggacccccugagcgagaccaagugcacccucaaguccuucaccguggagaaggggaucuaccagacgagcaacuuccgggugcagcccaccgaguccaucguccgcuucccgaacaucaccaaccugugccccuucggcgagguguucaacgccacccgguucgccagcgucuacgccuggaaccgcaagcggaucuccaacugcguggcggacuacagcgugcuguacaacuccgccagcuucuccacguucaagugcuacggcgucagccccaccaagcucaacgaccugugcuucaccaacguguacgccgacuccuucgugauccgcggggacgagguccggcagaucgcccccggccagaccgggaacaucgccgacuacaacuacaagcugccggacgacuucacgggcugcgugaucgcguggaacagcaacaaccucgacuccaaggucgggggcaacuacaacuaccuguaccgccuguuccgcaagagcaaccucaagcccuucgagcgggacaucuccaccgagaucuaccaggccggcagcacccccugcaacggggugaagggcuucaacugcuacuucccccugcaguccuacggguuccagccgaccuacggcgugggguaccagcccuaccggguggucgugcugagcuucgagcuccugcacgcccccgccacggugugcggccccaagaaguccaccaaccuggucaagaacaagugcgugaacuucaacuucaacggccucaccgggaccggcgugcugaccgagagcaacaagaaguuccugccguuccagcaguucgggcgcgacaucgccgacacgaccgacgcgguccgcgacccccagacccuggagauccucgacaucacccccugcagcuucggcgggguguccgugaucacgccgggcaccaacaccagcaaccaggucgccgugcuguaccagggcgugaacugcaccgagguccccguggccauccacgccgaccagcugacgcccaccuggcggguguacuccaccgggagcaacgucuuccagacccgcgccggcugccucaucggggcggagcacgugaacaacuccuacgagugcgacauccccaucggcgccggcaucugcgccagcuaccagacgcagaccaacuccccgcggcgcgcccggagcguggcgucccagagcaucaucgccuacaccaugucccugggggccgagaacagcgucgccuacuccaacaacagcaucgccauccccaccaacuucacgaucuccgugaccaccgagauccugcccgugagcaugaccaagacgagcgucgacugcaccauguacaucugcggcgacuccaccgagugcagcaaccuccugcugcaguacggguccuucugcacccagcucaaccgcgcgcugacgggcaucgccguggagcaggacaagaacacccaggagguguucgcccaggucaagcagaucuacaagacgcccccgaucaaggacuucgggggcuucaacuucagccagauccugcccgaccccuccaagcccagcaagcgguccuucaucgaggaccuccuguucaacaaggugacccuggccgacgccggcuucaucaagcaguacggggacugccucggcgacaucgcggcccgcgaccugaucugcgcccagaaguucaacgggcugaccgugcucccgccccugcugaccgacgagaugaucgcccaguacaccagcgcccuccuggcgggcaccaucacguccggguggaccuucggcgccggcgccgcccugcagauccccuucgcgaugcagauggccuaccgguucaacgggaucggcgucacccagaacgugcucuacgagaaccagaagcugaucgccaaccaguucaacagcgccaucgggaagauccaggacucccugagcuccaccgccagcgcgcucggcaagcugcaggacguggucaaccagaacgcccaggcccugaacacgcucgugaagcagcuguccagcaacuucggggccaucuccagcgugcugaacgacauccucucccgccuggacaaggucgaggccgaggugcagaucgaccggcugaucaccggccgccuccagagccugcagaccuacgugacccagcagcugauccgggcggccgagauccgcgccagcgccaaccucgccgcgaccaagauguccgagugcguccugggccagagcaagcggguggacuucugcgggaagggcuaccaccugauguccuucccccagagcgccccgcacgggguggucuuccuccacgugacguacguccccgcccaggagaagaacuucaccaccgcccccgcgaucugccacgacggcaaggcccacuucccccgcgaggggguguucguguccaacggcacccacugguucgucacgcagcggaacuucuacgagccgcagaucaucaccaccgacaacaccuucgugagcggcaacugcgacguggucaucgggaucgugaacaacacgguguacgacccccugcagcccgagcuggacuccuucaaggaggagcucgacaaguacuucaagaaccacaccagccccgacgucgaccugggcgacaucuccgggaucaacgccagcguggugaacauccagaaggagaucgaccgccugaacgaggucgccaagaaccucaacgagucccugaucgaccugcaggagcucggcaaguacgagcaguacaucaaguggccgugguacaucuggcugggcuucaucgccgggcugaucgcgaucgugauggugaccaucaugcucugcugcaugaccagcugcugcuccugccugaagggcugcugcagcugcggguccugcugcaaguucgacgaggacgacagcgagcccguccugaagggcgugaagcuccacuacacgugaggacuaguuauaagacugacuagcccgaugggccucccaacgggcccuccuccccuccuugcaccgagauuaauaaaaaaaaaaaaaaaaaaaaaaaaaaaaaaaaaaaaaaaaaaaaaaaaaaaaaaaaaaaaaaaaaaaaaaaaaaaaaaaaaaaaaaaaaaaaaaaaaaaa

SEQ ID NO: 25421 - RNA, 4002 nt, Artificial Sequence
  SARS-CoV-2/Wuhan/WIV05/2019__EPI_ISL_402128 spike protein mRNA gc (1-1273)(L18F_D80A_D215G_L242del_A243del_L244del_R246I_K417N_E484 K_N501Y_D614G_A701V)
aggagaaagcuuaccauguucguguuccugguccuccugccccuggugagcucccagugcgugaacuucaccacccgcacgcagcucccgcccgccuacaccaacagcuucacccggggcgucuacuaccccgacaagguguuccgcuccagcgugcugcacuccacccaggaccuguuccuccccuucuucagcaacgucacgugguuccacgccauccacguguccgggaccaacggcaccaagcgguucgcgaacccggugcugcccuucaacgacggggucuacuucgccagcaccgagaaguccaacaucauccgcggcuggaucuucgggacgacccuggacagcaagacccagucccuccugaucgugaacaacgccaccaacguggucaucaaggugugcgaguuccaguucugcaacgaccccuuccugggcguguacuaccacaagaacaacaagagcuggauggaguccgaguuccgggucuacagcuccgccaacaacugcacguucgaguacgugagccagcccuuccucauggaccuggagggcaagcaggggaacuucaagaaccugcgcgaguucguguucaagaacaucgacggcuacuucaagaucuacuccaagcacaccccgaucaaccucguccgggggcugccccagggcuucagcgcccuggagccccucguggaccugcccaucgggaucaacaucacccgcuuccagacccugcacaucuccuaccucacgccgggcgacagcagcuccggcuggaccgcgggggccgccgccuacuacgugggcuaccugcagccccggaccuuccugcucaaguacaacgagaacgggaccaucacggacgcggucgacugcgcccuggacccccugagcgagaccaagugcacccucaaguccuucaccguggagaagggcaucuaccagacgagcaacuuccgcgugcagcccaccgaguccaucguccgguucccgaacaucaccaaccugugccccuucggcgagguguucaacgccacccgcuucgccagcgucuacgccuggaaccggaagcgcaucuccaacugcguggcggacuacagcgugcuguacaacuccgccagcuucuccacguucaagugcuacggggucagccccaccaagcucaacgaccugugcuucaccaacguguacgccgacuccuucgugauccggggcgacgagguccgccagaucgcccccgggcagaccggcaacaucgccgacuacaacuacaagcugccggacgacuucacggggugcgugaucgcguggaacagcaacaaccucgacuccaaggugggcggcaacuacaacuaccuguaccggcuguuccgcaagagcaaccucaagcccuucgagcgggacaucuccaccgagaucuaccaggccgggagcacccccugcaacggcgucaagggguucaacugcuacuucccccugcaguccuacggcuuccagccgaccuacggggugggcuaccagcccuaccgcguggucgugcugagcuucgagcuccugcacgcccccgccacggugugcggccccaagaaguccaccaaccuggucaagaacaagugcgugaacuucaacuucaacgggcucaccggcaccggggugcugaccgagagcaacaagaaguuccugccguuccagcaguucggccgggacaucgccgacacgaccgacgcgguccgcgacccccagacccucgagauccuggacaucacccccugcagcuucgggggcguguccgugaucacgccgggcaccaacaccagcaaccaggucgccgugcuguaccagggggugaacugcaccgagguccccguggccauccacgccgaccagcugacgcccaccuggcgcguguacuccaccggcagcaacgucuuccagacccgggccgggugccucaucggcgcggagcacgugaacaacuccuacgagugcgacauccccaucggcgccgggaucugcgccagcuaccagacgcagaccaacuccccgcgccgggcccgcagcguggcgucccagagcaucaucgccuacaccaugucccugggcgucgagaacagcguggccuacuccaacaacagcaucgccauccccaccaacuucacgaucuccgugaccaccgagauccugcccgucagcaugaccaagacgagcguggacugcaccauguacaucugcggggacuccaccgagugcagcaaccuccugcugcaguacggcuccuucugcacccagcucaaccgggcccugacggggaucgcgguggagcaggacaagaacacccaggaggucuucgcccaggugaagcagaucuacaagacgcccccgaucaaggacuucggcggcuucaacuucagccagauccugcccgaccccuccaagcccagcaagcgcuccuucaucgaggaccuccuguucaacaaggugacccuggccgacgccggguucaucaagcaguacggcgacugccucggggacaucgccgcgcgggaccugaucugcgcccagaaguucaacggccugaccguccucccgccccugcugaccgacgagaugaucgcccaguacaccagcgcccuccuggccgggaccaucacguccggcuggaccuucggcgcgggggccgcccugcagauccccuucgccaugcagauggcguaccgcuucaacggcaucggggugacccagaacgugcucuacgagaaccagaagcugaucgccaaccaguucaacagcgccaucggcaagauccaggacucccugagcuccaccgccagcgcccucgggaagcugcaggacgucgugaaccagaacgcgcaggcccugaacacgcucgugaagcagcuguccagcaacuucggcgccaucuccagcguccugaacgacauccucucccggcuggacaagguggaggccgaggugcagaucgaccgccugaucaccggccggcuccagagccugcagaccuacgucacccagcagcugauccgcgccgcggagauccgggccagcgccaaccucgccgccaccaagauguccgagugcgugcuggggcagagcaagcgcguggacuucugcggcaagggguaccaccugauguccuucccccagagcgcgccgcacggcgucguguuccuccacgucacguacgugcccgcccaggagaagaacuucaccaccgcccccgccaucugccacgacgggaaggcgcacuucccccgggagggcguguucgucuccaacggcacccacugguucgugacgcagcgcaacuucuacgagccgcagaucaucaccaccgacaacaccuucgugagcgggaacugcgacgucgugaucggcaucgugaacaacacggucuacgacccccugcagcccgagcuggacuccuucaaggaggagcucgacaaguacuucaagaaccacaccagccccgacguggaccugggggacaucuccggcaucaacgccagcguggucaacauccagaaggagaucgaccggcugaacgagguggccaagaaccucaacgagucccugaucgaccugcaggagcucggcaaguacgagcaguacaucaaguggccgugguacaucuggcugggguucaucgccggccugaucgccaucgugauggucaccaucaugcucugcugcaugaccagcugcugcuccugccugaaggggugcugcagcugcggcuccugcugcaaguucgacgaggacgacagcgagcccgugcugaagggggugaagcuccacuacacgugaggacuaguuauaagacugacuagcccgaugggccucccaacgggcccuccuccccuccuugcaccgagauuaauaaaaaaaaaaaaaaaaaaaaaaaaaaaaaaaaaaaaaaaaaaaaaaaaaaaaaaaaaaaaaaaaaaaaaaaaaaaaaaaaaaaaaaaaaaaaaaaaaaaa

SEQ ID NO: 25422 - RNA, 4011 nt, Artificial Sequence
  SARS-CoV-2/Wuhan/WIV05/2019__EPI_ISL_402128 spike protein mRNA gc (1-1273)(E484K_D614G)
aggagaaagcuuaccauguucguguuccugguccuccugccccuggugagcucccagugcgugaaccucaccacccgcacgcagcugccgcccgccuacaccaacagcuucacccggggcgucuacuaccccgacaagguguuccgcuccagcgugcugcacuccacccaggaccucuuccugcccuucuucagcaacgucacgugguuccacgccauccacguguccgggaccaacggcaccaagcgguucgacaacccggugcugcccuucaacgacggggucuacuucgcgagcaccgagaaguccaacaucauccgcggcuggaucuucgggacgacccucgacagcaagacccagucccugcugaucgugaacaacgccaccaacguggucaucaaggugugcgaguuccaguucugcaacgaccccuuccucggcguguacuaccacaagaacaacaagagcuggauggaguccgaguuccgggucuacagcuccgccaacaacugcacguucgaguacgugagccagcccuuccugauggaccuggagggcaagcaggggaacuucaagaaccuccgcgaguucguguucaagaacaucgacggcuacuucaagaucuacuccaagcacaccccgaucaaccugguccgggaccugccccagggguucagcgcccucgagccccugguggaccugcccaucggcaucaacaucacccgcuuccagacccuccuggcccugcaccgguccuaccucacgccgggggacagcagcuccggcuggaccgcgggcgccgccgccuacuacgugggguaccugcagccccgcaccuuccugcucaaguacaacgagaacggcaccaucacggacgcggucgacugcgcccuggacccccugagcgagaccaagugcacccucaaguccuucaccguggagaaggggaucuaccagacgagcaacuuccgggugcagcccaccgaguccaucguccgcuucccgaacaucaccaaccugugccccuucggcgagguguucaacgccacccgguucgccagcgucuacgccuggaaccgcaagcggaucuccaacugcguggcggacuacagcgugcuguacaacuccgccagcuucuccacguucaagugcuacggcgucagccccaccaagcucaacgaccugugcuucaccaacguguacgccgacuccuucgugauccgcggggacgagguccggcagaucgcccccggccagaccgggaagaucgccgacuacaacuacaagcugccggacgacuucacgggcugcgugaucgcguggaacagcaacaaccucgacuccaaggucgggggcaacuacaacuaccuguaccgccuguuccgcaagagcaaccucaagcccuucgagcgggacaucuccaccgagaucuaccaggccggcagcacccccugcaacggggugaagggcuucaacugcuacuucccccugcaguccuacggguuccagccgaccaacggcgugggguaccagcccuaccggguggucgugcugagcuucgagcuccugcacgcccccgccacggugugcggccccaagaaguccaccaaccuggucaagaacaagugcgugaacuucaacuucaacggccucaccgggaccggcgugcugaccgagagcaacaagaaguuccugccguuccagcaguucgggcgcgacaucgccgacacgaccgacgcgguccgcgacccccagacccuggagauccucgacaucacccccugcagcuucggcgggguguccgugaucacgccgggcaccaacaccagcaaccaggucgccgugcuguaccagggcgugaacugcaccgagguccccguggccauccacgccgaccagcugacgcccaccuggcggguguacuccaccgggagcaacgucuuccagacccgcgccggcugccucaucggggcggagcacgugaacaacuccuacgagugcgacauccccaucggcgccggcaucugcgccagcuaccagacgcagaccaacuccccgcggcgcgcccggagcguggcgucccagagcaucaucgccuacaccaugucccugggggccgagaacagcgucgccuacuccaacaacagcaucgccauccccaccaacuucacgaucuccgugaccaccgagauccugcccgugagcaugaccaagacgagcgucgacugcaccauguacaucugcggcgacuccaccgagugcagcaaccuccugcugcaguacggguccuucugcacccagcucaaccgcgcgcugacgggcaucgccguggagcaggacaagaacacccaggagguguucgcccaggucaagcagaucuacaagacgcccccgaucaaggacuucgggggcuucaacuucagccagauccugcccgaccccuccaagcccagcaagcgguccuucaucgaggaccuccuguucaacaaggugacccuggccgacgccggcuucaucaagcaguacggggacugccucggcgacaucgcggcccgcgaccugaucugcgcccagaaguucaacgggcugaccgugcucccgccccugcugaccgacgagaugaucgcccaguacaccagcgcccuccuggcgggcaccaucacguccggguggaccuucggcgccggcgccgcccugcagauccccuucgcgaugcagauggccuaccgguucaacgggaucggcgucacccagaacgugcucuacgagaaccagaagcugaucgccaaccaguucaacagcgccaucgggaagauccaggacucccugagcuccaccgccagcgcgcucggcaagcugcaggacguggucaaccagaacgcccaggcccugaacacgcucgugaagcagcuguccagcaacuucggggccaucuccagcgugcugaacgacauccucucccgccuggacaaggucgaggccgaggugcagaucgaccggcugaucaccggccgccuccagagccugcagaccuacgugacccagcagcugauccgggcggccgagauccgcgccagcgccaaccucgccgcgaccaagauguccgagugcguccugggccagagcaagcggguggacuucugcgggaagggcuaccaccugauguccuucccccagagcgccccgcacgggguggucuuccuccacgugacguacguccccgcccaggagaagaacuucaccaccgcccccgcgaucugccacgacggcaaggcccacuucccccgcgaggggguguucguguccaacggcacccacugguucgucacgcagcggaacuucuacgagccgcagaucaucaccaccgacaacaccuucgugagcggcaacugcgacguggucaucgggaucgugaacaacacgguguacgacccccugcagcccgagcuggacuccuucaaggaggagcucgacaaguacuucaagaaccacaccagccccgacgucgaccugggcgacaucuccgggaucaacgccagcguggugaacauccagaaggagaucgaccgccugaacgaggucgccaagaaccucaacgagucccugaucgaccugcaggagcucggcaaguacgagcaguacaucaaguggccgugguacaucuggcugggcuucaucgccgggcugaucgcgaucgugauggugaccaucaugcucugcugcaugaccagcugcugcuccugccugaagggcugcugcagcugcggguccugcugcaaguucgacgaggacgacagcgagcccguccugaagggcgugaagcuccacuacacgugaggacuaguuauaagacugacuagcccgaugggccucccaacgggcccuccuccccuccuugcaccgagauuaauaaaaaaaaaaaaaaaaaaaaaaaaaaaaaaaaaaaaaaaaaaaaaaaaaaaaaaaaaaaaaaaaaaaaaaaaaaaaaaaaaaaaaaaaaaaaaaaaaaaa

SEQ ID NO: 25423 - RNA, 4011 nt, Artificial Sequence
  SARS-CoV-2/Wuhan/WIV05/2019__EPI_ISL_402128 spike protein mRNA gc (1-1273)(L18F_T20N_P26S_D138Y_R190S_K417T_E484K_N501Y_D614G_H655Y _T1027I)
aggagaaagcuuaccauguucguguuccugguccuccugccccuggugagcucccagugcgugaacuucaccaaccgcacccagcucccgagcgccuacacgaacuccuucacccggggcgucuacuaccccgacaagguguuccgcagcuccgugcugcacagcacccaggaccuguuccuccccuucuucuccaacgucaccugguuccacgccauccacgugagcgggacgaacggcaccaagcgguucgacaaccccgugcugccguucaacgacggggucuacuucgcguccaccgagaaguccaacaucauccgcggcuggaucuucgggaccacgcuggacuccaagacccagagccuccugaucgugaacaacgccaccaacguggucaucaaggugugcgaguuccaguucugcaacuaccccuuccugggcguguacuaccacaagaacaacaaguccuggauggagagcgaguuccgggucuacuccagcgccaacaacugcaccuucgaguacgugucccagcccuuccucauggaccuggagggcaagcaggggaacuucaagaaccugagcgaguucguguucaagaacaucgacggcuacuucaagaucuacuccaagcacacgcccaucaaccucguccgcgaccugccgcagggguucagcgcccuggagccccucguggaccugcccaucggcaucaacaucacccgguuccagacccugcucgcccugcaccgcagcuaccugacccccggggacuccagcuccggcuggacggcgggcgccgccgccuacuacgugggguaccuccagccgcggaccuuccugcugaaguacaacgagaacggcaccaucaccgacgcggucgacugcgcccucgacccccugagcgagacgaagugcacccugaaguccuucaccguggagaaggggaucuaccagaccagcaacuuccgcgugcagcccacggaguccaucguccgguuccccaacaucaccaaccucugcccguucggcgagguguucaacgccacccgcuucgccagcgucuacgccuggaaccggaagcgcaucuccaacugcguggcggacuacagcgugcuguacaacuccgccagcuucuccaccuucaagugcuacggcgucagccccacgaagcugaacgaccucugcuucaccaacguguacgccgacuccuucgugauccgcggggacgagguccggcagaucgcccccggccagaccgggaccaucgccgacuacaacuacaagcugcccgacgacuucacgggcugcgugaucgcguggaacagcaacaaccuggacuccaaggucgggggcaacuacaacuaccucuaccggcuguuccgcaagagcaaccugaagccguucgagcgggacaucuccaccgagaucuaccaggccggcagcacccccugcaacggggugaagggcuucaacugcuacuucccccuccagagcuacggguuccagcccaccuacggcgugggguaccagccguaccgcguggucgugcuguccuucgagcugcuccacgcccccgccacggugugcggccccaagaaguccaccaaccuggucaagaacaagugcgugaacuucaacuucaacggccugaccgggaccggcgugcucaccgagagcaacaagaaguuccugcccuuccagcaguucgggcgggacaucgccgacacgaccgacgcgguccgcgacccgcagacccuggagauccuggacaucacccccugcagcuucggcgggguguccgugaucacgcccggcaccaacaccagcaaccaggucgccgugcucuaccagggcgugaacugcaccgaggucccgguggccauccacgccgaccagcugacgcccaccuggcgcguguacuccaccgggagcaacgucuuccagacccgggccggcugccugaucggggcggaguacgugaacaacuccuacgagugcgacauccccaucggcgccggcaucugcgccagcuaccagacgcagaccaacagcccccgccgggcccgcagcguggcgucccagagcaucaucgccuacaccaugucccucggggccgagaacagcgucgccuacuccaacaacagcaucgccaucccgaccaacuucacgaucagcgugaccaccgagauccugcccguguccaugaccaagacgagcgucgacugcaccauguacaucugcggcgacuccaccgagugcagcaaccugcuccugcaguacggguccuucugcacccagcugaaccgggcgcucacgggcaucgccguggagcaggacaagaacacccaggagguguucgcccaggucaagcagaucuacaagaccccgcccaucaaggacuucgggggcuucaacuucagccagauccugcccgaccccuccaagcccagcaagcgcuccuucaucgaggaccuccuguucaacaaggugacccuggccgacgccggcuucaucaagcaguacggggacugccugggcgacaucgcggcccgggaccucaucugcgcccagaaguucaacgggcugacggugcugcccccgcuccugaccgacgagaugaucgcccaguacaccagcgcccugcucgcgggcaccaucacguccggguggaccuucggcgccggcgccgcccugcagauccccuucgcgaugcagauggccuaccgcuucaacgggaucggcgucacccagaacgugcuguacgagaaccagaagcucaucgccaaccaguucaacagcgccaucgggaagauccaggacucccugagcuccaccgccagcgcgcugggcaagcuccaggacguggucaaccagaacgcccaggcccugaacacgcuggugaagcagcucuccagcaacuucggggccaucuccagcgugcugaacgacauccugagccggcucgacaaggucgaggccgaggugcagaucgaccgccugaucaccggccggcugcagucccuccagaccuacgugacccagcagcugauccgcgcggccgagauccgggccagcgccaaccuggccgcgaucaagauguccgagugcguccucggccagagcaagcgcguggacuucugcgggaagggcuaccaccugauguccuucccccagagcgcgccccacgggguggucuuccugcacgugaccuacgucccggcccaggagaagaacuucacgaccgcccccgccaucugccacgacggcaaggcccacuucccccgggaggggguguucguguccaacggcacccacugguucgucacccagcgcaacuucuacgagccccagaucaucacgaccgacaacaccuucgugagcggcaacugcgacguggucaucgggaucgugaacaacaccguguacgacccgcuccagcccgagcuggacuccuucaaggaggagcuggacaaguacuucaagaaccacacgagccccgacgucgaccucggcgacaucuccgggaucaacgccagcguggugaacauccagaaggagaucgaccggcugaacgaggucgccaagaaccugaacgagucccucaucgaccugcaggagcugggcaaguacgagcaguacaucaaguggcccugguacaucuggcucggcuucaucgccgggcugaucgcgaucgugauggugaccaucaugcugugcugcaugaccagcugcugcuccugccucaagggcugcugcagcugcggguccugcugcaaguucgacgaggacgacagcgagccgguccugaagggcgugaagcugcacuacaccugaggacuaguuauaagacugacuagcccgaugggccucccaacgggcccuccuccccuccuugcaccgagauuaauaaaaaaaaaaaaaaaaaaaaaaaaaaaaaaaaaaaaaaaaaaaaaaaaaaaaaaaaaaaaaaaaaaaaaaaaaaaaaaaaaaaaaaaaaaaaaaaaaaaa

SEQ ID NO: 25424 - RNA, 4011 nt, Artificial Sequence
  SARS-CoV-2/Wuhan/WIV05/2019__EPI_ISL_402128 spike protein mRNA gc (1-1273)(S13I_W152C_L452R_D614G)
aggagaaagcuuaccauguucguguuccugguccuccugccccuggugagcauccagugcgugaaccucaccacccgcacgcagcugccgcccgccuacaccaacuccuucacccggggcgucuacuaccccgacaagguguuccgcagcuccgugcugcacagcacccaggaccucuuccugcccuucuucuccaacgucacgugguuccacgccauccacgugagcgggaccaacggcaccaagcgguucgacaacccggugcugcccuucaacgacggggucuacuucgcguccaccgagaaguccaacaucauccgcggcuggaucuucgggacgacccucgacagcaagacccagagccugcugaucgugaacaacgccaccaacguggucaucaaggugugcgaguuccaguucugcaacgaccccuuccucggcguguacuaccacaagaacaacaaguccugcauggagagcgaguuccgggucuacuccagcgccaacaacugcacguucgaguacgugucccagcccuuccugauggaccuggagggcaagcaggggaacuucaagaaccuccgcgaguucguguucaagaacaucgacggcuacuucaagaucuacagcaagcacaccccgaucaaccugguccgggaccugccccagggguucuccgcccucgagccccugguggaccugcccaucggcaucaacaucacccgcuuccagacccuccuggcccugcaccggagcuaccucacgccgggggacuccagcagcggcuggaccgcgggcgccgccgccuacuacgugggguaccugcagccccgcaccuuccugcucaaguacaacgagaacggcaccaucacggacgcggucgacugcgcccuggacccccuguccgagaccaagugcacccucaagagcuucaccguggagaaggggaucuaccagacguccaacuuccgggugcagcccaccgagagcaucguccgcuucccgaacaucaccaaccugugccccuucggcgagguguucaacgccacccgguucgccuccgucuacgccuggaaccgcaagcggaucagcaacugcguggcggacuacuccgugcuguacaacagcgccuccuucagcacguucaagugcuacggcgucucccccaccaagcucaacgaccugugcuucaccaacguguacgccgacagcuucgugauccgcggggacgagguccggcagaucgcccccggccagaccgggaagaucgccgacuacaacuacaagcugccggacgacuucacgggcugcgugaucgcguggaacuccaacaaccucgacagcaaggucgggggcaacuacaacuaccgcuaccggcuguuccgcaaguccaaccugaagcccuucgagcgggacaucagcaccgagaucuaccaggccggcuccacccccugcaacgggguggagggcuucaacugcuacuucccccuccagagcuacggguuccagccgaccaacggcgugggguaccagcccuaccgcguggucgugcuguccuucgagcugcuccacgcccccgccacggugugcggccccaagaaguccaccaaccuggucaagaacaagugcgugaacuucaacuucaacggccugaccgggaccggcgugcucaccgagagcaacaagaaguuccugccguuccagcaguucgggcgcgacaucgccgacacgaccgacgcgguccgggacccccagacccuggagauccuggacaucacccccugcagcuucggcggggugagcgugaucacgccgggcaccaacaccuccaaccaggucgccgugcucuaccagggcgugaacugcaccgagguccccguggccauccacgccgaccagcugacgcccaccuggcgcguguacagcaccggguccaacgucuuccagacccgggccggcugccugaucggggcggagcacgugaacaacagcuacgagugcgacauccccaucggcgccggcaucugcgccuccuaccagacgcagaccaacagcccgcgccgggcccgcuccguggcgagccaguccaucaucgccuacaccaugagccucggggccgagaacuccgucgccuacagcaacaacuccaucgccauccccaccaacuucacgaucagcgugaccaccgagauccugcccguguccaugaccaagacgagcgucgacugcaccauguacaucugcggcgacagcaccgagugcuccaaccugcuccugcaguacgggagcuucugcacccagcugaaccgggcgcucacgggcaucgccguggagcaggacaagaacacccaggagguguucgcccaggucaagcagaucuacaagacgcccccgaucaaggacuucgggggcuucaacuucucccagauccugcccgaccccagcaagcccuccaagcgcagcuucaucgaggaccuccuguucaacaaggugacccuggccgacgccggcuucaucaagcaguacggggacugccugggcgacaucgcggcccgggaccucaucugcgcccagaaguucaacgggcugaccgugcugccgccccuccugaccgacgagaugaucgcccaguacaccuccgcccugcucgcgggcaccaucacgagcggguggaccuucggcgccggcgccgcccugcagauccccuucgcgaugcagauggccuaccgcuucaacgggaucggcgucacccagaacgugcuguacgagaaccagaagcucaucgccaaccaguucaacuccgccaucgggaagauccaggacagccuguccagcaccgccuccgcgcugggcaagcuccaggacguggucaaccagaacgcccaggcccugaacacgcuggugaagcagcucagcuccaacuucggggccaucagcuccgugcugaacgacauccugagccggcucgacaaggucgaggccgaggugcagaucgaccgccugaucaccggccggcugcagucccuccagaccuacgugacccagcagcugauccgcgcggccgagauccgggccagcgccaaccuggccgcgaccaagaugagcgagugcguccucggccaguccaagcgcguggacuucugcgggaagggcuaccaccugaugagcuucccccaguccgccccgcacgggguggucuuccugcacgugacguacguccccgcccaggagaagaacuucaccaccgcccccgcgaucugccacgacggcaaggcccacuucccccgggaggggguguucgugagcaacggcacccacugguucgucacgcagcgcaacuucuacgagccgcagaucaucaccaccgacaacaccuucguguccggcaacugcgacguggucaucgggaucgugaacaacacgguguacgacccccuccagcccgagcuggacagcuucaaggaggagcuggacaaguacuucaagaaccacaccucccccgacgucgaccucggcgacaucagcgggaucaacgccuccguggugaacauccagaaggagaucgaccggcugaacgaggucgccaagaaccugaacgagagccucaucgaccugcaggagcugggcaaguacgagcaguacaucaaguggccgugguacaucuggcucggcuucaucgccgggcugaucgcgaucgugauggugaccaucaugcugugcugcaugaccuccugcugcagcugccucaagggcugcugcuccugcgggagcugcugcaaguucgacgaggacgacuccgagcccguccugaagggcgugaagcugcacuacacgugaggacuaguuauaagacugacuagcccgaugggccucccaacgggcccuccuccccuccuugcaccgagauuaauaaaaaaaaaaaaaaaaaaaaaaaaaaaaaaaaaaaaaaaaaaaaaaaaaaaaaaaaaaaaaaaaaaaaaaaaaaaaaaaaaaaaaaaaaaaaaaaaaaaa

SEQ ID NO: 25425 - RNA, 4011 nt, Artificial Sequence
  SARS-CoV-2/Wuhan/WIV05/2019__EPI_ISL_402128 spike protein mRNA gc (1-1273)
aggagaaagcuuaccauguucguguuccuggugcugcugccccuggugagcagccagugcgugaaccugaccacccggacccagcugccaccagccuacaccaacagcuucacccggggcgucuacuaccccgacaagguguuccggagcagcguccugcacagcacccaggaccuguuccugcccuucuucagcaacgugaccugguuccacgccauccacgugagcggcaccaacggcaccaagcgguucgacaaccccgugcugcccuucaacgacggcguguacuucgccagcaccgagaagagcaacaucauccggggcuggaucuucggcaccacccuggacagcaagacccagagccugcugaucgugaauaacgccaccaacguggugaucaaggugugcgaguuccaguucugcaacgaccccuuccugggcguguacuaccacaagaacaacaagagcuggauggagagcgaguuccggguguacagcagcgccaacaacugcaccuucgaguacgugagccagcccuuccugauggaccuggagggcaagcagggcaacuucaagaaccugcgggaguucguguucaagaacaucgacggcuacuucaagaucuacagcaagcacaccccaaucaaccuggugcgggaucugccccagggcuucucagcccuggagccccugguggaccugcccaucggcaucaacaucacccgguuccagacccugcuggcccugcaccggagcuaccugaccccaggcgacagcagcagcggguggacagcaggcgcggcugcuuacuacgugggcuaccugcagccccggaccuuccugcugaaguacaacgagaacggcaccaucaccgacgccguggacugcgcccuggacccucugagcgagaccaagugcacccugaagagcuucaccguggagaagggcaucuaccagaccagcaacuuccgggugcagcccaccgagagcaucgugcgguuccccaacaucaccaaccugugccccuucggcgagguguucaacgccacccgguucgccagcguguacgccuggaaccggaagcggaucagcaacugcguggccgacuacagcgugcuguacaacagcgccagcuucagcaccuucaagugcuacggcgugagccccaccaagcugaacgaccugugcuucaccaacguguacgccgacagcuucgugauccguggcgacgaggugcggcagaucgcacccggccagacaggcaagaucgccgacuacaacuacaagcugcccgacgacuucaccggcugcgugaucgccuggaacagcaacaaccucgacagcaaggugggcggcaacuacaacuaccuguaccggcuguuccggaagagcaaccugaagcccuucgagcgggacaucagcaccgagaucuaccaagccggcuccaccccuugcaacggcguggagggcuucaacugcuacuucccucugcagagcuacggcuuccagcccaccaacggcgugggcuaccagcccuaccgggugguggugcugagcuucgagcugcugcacgccccagccaccguguguggccccaagaagagcaccaaccuggugaagaacaagugcgugaacuucaacuucaacggccuuaccggcaccggcgugcugaccgagagcaacaagaaauuccugcccuuucagcaguucggccgggacaucgccgacaccaccgacgcugugcgggauccccagacccuggagauccuggacaucaccccuugcagcuucggcggcgugagcgugaucaccccaggcaccaacaccagcaaccagguggccgugcuguaccaggacgugaacugcaccgaggugcccguggccauccacgccgaccagcugacacccaccuggcgggucuacagcaccggcagcaacguguuccagacccgggccgguugccugaucggcgccgagcacgugaacaacagcuacgagugcgacauccccaucggcgccggcaucugugccagcuaccagacccagaccaauucaccccggagggcaaggagcguggccagccagagcaucaucgccuacaccaugagccugggcgccgagaacagcguggccuacagcaacaacagcaucgccauccccaccaacuucaccaucagcgugaccaccgagauucugcccgugagcaugaccaagaccagcguggacugcaccauguacaucugcggcgacagcaccgagugcagcaaccugcugcugcaguacggcagcuucugcacccagcugaaccgggcccugaccggcaucgccguggagcaggacaagaacacccaggagguguucgcccaggugaagcagaucuacaagaccccucccaucaaggacuucggcggcuucaacuucagccagauccugcccgaccccagcaagcccagcaagcggagcuucaucgaggaccugcuguucaacaaggugacccuagccgacgccggcuucaucaagcaguacggcgacugccucggcgacauagccgcccgggaccugaucugcgcccagaaguucaacggccugaccgugcugccuccccugcugaccgacgagaugaucgcccaguacaccagcgcccuguuagccggaaccaucaccagcggcuggacuuucggcgcuggagccgcucugcagauccccuucgccaugcagauggccuaccgguucaacggcaucggcgugacccagaacgugcuguacgagaaccagaagcugaucgccaaccaguucaacagcgccaucggcaagauccaggacagccugagcagcaccgcuagcgcccugggcaagcugcaggacguggugaaccagaacgcccaggcccugaacacccuggugaagcagcugagcagcaacuucggcgccaucagcagcgugcugaacgacauccugagccggcuggacaaggucgaggccgaggugcagaucgaccggcugaucacuggccggcugcagagccugcagaccuacgugacccagcagcugauccgggccgccgagauucgggccagcgccaaccuggccgccaccaagaugagcgagugcgugcugggccagagcaagcggguggacuucugcggcaagggcuaccaccugaugagcuuuccccagagcgcaccccacggagugguguuccugcacgugaccuacgugcccgcccaggagaagaacuucaccaccgccccagccaucugccacgacggcaaggcccacuuuccccgggagggcguguucgugagcaacggcacccacugguucgugacccagcggaacuucuacgagccccagaucaucaccaccgacaacaccuucgugagcggcaacugcgacguggugaucggcaucgugaacaacaccguguacgauccccugcagcccgagcuggacagcuucaaggaggagcuggacaaguacuucaagaaucacaccagccccgacguggaccugggcgacaucagcggcaucaacgccagcguggugaacauccagaaggagaucgaucggcugaacgagguggccaagaaccugaacgagagccugaucgaccugcaggagcugggcaaguacgagcaguacaucaaguggcccugguacaucuggcugggcuucaucgccggccugaucgccaucgugauggugaccaucaugcugugcugcaugaccagcugcugcagcugccugaagggcuguugcagcugcggcagcugcugcaaguucgacgaggacgacagcgagcccgugcugaagggcgugaagcugcacuacaccugaggacuaguuauaagacugacuagcccgaugggccucccaacgggcccuccuccccuccuugcaccgagauuaauaaaaaaaaaaaaaaaaaaaaaaaaaaaaaaaaaaaaaaaaaaaaaaaaaaaaaaaaaaaaaaaaaaaaaaaaaaaaaaaaaaaaaaaaaaaaaaaaaaaa

SEQ ID NO: 25426 - RNA, 4011 nt, Artificial Sequence
  SARS-CoV-2/Wuhan/WIV05/2019__EPI_ISL_402128 spike protein mRNA gc (1-1273)(D614G)
aggagaaagcuuaccauguucguguuccuggugcugcugccccuggugagcagccagugcgugaaccugaccacccggacccagcugccaccagccuacaccaacagcuucacccggggcgucuacuaccccgacaagguguuccggagcagcguccugcacagcacccaggaccuguuccugcccuucuucagcaacgugaccugguuccacgccauccacgugagcggcaccaacggcaccaagcgguucgacaaccccgugcugcccuucaacgacggcguguacuucgccagcaccgagaagagcaacaucauccggggcuggaucuucggcaccacccuggacagcaagacccagagccugcugaucgugaauaacgccaccaacguggugaucaaggugugcgaguuccaguucugcaacgaccccuuccugggcguguacuaccacaagaacaacaagagcuggauggagagcgaguuccggguguacagcagcgccaacaacugcaccuucgaguacgugagccagcccuuccugauggaccuggagggcaagcagggcaacuucaagaaccugcgggaguucguguucaagaacaucgacggcuacuucaagaucuacagcaagcacaccccaaucaaccuggugcgggaucugccccagggcuucucagcccuggagccccugguggaccugcccaucggcaucaacaucacccgguuccagacccugcuggcccugcaccggagcuaccugaccccaggcgacagcagcagcggguggacagcaggcgcggcugcuuacuacgugggcuaccugcagccccggaccuuccugcugaaguacaacgagaacggcaccaucaccgacgccguggacugcgcccuggacccucugagcgagaccaagugcacccugaagagcuucaccguggagaagggcaucuaccagaccagcaacuuccgggugcagcccaccgagagcaucgugcgguuccccaacaucaccaaccugugccccuucggcgagguguucaacgccacccgguucgccagcguguacgccuggaaccggaagcggaucagcaacugcguggccgacuacagcgugcuguacaacagcgccagcuucagcaccuucaagugcuacggcgugagccccaccaagcugaacgaccugugcuucaccaacguguacgccgacagcuucgugauccguggcgacgaggugcggcagaucgcacccggccagacaggcaagaucgccgacuacaacuacaagcugcccgacgacuucaccggcugcgugaucgccuggaacagcaacaaccucgacagcaaggugggcggcaacuacaacuaccuguaccggcuguuccggaagagcaaccugaagcccuucgagcgggacaucagcaccgagaucuaccaagccggcuccaccccuugcaacggcguggagggcuucaacugcuacuucccucugcagagcuacggcuuccagcccaccaacggcgugggcuaccagcccuaccgggugguggugcugagcuucgagcugcugcacgccccagccaccguguguggccccaagaagagcaccaaccuggugaagaacaagugcgugaacuucaacuucaacggccuuaccggcaccggcgugcugaccgagagcaacaagaaauuccugcccuuucagcaguucggccgggacaucgccgacaccaccgacgcugugcgggauccccagacccuggagauccuggacaucaccccuugcagcuucggcggcgugagcgugaucaccccaggcaccaacaccagcaaccagguggccgugcuguaccagggcgugaacugcaccgaggugcccguggccauccacgccgaccagcugacacccaccuggcgggucuacagcaccggcagcaacguguuccagacccgggccgguugccugaucggcgccgagcacgugaacaacagcuacgagugcgacauccccaucggcgccggcaucugugccagcuaccagacccagaccaauucaccccggagggcaaggagcguggccagccagagcaucaucgccuacaccaugagccugggcgccgagaacagcguggccuacagcaacaacagcaucgccauccccaccaacuucaccaucagcgugaccaccgagauucugcccgugagcaugaccaagaccagcguggacugcaccauguacaucugcggcgacagcaccgagugcagcaaccugcugcugcaguacggcagcuucugcacccagcugaaccgggcccugaccggcaucgccguggagcaggacaagaacacccaggagguguucgcccaggugaagcagaucuacaagaccccucccaucaaggacuucggcggcuucaacuucagccagauccugcccgaccccagcaagcccagcaagcggagcuucaucgaggaccugcuguucaacaaggugacccuagccgacgccggcuucaucaagcaguacggcgacugccucggcgacauagccgcccgggaccugaucugcgcccagaaguucaacggccugaccgugcugccuccccugcugaccgacgagaugaucgcccaguacaccagcgcccuguuagccggaaccaucaccagcggcuggacuuucggcgcuggagccgcucugcagauccccuucgccaugcagauggccuaccgguucaacggcaucggcgugacccagaacgugcuguacgagaaccagaagcugaucgccaaccaguucaacagcgccaucggcaagauccaggacagccugagcagcaccgcuagcgcccugggcaagcugcaggacguggugaaccagaacgcccaggcccugaacacccuggugaagcagcugagcagcaacuucggcgccaucagcagcgugcugaacgacauccugagccggcuggacaaggucgaggccgaggugcagaucgaccggcugaucacuggccggcugcagagccugcagaccuacgugacccagcagcugauccgggccgccgagauucgggccagcgccaaccuggccgccaccaagaugagcgagugcgugcugggccagagcaagcggguggacuucugcggcaagggcuaccaccugaugagcuuuccccagagcgcaccccacggagugguguuccugcacgugaccuacgugcccgcccaggagaagaacuucaccaccgccccagccaucugccacgacggcaaggcccacuuuccccgggagggcguguucgugagcaacggcacccacugguucgugacccagcggaacuucuacgagccccagaucaucaccaccgacaacaccuucgugagcggcaacugcgacguggugaucggcaucgugaacaacaccguguacgauccccugcagcccgagcuggacagcuucaaggaggagcuggacaaguacuucaagaaucacaccagccccgacguggaccugggcgacaucagcggcaucaacgccagcguggugaacauccagaaggagaucgaucggcugaacgagguggccaagaaccugaacgagagccugaucgaccugcaggagcugggcaaguacgagcaguacaucaaguggcccugguacaucuggcugggcuucaucgccggccugaucgccaucgugauggugaccaucaugcugugcugcaugaccagcugcugcagcugccugaagggcuguugcagcugcggcagcugcugcaaguucgacgaggacgacagcgagcccgugcugaagggcgugaagcugcacuacaccugaggacuaguuauaagacugacuagcccgaugggccucccaacgggcccuccuccccuccuugcaccgagauuaauaaaaaaaaaaaaaaaaaaaaaaaaaaaaaaaaaaaaaaaaaaaaaaaaaaaaaaaaaaaaaaaaaaaaaaaaaaaaaaaaaaaaaaaaaaaaaaaaaaaa

SEQ ID NO: 25427 - RNA, 4011 nt, Artificial Sequence
  SARS-CoV-2/Wuhan/WIV05/2019__EPI_ISL_402128 spike protein mRNA gc (1-1273)(A222V_D614G)
aggagaaagcuuaccauguucguguuccuggugcugcugccccuggugagcagccagugcgugaaccugaccacccggacccagcugccaccagccuacaccaacagcuucacccggggcgucuacuaccccgacaagguguuccggagcagcguccugcacagcacccaggaccuguuccugcccuucuucagcaacgugaccugguuccacgccauccacgugagcggcaccaacggcaccaagcgguucgacaaccccgugcugcccuucaacgacggcguguacuucgccagcaccgagaagagcaacaucauccggggcuggaucuucggcaccacccuggacagcaagacccagagccugcugaucgugaauaacgccaccaacguggugaucaaggugugcgaguuccaguucugcaacgaccccuuccugggcguguacuaccacaagaacaacaagagcuggauggagagcgaguuccggguguacagcagcgccaacaacugcaccuucgaguacgugagccagcccuuccugauggaccuggagggcaagcagggcaacuucaagaaccugcgggaguucguguucaagaacaucgacggcuacuucaagaucuacagcaagcacaccccaaucaaccuggugcgggaucugccccagggcuucucagugcuggagccccugguggaccugcccaucggcaucaacaucacccgguuccagacccugcuggcccugcaccggagcuaccugaccccaggcgacagcagcagcggguggacagcaggcgcggcugcuuacuacgugggcuaccugcagccccggaccuuccugcugaaguacaacgagaacggcaccaucaccgacgccguggacugcgcccuggacccucugagcgagaccaagugcacccugaagagcuucaccguggagaagggcaucuaccagaccagcaacuuccgggugcagcccaccgagagcaucgugcgguuccccaacaucaccaaccugugccccuucggcgagguguucaacgccacccgguucgccagcguguacgccuggaaccggaagcggaucagcaacugcguggccgacuacagcgugcuguacaacagcgccagcuucagcaccuucaagugcuacggcgugagccccaccaagcugaacgaccugugcuucaccaacguguacgccgacagcuucgugauccguggcgacgaggugcggcagaucgcacccggccagacaggcaagaucgccgacuacaacuacaagcugcccgacgacuucaccggcugcgugaucgccuggaacagcaacaaccucgacagcaaggugggcggcaacuacaacuaccuguaccggcuguuccggaagagcaaccugaagcccuucgagcgggacaucagcaccgagaucuaccaagccggcuccaccccuugcaacggcguggagggcuucaacugcuacuucccucugcagagcuacggcuuccagcccaccaacggcgugggcuaccagcccuaccgggugguggugcugagcuucgagcugcugcacgccccagccaccguguguggccccaagaagagcaccaaccuggugaagaacaagugcgugaacuucaacuucaacggccuuaccggcaccggcgugcugaccgagagcaacaagaaauuccugcccuuucagcaguucggccgggacaucgccgacaccaccgacgcugugcgggauccccagacccuggagauccuggacaucaccccuugcagcuucggcggcgugagcgugaucaccccaggcaccaacaccagcaaccagguggccgugcuguaccagggcgugaacugcaccgaggugcccguggccauccacgccgaccagcugacacccaccuggcgggucuacagcaccggcagcaacguguuccagacccgggccgguugccugaucggcgccgagcacgugaacaacagcuacgagugcgacauccccaucggcgccggcaucugugccagcuaccagacccagaccaauucaccccggagggcaaggagcguggccagccagagcaucaucgccuacaccaugagccugggcgccgagaacagcguggccuacagcaacaacagcaucgccauccccaccaacuucaccaucagcgugaccaccgagauucugcccgugagcaugaccaagaccagcguggacugcaccauguacaucugcggcgacagcaccgagugcagcaaccugcugcugcaguacggcagcuucugcacccagcugaaccgggcccugaccggcaucgccguggagcaggacaagaacacccaggagguguucgcccaggugaagcagaucuacaagaccccucccaucaaggacuucggcggcuucaacuucagccagauccugcccgaccccagcaagcccagcaagcggagcuucaucgaggaccugcuguucaacaaggugacccuagccgacgccggcuucaucaagcaguacggcgacugccucggcgacauagccgcccgggaccugaucugcgcccagaaguucaacggccugaccgugcugccuccccugcugaccgacgagaugaucgcccaguacaccagcgcccuguuagccggaaccaucaccagcggcuggacuuucggcgcuggagccgcucugcagauccccuucgccaugcagauggccuaccgguucaacggcaucggcgugacccagaacgugcuguacgagaaccagaagcugaucgccaaccaguucaacagcgccaucggcaagauccaggacagccugagcagcaccgcuagcgcccugggcaagcugcaggacguggugaaccagaacgcccaggcccugaacacccuggugaagcagcugagcagcaacuucggcgccaucagcagcgugcugaacgacauccugagccggcuggacaaggucgaggccgaggugcagaucgaccggcugaucacuggccggcugcagagccugcagaccuacgugacccagcagcugauccgggccgccgagauucgggccagcgccaaccuggccgccaccaagaugagcgagugcgugcugggccagagcaagcggguggacuucugcggcaagggcuaccaccugaugagcuuuccccagagcgcaccccacggagugguguuccugcacgugaccuacgugcccgcccaggagaagaacuucaccaccgccccagccaucugccacgacggcaaggcccacuuuccccgggagggcguguucgugagcaacggcacccacugguucgugacccagcggaacuucuacgagccccagaucaucaccaccgacaacaccuucgugagcggcaacugcgacguggugaucggcaucgugaacaacaccguguacgauccccugcagcccgagcuggacagcuucaaggaggagcuggacaaguacuucaagaaucacaccagccccgacguggaccugggcgacaucagcggcaucaacgccagcguggugaacauccagaaggagaucgaucggcugaacgagguggccaagaaccugaacgagagccugaucgaccugcaggagcugggcaaguacgagcaguacaucaaguggcccugguacaucuggcugggcuucaucgccggccugaucgccaucgugauggugaccaucaugcugugcugcaugaccagcugcugcagcugccugaagggcuguugcagcugcggcagcugcugcaaguucgacgaggacgacagcgagcccgugcugaagggcgugaagcugcacuacaccugaggacuaguuauaagacugacuagcccgaugggccucccaacgggcccuccuccccuccuugcaccgagauuaauaaaaaaaaaaaaaaaaaaaaaaaaaaaaaaaaaaaaaaaaaaaaaaaaaaaaaaaaaaaaaaaaaaaaaaaaaaaaaaaaaaaaaaaaaaaaaaaaaaaa

SEQ ID NO: 25428 - RNA, 4011 nt, Artificial Sequence
  SARS-CoV-2/Wuhan/WIV05/2019__EPI_ISL_402128 spike protein mRNA gc (1-1273)(N439K_D614G)
aggagaaagcuuaccauguucguguuccuggugcugcugccccuggugagcagccagugcgugaaccugaccacccggacccagcugccaccagccuacaccaacagcuucacccggggcgucuacuaccccgacaagguguuccggagcagcguccugcacagcacccaggaccuguuccugcccuucuucagcaacgugaccugguuccacgccauccacgugagcggcaccaacggcaccaagcgguucgacaaccccgugcugcccuucaacgacggcguguacuucgccagcaccgagaagagcaacaucauccggggcuggaucuucggcaccacccuggacagcaagacccagagccugcugaucgugaauaacgccaccaacguggugaucaaggugugcgaguuccaguucugcaacgaccccuuccugggcguguacuaccacaagaacaacaagagcuggauggagagcgaguuccggguguacagcagcgccaacaacugcaccuucgaguacgugagccagcccuuccugauggaccuggagggcaagcagggcaacuucaagaaccugcgggaguucguguucaagaacaucgacggcuacuucaagaucuacagcaagcacaccccaaucaaccuggugcgggaucugccccagggcuucucagcccuggagccccugguggaccugcccaucggcaucaacaucacccgguuccagacccugcuggcccugcaccggagcuaccugaccccaggcgacagcagcagcggguggacagcaggcgcggcugcuuacuacgugggcuaccugcagccccggaccuuccugcugaaguacaacgagaacggcaccaucaccgacgccguggacugcgcccuggacccucugagcgagaccaagugcacccugaagagcuucaccguggagaagggcaucuaccagaccagcaacuuccgggugcagcccaccgagagcaucgugcgguuccccaacaucaccaaccugugccccuucggcgagguguucaacgccacccgguucgccagcguguacgccuggaaccggaagcggaucagcaacugcguggccgacuacagcgugcuguacaacagcgccagcuucagcaccuucaagugcuacggcgugagccccaccaagcugaacgaccugugcuucaccaacguguacgccgacagcuucgugauccguggcgacgaggugcggcagaucgcacccggccagacaggcaagaucgccgacuacaacuacaagcugcccgacgacuucaccggcugcgugaucgccuggaacagcaagaaccucgacagcaaggugggcggcaacuacaacuaccuguaccggcuguuccggaagagcaaccugaagcccuucgagcgggacaucagcaccgagaucuaccaagccggcuccaccccuugcaacggcguggagggcuucaacugcuacuucccucugcagagcuacggcuuccagcccaccaacggcgugggcuaccagcccuaccgggugguggugcugagcuucgagcugcugcacgccccagccaccguguguggccccaagaagagcaccaaccuggugaagaacaagugcgugaacuucaacuucaacggccuuaccggcaccggcgugcugaccgagagcaacaagaaauuccugcccuuucagcaguucggccgggacaucgccgacaccaccgacgcugugcgggauccccagacccuggagauccuggacaucaccccuugcagcuucggcggcgugagcgugaucaccccaggcaccaacaccagcaaccagguggccgugcuguaccagggcgugaacugcaccgaggugcccguggccauccacgccgaccagcugacacccaccuggcgggucuacagcaccggcagcaacguguuccagacccgggccgguugccugaucggcgccgagcacgugaacaacagcuacgagugcgacauccccaucggcgccggcaucugugccagcuaccagacccagaccaauucaccccggagggcaaggagcguggccagccagagcaucaucgccuacaccaugagccugggcgccgagaacagcguggccuacagcaacaacagcaucgccauccccaccaacuucaccaucagcgugaccaccgagauucugcccgugagcaugaccaagaccagcguggacugcaccauguacaucugcggcgacagcaccgagugcagcaaccugcugcugcaguacggcagcuucugcacccagcugaaccgggcccugaccggcaucgccguggagcaggacaagaacacccaggagguguucgcccaggugaagcagaucuacaagaccccucccaucaaggacuucggcggcuucaacuucagccagauccugcccgaccccagcaagcccagcaagcggagcuucaucgaggaccugcuguucaacaaggugacccuagccgacgccggcuucaucaagcaguacggcgacugccucggcgacauagccgcccgggaccugaucugcgcccagaaguucaacggccugaccgugcugccuccccugcugaccgacgagaugaucgcccaguacaccagcgcccuguuagccggaaccaucaccagcggcuggacuuucggcgcuggagccgcucugcagauccccuucgccaugcagauggccuaccgguucaacggcaucggcgugacccagaacgugcuguacgagaaccagaagcugaucgccaaccaguucaacagcgccaucggcaagauccaggacagccugagcagcaccgcuagcgcccugggcaagcugcaggacguggugaaccagaacgcccaggcccugaacacccuggugaagcagcugagcagcaacuucggcgccaucagcagcgugcugaacgacauccugagccggcuggacaaggucgaggccgaggugcagaucgaccggcugaucacuggccggcugcagagccugcagaccuacgugacccagcagcugauccgggccgccgagauucgggccagcgccaaccuggccgccaccaagaugagcgagugcgugcugggccagagcaagcggguggacuucugcggcaagggcuaccaccugaugagcuuuccccagagcgcaccccacggagugguguuccugcacgugaccuacgugcccgcccaggagaagaacuucaccaccgccccagccaucugccacgacggcaaggcccacuuuccccgggagggcguguucgugagcaacggcacccacugguucgugacccagcggaacuucuacgagccccagaucaucaccaccgacaacaccuucgugagcggcaacugcgacguggugaucggcaucgugaacaacaccguguacgauccccugcagcccgagcuggacagcuucaaggaggagcuggacaaguacuucaagaaucacaccagccccgacguggaccugggcgacaucagcggcaucaacgccagcguggugaacauccagaaggagaucgaucggcugaacgagguggccaagaaccugaacgagagccugaucgaccugcaggagcugggcaaguacgagcaguacaucaaguggcccugguacaucuggcugggcuucaucgccggccugaucgccaucgugauggugaccaucaugcugugcugcaugaccagcugcugcagcugccugaagggcuguugcagcugcggcagcugcugcaaguucgacgaggacgacagcgagcccgugcugaagggcgugaagcugcacuacaccugaggacuaguuauaagacugacuagcccgaugggccucccaacgggcccuccuccccuccuugcaccgagauuaauaaaaaaaaaaaaaaaaaaaaaaaaaaaaaaaaaaaaaaaaaaaaaaaaaaaaaaaaaaaaaaaaaaaaaaaaaaaaaaaaaaaaaaaaaaaaaaaaaaaa

SEQ ID NO: 25429 - RNA, 4011 nt, Artificial Sequence
  SARS-CoV-2/Wuhan/WIV05/2019__EPI_ISL_402128 spike protein mRNA gc (1-1273)(S477N_D614G)
aggagaaagcuuaccauguucguguuccuggugcugcugccccuggugagcagccagugcgugaaccugaccacccggacccagcugccaccagccuacaccaacagcuucacccggggcgucuacuaccccgacaagguguuccggagcagcguccugcacagcacccaggaccuguuccugcccuucuucagcaacgugaccugguuccacgccauccacgugagcggcaccaacggcaccaagcgguucgacaaccccgugcugcccuucaacgacggcguguacuucgccagcaccgagaagagcaacaucauccggggcuggaucuucggcaccacccuggacagcaagacccagagccugcugaucgugaauaacgccaccaacguggugaucaaggugugcgaguuccaguucugcaacgaccccuuccugggcguguacuaccacaagaacaacaagagcuggauggagagcgaguuccggguguacagcagcgccaacaacugcaccuucgaguacgugagccagcccuuccugauggaccuggagggcaagcagggcaacuucaagaaccugcgggaguucguguucaagaacaucgacggcuacuucaagaucuacagcaagcacaccccaaucaaccuggugcgggaucugccccagggcuucucagcccuggagccccugguggaccugcccaucggcaucaacaucacccgguuccagacccugcuggcccugcaccggagcuaccugaccccaggcgacagcagcagcggguggacagcaggcgcggcugcuuacuacgugggcuaccugcagccccggaccuuccugcugaaguacaacgagaacggcaccaucaccgacgccguggacugcgcccuggacccucugagcgagaccaagugcacccugaagagcuucaccguggagaagggcaucuaccagaccagcaacuuccgggugcagcccaccgagagcaucgugcgguuccccaacaucaccaaccugugccccuucggcgagguguucaacgccacccgguucgccagcguguacgccuggaaccggaagcggaucagcaacugcguggccgacuacagcgugcuguacaacagcgccagcuucagcaccuucaagugcuacggcgugagccccaccaagcugaacgaccugugcuucaccaacguguacgccgacagcuucgugauccguggcgacgaggugcggcagaucgcacccggccagacaggcaagaucgccgacuacaacuacaagcugcccgacgacuucaccggcugcgugaucgccuggaacagcaacaaccucgacagcaaggugggcggcaacuacaacuaccuguaccggcuguuccggaagagcaaccugaagcccuucgagcgggacaucagcaccgagaucuaccaagccggcaacaccccuugcaacggcguggagggcuucaacugcuacuucccucugcagagcuacggcuuccagcccaccaacggcgugggcuaccagcccuaccgggugguggugcugagcuucgagcugcugcacgccccagccaccguguguggccccaagaagagcaccaaccuggugaagaacaagugcgugaacuucaacuucaacggccuuaccggcaccggcgugcugaccgagagcaacaagaaauuccugcccuuucagcaguucggccgggacaucgccgacaccaccgacgcugugcgggauccccagacccuggagauccuggacaucaccccuugcagcuucggcggcgugagcgugaucaccccaggcaccaacaccagcaaccagguggccgugcuguaccagggcgugaacugcaccgaggugcccguggccauccacgccgaccagcugacacccaccuggcgggucuacagcaccggcagcaacguguuccagacccgggccgguugccugaucggcgccgagcacgugaacaacagcuacgagugcgacauccccaucggcgccggcaucugugccagcuaccagacccagaccaauucaccccggagggcaaggagcguggccagccagagcaucaucgccuacaccaugagccugggcgccgagaacagcguggccuacagcaacaacagcaucgccauccccaccaacuucaccaucagcgugaccaccgagauucugcccgugagcaugaccaagaccagcguggacugcaccauguacaucugcggcgacagcaccgagugcagcaaccugcugcugcaguacggcagcuucugcacccagcugaaccgggcccugaccggcaucgccguggagcaggacaagaacacccaggagguguucgcccaggugaagcagaucuacaagaccccucccaucaaggacuucggcggcuucaacuucagccagauccugcccgaccccagcaagcccagcaagcggagcuucaucgaggaccugcuguucaacaaggugacccuagccgacgccggcuucaucaagcaguacggcgacugccucggcgacauagccgcccgggaccugaucugcgcccagaaguucaacggccugaccgugcugccuccccugcugaccgacgagaugaucgcccaguacaccagcgcccuguuagccggaaccaucaccagcggcuggacuuucggcgcuggagccgcucugcagauccccuucgccaugcagauggccuaccgguucaacggcaucggcgugacccagaacgugcuguacgagaaccagaagcugaucgccaaccaguucaacagcgccaucggcaagauccaggacagccugagcagcaccgcuagcgcccugggcaagcugcaggacguggugaaccagaacgcccaggcccugaacacccuggugaagcagcugagcagcaacuucggcgccaucagcagcgugcugaacgacauccugagccggcuggacaaggucgaggccgaggugcagaucgaccggcugaucacuggccggcugcagagccugcagaccuacgugacccagcagcugauccgggccgccgagauucgggccagcgccaaccuggccgccaccaagaugagcgagugcgugcugggccagagcaagcggguggacuucugcggcaagggcuaccaccugaugagcuuuccccagagcgcaccccacggagugguguuccugcacgugaccuacgugcccgcccaggagaagaacuucaccaccgccccagccaucugccacgacggcaaggcccacuuuccccgggagggcguguucgugagcaacggcacccacugguucgugacccagcggaacuucuacgagccccagaucaucaccaccgacaacaccuucgugagcggcaacugcgacguggugaucggcaucgugaacaacaccguguacgauccccugcagcccgagcuggacagcuucaaggaggagcuggacaaguacuucaagaaucacaccagccccgacguggaccugggcgacaucagcggcaucaacgccagcguggugaacauccagaaggagaucgaucggcugaacgagguggccaagaaccugaacgagagccugaucgaccugcaggagcugggcaaguacgagcaguacaucaaguggcccugguacaucuggcugggcuucaucgccggccugaucgccaucgugauggugaccaucaugcugugcugcaugaccagcugcugcagcugccugaagggcuguugcagcugcggcagcugcugcaaguucgacgaggacgacagcgagcccgugcugaagggcgugaagcugcacuacaccugaggacuaguuauaagacugacuagcccgaugggccucccaacgggcccuccuccccuccuugcaccgagauuaauaaaaaaaaaaaaaaaaaaaaaaaaaaaaaaaaaaaaaaaaaaaaaaaaaaaaaaaaaaaaaaaaaaaaaaaaaaaaaaaaaaaaaaaaaaaaaaaaaaaa

SEQ ID NO: 25430 - RNA, 4011 nt, Artificial Sequence
  SARS-CoV-2/Wuhan/WIV05/2019__EPI_ISL_402128 spike protein mRNA gc (1-1273)(N501Y_D614G)
aggagaaagcuuaccauguucguguuccuggugcugcugccccuggugagcagccagugcgugaaccugaccacccggacccagcugccaccagccuacaccaacagcuucacccggggcgucuacuaccccgacaagguguuccggagcagcguccugcacagcacccaggaccuguuccugcccuucuucagcaacgugaccugguuccacgccauccacgugagcggcaccaacggcaccaagcgguucgacaaccccgugcugcccuucaacgacggcguguacuucgccagcaccgagaagagcaacaucauccggggcuggaucuucggcaccacccuggacagcaagacccagagccugcugaucgugaauaacgccaccaacguggugaucaaggugugcgaguuccaguucugcaacgaccccuuccugggcguguacuaccacaagaacaacaagagcuggauggagagcgaguuccggguguacagcagcgccaacaacugcaccuucgaguacgugagccagcccuuccugauggaccuggagggcaagcagggcaacuucaagaaccugcgggaguucguguucaagaacaucgacggcuacuucaagaucuacagcaagcacaccccaaucaaccuggugcgggaucugccccagggcuucucagcccuggagccccugguggaccugcccaucggcaucaacaucacccgguuccagacccugcuggcccugcaccggagcuaccugaccccaggcgacagcagcagcggguggacagcaggcgcggcugcuuacuacgugggcuaccugcagccccggaccuuccugcugaaguacaacgagaacggcaccaucaccgacgccguggacugcgcccuggacccucugagcgagaccaagugcacccugaagagcuucaccguggagaagggcaucuaccagaccagcaacuuccgggugcagcccaccgagagcaucgugcgguuccccaacaucaccaaccugugccccuucggcgagguguucaacgccacccgguucgccagcguguacgccuggaaccggaagcggaucagcaacugcguggccgacuacagcgugcuguacaacagcgccagcuucagcaccuucaagugcuacggcgugagccccaccaagcugaacgaccugugcuucaccaacguguacgccgacagcuucgugauccguggcgacgaggugcggcagaucgcacccggccagacaggcaagaucgccgacuacaacuacaagcugcccgacgacuucaccggcugcgugaucgccuggaacagcaacaaccucgacagcaaggugggcggcaacuacaacuaccuguaccggcuguuccggaagagcaaccugaagcccuucgagcgggacaucagcaccgagaucuaccaagccggcuccaccccuugcaacggcguggagggcuucaacugcuacuucccucugcagagcuacggcuuccagcccaccuacggcgugggcuaccagcccuaccgggugguggugcugagcuucgagcugcugcacgccccagccaccguguguggccccaagaagagcaccaaccuggugaagaacaagugcgugaacuucaacuucaacggccuuaccggcaccggcgugcugaccgagagcaacaagaaauuccugcccuuucagcaguucggccgggacaucgccgacaccaccgacgcugugcgggauccccagacccuggagauccuggacaucaccccuugcagcuucggcggcgugagcgugaucaccccaggcaccaacaccagcaaccagguggccgugcuguaccagggcgugaacugcaccgaggugcccguggccauccacgccgaccagcugacacccaccuggcgggucuacagcaccggcagcaacguguuccagacccgggccgguugccugaucggcgccgagcacgugaacaacagcuacgagugcgacauccccaucggcgccggcaucugugccagcuaccagacccagaccaauucaccccggagggcaaggagcguggccagccagagcaucaucgccuacaccaugagccugggcgccgagaacagcguggccuacagcaacaacagcaucgccauccccaccaacuucaccaucagcgugaccaccgagauucugcccgugagcaugaccaagaccagcguggacugcaccauguacaucugcggcgacagcaccgagugcagcaaccugcugcugcaguacggcagcuucugcacccagcugaaccgggcccugaccggcaucgccguggagcaggacaagaacacccaggagguguucgcccaggugaagcagaucuacaagaccccucccaucaaggacuucggcggcuucaacuucagccagauccugcccgaccccagcaagcccagcaagcggagcuucaucgaggaccugcuguucaacaaggugacccuagccgacgccggcuucaucaagcaguacggcgacugccucggcgacauagccgcccgggaccugaucugcgcccagaaguucaacggccugaccgugcugccuccccugcugaccgacgagaugaucgcccaguacaccagcgcccuguuagccggaaccaucaccagcggcuggacuuucggcgcuggagccgcucugcagauccccuucgccaugcagauggccuaccgguucaacggcaucggcgugacccagaacgugcuguacgagaaccagaagcugaucgccaaccaguucaacagcgccaucggcaagauccaggacagccugagcagcaccgcuagcgcccugggcaagcugcaggacguggugaaccagaacgcccaggcccugaacacccuggugaagcagcugagcagcaacuucggcgccaucagcagcgugcugaacgacauccugagccggcuggacaaggucgaggccgaggugcagaucgaccggcugaucacuggccggcugcagagccugcagaccuacgugacccagcagcugauccgggccgccgagauucgggccagcgccaaccuggccgccaccaagaugagcgagugcgugcugggccagagcaagcggguggacuucugcggcaagggcuaccaccugaugagcuuuccccagagcgcaccccacggagugguguuccugcacgugaccuacgugcccgcccaggagaagaacuucaccaccgccccagccaucugccacgacggcaaggcccacuuuccccgggagggcguguucgugagcaacggcacccacugguucgugacccagcggaacuucuacgagccccagaucaucaccaccgacaacaccuucgugagcggcaacugcgacguggugaucggcaucgugaacaacaccguguacgauccccugcagcccgagcuggacagcuucaaggaggagcuggacaaguacuucaagaaucacaccagccccgacguggaccugggcgacaucagcggcaucaacgccagcguggugaacauccagaaggagaucgaucggcugaacgagguggccaagaaccugaacgagagccugaucgaccugcaggagcugggcaaguacgagcaguacaucaaguggcccugguacaucuggcugggcuucaucgccggccugaucgccaucgugauggugaccaucaugcugugcugcaugaccagcugcugcagcugccugaagggcuguugcagcugcggcagcugcugcaaguucgacgaggacgacagcgagcccgugcugaagggcgugaagcugcacuacaccugaggacuaguuauaagacugacuagcccgaugggccucccaacgggcccuccuccccuccuugcaccgagauuaauaaaaaaaaaaaaaaaaaaaaaaaaaaaaaaaaaaaaaaaaaaaaaaaaaaaaaaaaaaaaaaaaaaaaaaaaaaaaaaaaaaaaaaaaaaaaaaaaaaaa

SEQ ID NO: 25431 - RNA, 4005 nt, Artificial Sequence
  SARS-CoV-2/Wuhan/WIV05/2019__EPI_ISL_402128 spike protein mRNA gc (1-1273)(H69del_V70del_D614G)
aggagaaagcuuaccauguucguguuccuggugcugcugccccuggugagcagccagugcgugaaccugaccacccggacccagcugccaccagccuacaccaacagcuucacccggggcgucuacuaccccgacaagguguuccggagcagcguccugcacagcacccaggaccuguuccugcccuucuucagcaacgugaccugguuccacgccaucagcggcaccaacggcaccaagcgguucgacaaccccgugcugcccuucaacgacggcguguacuucgccagcaccgagaagagcaacaucauccggggcuggaucuucggcaccacccuggacagcaagacccagagccugcugaucgugaauaacgccaccaacguggugaucaaggugugcgaguuccaguucugcaacgaccccuuccugggcguguacuaccacaagaacaacaagagcuggauggagagcgaguuccggguguacagcagcgccaacaacugcaccuucgaguacgugagccagcccuuccugauggaccuggagggcaagcagggcaacuucaagaaccugcgggaguucguguucaagaacaucgacggcuacuucaagaucuacagcaagcacaccccaaucaaccuggugcgggaucugccccagggcuucucagcccuggagccccugguggaccugcccaucggcaucaacaucacccgguuccagacccugcuggcccugcaccggagcuaccugaccccaggcgacagcagcagcggguggacagcaggcgcggcugcuuacuacgugggcuaccugcagccccggaccuuccugcugaaguacaacgagaacggcaccaucaccgacgccguggacugcgcccuggacccucugagcgagaccaagugcacccugaagagcuucaccguggagaagggcaucuaccagaccagcaacuuccgggugcagcccaccgagagcaucgugcgguuccccaacaucaccaaccugugccccuucggcgagguguucaacgccacccgguucgccagcguguacgccuggaaccggaagcggaucagcaacugcguggccgacuacagcgugcuguacaacagcgccagcuucagcaccuucaagugcuacggcgugagccccaccaagcugaacgaccugugcuucaccaacguguacgccgacagcuucgugauccguggcgacgaggugcggcagaucgcacccggccagacaggcaagaucgccgacuacaacuacaagcugcccgacgacuucaccggcugcgugaucgccuggaacagcaacaaccucgacagcaaggugggcggcaacuacaacuaccuguaccggcuguuccggaagagcaaccugaagcccuucgagcgggacaucagcaccgagaucuaccaagccggcuccaccccuugcaacggcguggagggcuucaacugcuacuucccucugcagagcuacggcuuccagcccaccaacggcgugggcuaccagcccuaccgggugguggugcugagcuucgagcugcugcacgccccagccaccguguguggccccaagaagagcaccaaccuggugaagaacaagugcgugaacuucaacuucaacggccuuaccggcaccggcgugcugaccgagagcaacaagaaauuccugcccuuucagcaguucggccgggacaucgccgacaccaccgacgcugugcgggauccccagacccuggagauccuggacaucaccccuugcagcuucggcggcgugagcgugaucaccccaggcaccaacaccagcaaccagguggccgugcuguaccagggcgugaacugcaccgaggugcccguggccauccacgccgaccagcugacacccaccuggcgggucuacagcaccggcagcaacguguuccagacccgggccgguugccugaucggcgccgagcacgugaacaacagcuacgagugcgacauccccaucggcgccggcaucugugccagcuaccagacccagaccaauucaccccggagggcaaggagcguggccagccagagcaucaucgccuacaccaugagccugggcgccgagaacagcguggccuacagcaacaacagcaucgccauccccaccaacuucaccaucagcgugaccaccgagauucugcccgugagcaugaccaagaccagcguggacugcaccauguacaucugcggcgacagcaccgagugcagcaaccugcugcugcaguacggcagcuucugcacccagcugaaccgggcccugaccggcaucgccguggagcaggacaagaacacccaggagguguucgcccaggugaagcagaucuacaagaccccucccaucaaggacuucggcggcuucaacuucagccagauccugcccgaccccagcaagcccagcaagcggagcuucaucgaggaccugcuguucaacaaggugacccuagccgacgccggcuucaucaagcaguacggcgacugccucggcgacauagccgcccgggaccugaucugcgcccagaaguucaacggccugaccgugcugccuccccugcugaccgacgagaugaucgcccaguacaccagcgcccuguuagccggaaccaucaccagcggcuggacuuucggcgcuggagccgcucugcagauccccuucgccaugcagauggccuaccgguucaacggcaucggcgugacccagaacgugcuguacgagaaccagaagcugaucgccaaccaguucaacagcgccaucggcaagauccaggacagccugagcagcaccgcuagcgcccugggcaagcugcaggacguggugaaccagaacgcccaggcccugaacacccuggugaagcagcugagcagcaacuucggcgccaucagcagcgugcugaacgacauccugagccggcuggacaaggucgaggccgaggugcagaucgaccggcugaucacuggccggcugcagagccugcagaccuacgugacccagcagcugauccgggccgccgagauucgggccagcgccaaccuggccgccaccaagaugagcgagugcgugcugggccagagcaagcggguggacuucugcggcaagggcuaccaccugaugagcuuuccccagagcgcaccccacggagugguguuccugcacgugaccuacgugcccgcccaggagaagaacuucaccaccgccccagccaucugccacgacggcaaggcccacuuuccccgggagggcguguucgugagcaacggcacccacugguucgugacccagcggaacuucuacgagccccagaucaucaccaccgacaacaccuucgugagcggcaacugcgacguggugaucggcaucgugaacaacaccguguacgauccccugcagcccgagcuggacagcuucaaggaggagcuggacaaguacuucaagaaucacaccagccccgacguggaccugggcgacaucagcggcaucaacgccagcguggugaacauccagaaggagaucgaucggcugaacgagguggccaagaaccugaacgagagccugaucgaccugcaggagcugggcaaguacgagcaguacaucaaguggcccugguacaucuggcugggcuucaucgccggccugaucgccaucgugauggugaccaucaugcugugcugcaugaccagcugcugcagcugccugaagggcuguugcagcugcggcagcugcugcaaguucgacgaggacgacagcgagcccgugcugaagggcgugaagcugcacuacaccugaggacuaguuauaagacugacuagcccgaugggccucccaacgggcccuccuccccuccuugcaccgagauuaauaaaaaaaaaaaaaaaaaaaaaaaaaaaaaaaaaaaaaaaaaaaaaaaaaaaaaaaaaaaaaaaaaaaaaaaaaaaaaaaaaaaaaaaaaaaaaaaaaaaa

SEQ ID NO: 25432 - RNA, 4011 nt, Artificial Sequence
  SARS-CoV-2/Wuhan/WIV05/2019__EPI_ISL_402128 spike protein mRNA gc (1-1273)(Y453F_D614G)
aggagaaagcuuaccauguucguguuccuggugcugcugccccuggugagcagccagugcgugaaccugaccacccggacccagcugccaccagccuacaccaacagcuucacccggggcgucuacuaccccgacaagguguuccggagcagcguccugcacagcacccaggaccuguuccugcccuucuucagcaacgugaccugguuccacgccauccacgugagcggcaccaacggcaccaagcgguucgacaaccccgugcugcccuucaacgacggcguguacuucgccagcaccgagaagagcaacaucauccggggcuggaucuucggcaccacccuggacagcaagacccagagccugcugaucgugaauaacgccaccaacguggugaucaaggugugcgaguuccaguucugcaacgaccccuuccugggcguguacuaccacaagaacaacaagagcuggauggagagcgaguuccggguguacagcagcgccaacaacugcaccuucgaguacgugagccagcccuuccugauggaccuggagggcaagcagggcaacuucaagaaccugcgggaguucguguucaagaacaucgacggcuacuucaagaucuacagcaagcacaccccaaucaaccuggugcgggaucugccccagggcuucucagcccuggagccccugguggaccugcccaucggcaucaacaucacccgguuccagacccugcuggcccugcaccggagcuaccugaccccaggcgacagcagcagcggguggacagcaggcgcggcugcuuacuacgugggcuaccugcagccccggaccuuccugcugaaguacaacgagaacggcaccaucaccgacgccguggacugcgcccuggacccucugagcgagaccaagugcacccugaagagcuucaccguggagaagggcaucuaccagaccagcaacuuccgggugcagcccaccgagagcaucgugcgguuccccaacaucaccaaccugugccccuucggcgagguguucaacgccacccgguucgccagcguguacgccuggaaccggaagcggaucagcaacugcguggccgacuacagcgugcuguacaacagcgccagcuucagcaccuucaagugcuacggcgugagccccaccaagcugaacgaccugugcuucaccaacguguacgccgacagcuucgugauccguggcgacgaggugcggcagaucgcacccggccagacaggcaagaucgccgacuacaacuacaagcugcccgacgacuucaccggcugcgugaucgccuggaacagcaacaaccucgacagcaaggugggcggcaacuacaacuaccuguuccggcuguuccggaagagcaaccugaagcccuucgagcgggacaucagcaccgagaucuaccaagccggcuccaccccuugcaacggcguggagggcuucaacugcuacuucccucugcagagcuacggcuuccagcccaccaacggcgugggcuaccagcccuaccgggugguggugcugagcuucgagcugcugcacgccccagccaccguguguggccccaagaagagcaccaaccuggugaagaacaagugcgugaacuucaacuucaacggccuuaccggcaccggcgugcugaccgagagcaacaagaaauuccugcccuuucagcaguucggccgggacaucgccgacaccaccgacgcugugcgggauccccagacccuggagauccuggacaucaccccuugcagcuucggcggcgugagcgugaucaccccaggcaccaacaccagcaaccagguggccgugcuguaccagggcgugaacugcaccgaggugcccguggccauccacgccgaccagcugacacccaccuggcgggucuacagcaccggcagcaacguguuccagacccgggccgguugccugaucggcgccgagcacgugaacaacagcuacgagugcgacauccccaucggcgccggcaucugugccagcuaccagacccagaccaauucaccccggagggcaaggagcguggccagccagagcaucaucgccuacaccaugagccugggcgccgagaacagcguggccuacagcaacaacagcaucgccauccccaccaacuucaccaucagcgugaccaccgagauucugcccgugagcaugaccaagaccagcguggacugcaccauguacaucugcggcgacagcaccgagugcagcaaccugcugcugcaguacggcagcuucugcacccagcugaaccgggcccugaccggcaucgccguggagcaggacaagaacacccaggagguguucgcccaggugaagcagaucuacaagaccccucccaucaaggacuucggcggcuucaacuucagccagauccugcccgaccccagcaagcccagcaagcggagcuucaucgaggaccugcuguucaacaaggugacccuagccgacgccggcuucaucaagcaguacggcgacugccucggcgacauagccgcccgggaccugaucugcgcccagaaguucaacggccugaccgugcugccuccccugcugaccgacgagaugaucgcccaguacaccagcgcccuguuagccggaaccaucaccagcggcuggacuuucggcgcuggagccgcucugcagauccccuucgccaugcagauggccuaccgguucaacggcaucggcgugacccagaacgugcuguacgagaaccagaagcugaucgccaaccaguucaacagcgccaucggcaagauccaggacagccugagcagcaccgcuagcgcccugggcaagcugcaggacguggugaaccagaacgcccaggcccugaacacccuggugaagcagcugagcagcaacuucggcgccaucagcagcgugcugaacgacauccugagccggcuggacaaggucgaggccgaggugcagaucgaccggcugaucacuggccggcugcagagccugcagaccuacgugacccagcagcugauccgggccgccgagauucgggccagcgccaaccuggccgccaccaagaugagcgagugcgugcugggccagagcaagcggguggacuucugcggcaagggcuaccaccugaugagcuuuccccagagcgcaccccacggagugguguuccugcacgugaccuacgugcccgcccaggagaagaacuucaccaccgccccagccaucugccacgacggcaaggcccacuuuccccgggagggcguguucgugagcaacggcacccacugguucgugacccagcggaacuucuacgagccccagaucaucaccaccgacaacaccuucgugagcggcaacugcgacguggugaucggcaucgugaacaacaccguguacgauccccugcagcccgagcuggacagcuucaaggaggagcuggacaaguacuucaagaaucacaccagccccgacguggaccugggcgacaucagcggcaucaacgccagcguggugaacauccagaaggagaucgaucggcugaacgagguggccaagaaccugaacgagagccugaucgaccugcaggagcugggcaaguacgagcaguacaucaaguggcccugguacaucuggcugggcuucaucgccggccugaucgccaucgugauggugaccaucaugcugugcugcaugaccagcugcugcagcugccugaagggcuguugcagcugcggcagcugcugcaaguucgacgaggacgacagcgagcccgugcugaagggcgugaagcugcacuacaccugaggacuaguuauaagacugacuagcccgaugggccucccaacgggcccuccuccccuccuugcaccgagauuaauaaaaaaaaaaaaaaaaaaaaaaaaaaaaaaaaaaaaaaaaaaaaaaaaaaaaaaaaaaaaaaaaaaaaaaaaaaaaaaaaaaaaaaaaaaaaaaaaaaaa

SEQ ID NO: 25433 - RNA, 4011 nt, Artificial Sequence
  SARS-CoV-2/Wuhan/WIV05/2019__EPI_ISL_402128 spike protein mRNA gc (1-1273)(D614G_I692V)
aggagaaagcuuaccauguucguguuccuggugcugcugccccuggugagcagccagugcgugaaccugaccacccggacccagcugccaccagccuacaccaacagcuucacccggggcgucuacuaccccgacaagguguuccggagcagcguccugcacagcacccaggaccuguuccugcccuucuucagcaacgugaccugguuccacgccauccacgugagcggcaccaacggcaccaagcgguucgacaaccccgugcugcccuucaacgacggcguguacuucgccagcaccgagaagagcaacaucauccggggcuggaucuucggcaccacccuggacagcaagacccagagccugcugaucgugaauaacgccaccaacguggugaucaaggugugcgaguuccaguucugcaacgaccccuuccugggcguguacuaccacaagaacaacaagagcuggauggagagcgaguuccggguguacagcagcgccaacaacugcaccuucgaguacgugagccagcccuuccugauggaccuggagggcaagcagggcaacuucaagaaccugcgggaguucguguucaagaacaucgacggcuacuucaagaucuacagcaagcacaccccaaucaaccuggugcgggaucugccccagggcuucucagcccuggagccccugguggaccugcccaucggcaucaacaucacccgguuccagacccugcuggcccugcaccggagcuaccugaccccaggcgacagcagcagcggguggacagcaggcgcggcugcuuacuacgugggcuaccugcagccccggaccuuccugcugaaguacaacgagaacggcaccaucaccgacgccguggacugcgcccuggacccucugagcgagaccaagugcacccugaagagcuucaccguggagaagggcaucuaccagaccagcaacuuccgggugcagcccaccgagagcaucgugcgguuccccaacaucaccaaccugugccccuucggcgagguguucaacgccacccgguucgccagcguguacgccuggaaccggaagcggaucagcaacugcguggccgacuacagcgugcuguacaacagcgccagcuucagcaccuucaagugcuacggcgugagccccaccaagcugaacgaccugugcuucaccaacguguacgccgacagcuucgugauccguggcgacgaggugcggcagaucgcacccggccagacaggcaagaucgccgacuacaacuacaagcugcccgacgacuucaccggcugcgugaucgccuggaacagcaacaaccucgacagcaaggugggcggcaacuacaacuaccuguaccggcuguuccggaagagcaaccugaagcccuucgagcgggacaucagcaccgagaucuaccaagccggcuccaccccuugcaacggcguggagggcuucaacugcuacuucccucugcagagcuacggcuuccagcccaccaacggcgugggcuaccagcccuaccgggugguggugcugagcuucgagcugcugcacgccccagccaccguguguggccccaagaagagcaccaaccuggugaagaacaagugcgugaacuucaacuucaacggccuuaccggcaccggcgugcugaccgagagcaacaagaaauuccugcccuuucagcaguucggccgggacaucgccgacaccaccgacgcugugcgggauccccagacccuggagauccuggacaucaccccuugcagcuucggcggcgugagcgugaucaccccaggcaccaacaccagcaaccagguggccgugcuguaccagggcgugaacugcaccgaggugcccguggccauccacgccgaccagcugacacccaccuggcgggucuacagcaccggcagcaacguguuccagacccgggccgguugccugaucggcgccgagcacgugaacaacagcuacgagugcgacauccccaucggcgccggcaucugugccagcuaccagacccagaccaauucaccccggagggcaaggagcguggccagccagagcgugaucgccuacaccaugagccugggcgccgagaacagcguggccuacagcaacaacagcaucgccauccccaccaacuucaccaucagcgugaccaccgagauucugcccgugagcaugaccaagaccagcguggacugcaccauguacaucugcggcgacagcaccgagugcagcaaccugcugcugcaguacggcagcuucugcacccagcugaaccgggcccugaccggcaucgccguggagcaggacaagaacacccaggagguguucgcccaggugaagcagaucuacaagaccccucccaucaaggacuucggcggcuucaacuucagccagauccugcccgaccccagcaagcccagcaagcggagcuucaucgaggaccugcuguucaacaaggugacccuagccgacgccggcuucaucaagcaguacggcgacugccucggcgacauagccgcccgggaccugaucugcgcccagaaguucaacggccugaccgugcugccuccccugcugaccgacgagaugaucgcccaguacaccagcgcccuguuagccggaaccaucaccagcggcuggacuuucggcgcuggagccgcucugcagauccccuucgccaugcagauggccuaccgguucaacggcaucggcgugacccagaacgugcuguacgagaaccagaagcugaucgccaaccaguucaacagcgccaucggcaagauccaggacagccugagcagcaccgcuagcgcccugggcaagcugcaggacguggugaaccagaacgcccaggcccugaacacccuggugaagcagcugagcagcaacuucggcgccaucagcagcgugcugaacgacauccugagccggcuggacaaggucgaggccgaggugcagaucgaccggcugaucacuggccggcugcagagccugcagaccuacgugacccagcagcugauccgggccgccgagauucgggccagcgccaaccuggccgccaccaagaugagcgagugcgugcugggccagagcaagcggguggacuucugcggcaagggcuaccaccugaugagcuuuccccagagcgcaccccacggagugguguuccugcacgugaccuacgugcccgcccaggagaagaacuucaccaccgccccagccaucugccacgacggcaaggcccacuuuccccgggagggcguguucgugagcaacggcacccacugguucgugacccagcggaacuucuacgagccccagaucaucaccaccgacaacaccuucgugagcggcaacugcgacguggugaucggcaucgugaacaacaccguguacgauccccugcagcccgagcuggacagcuucaaggaggagcuggacaaguacuucaagaaucacaccagccccgacguggaccugggcgacaucagcggcaucaacgccagcguggugaacauccagaaggagaucgaucggcugaacgagguggccaagaaccugaacgagagccugaucgaccugcaggagcugggcaaguacgagcaguacaucaaguggcccugguacaucuggcugggcuucaucgccggccugaucgccaucgugauggugaccaucaugcugugcugcaugaccagcugcugcagcugccugaagggcuguugcagcugcggcagcugcugcaaguucgacgaggacgacagcgagcccgugcugaagggcgugaagcugcacuacaccugaggacuaguuauaagacugacuagcccgaugggccucccaacgggcccuccuccccuccuugcaccgagauuaauaaaaaaaaaaaaaaaaaaaaaaaaaaaaaaaaaaaaaaaaaaaaaaaaaaaaaaaaaaaaaaaaaaaaaaaaaaaaaaaaaaaaaaaaaaaaaaaaaaaa

SEQ ID NO: 25434 - RNA, 4011 nt, Artificial Sequence
  SARS-CoV-2/Wuhan/WIV05/2019__EPI_ISL_402128 spike protein mRNA gc (1-1273)(D614G_M1229I)
aggagaaagcuuaccauguucguguuccuggugcugcugccccuggugagcagccagugcgugaaccugaccacccggacccagcugccaccagccuacaccaacagcuucacccggggcgucuacuaccccgacaagguguuccggagcagcguccugcacagcacccaggaccuguuccugcccuucuucagcaacgugaccugguuccacgccauccacgugagcggcaccaacggcaccaagcgguucgacaaccccgugcugcccuucaacgacggcguguacuucgccagcaccgagaagagcaacaucauccggggcuggaucuucggcaccacccuggacagcaagacccagagccugcugaucgugaauaacgccaccaacguggugaucaaggugugcgaguuccaguucugcaacgaccccuuccugggcguguacuaccacaagaacaacaagagcuggauggagagcgaguuccggguguacagcagcgccaacaacugcaccuucgaguacgugagccagcccuuccugauggaccuggagggcaagcagggcaacuucaagaaccugcgggaguucguguucaagaacaucgacggcuacuucaagaucuacagcaagcacaccccaaucaaccuggugcgggaucugccccagggcuucucagcccuggagccccugguggaccugcccaucggcaucaacaucacccgguuccagacccugcuggcccugcaccggagcuaccugaccccaggcgacagcagcagcggguggacagcaggcgcggcugcuuacuacgugggcuaccugcagccccggaccuuccugcugaaguacaacgagaacggcaccaucaccgacgccguggacugcgcccuggacccucugagcgagaccaagugcacccugaagagcuucaccguggagaagggcaucuaccagaccagcaacuuccgggugcagcccaccgagagcaucgugcgguuccccaacaucaccaaccugugccccuucggcgagguguucaacgccacccgguucgccagcguguacgccuggaaccggaagcggaucagcaacugcguggccgacuacagcgugcuguacaacagcgccagcuucagcaccuucaagugcuacggcgugagccccaccaagcugaacgaccugugcuucaccaacguguacgccgacagcuucgugauccguggcgacgaggugcggcagaucgcacccggccagacaggcaagaucgccgacuacaacuacaagcugcccgacgacuucaccggcugcgugaucgccuggaacagcaacaaccucgacagcaaggugggcggcaacuacaacuaccuguaccggcuguuccggaagagcaaccugaagcccuucgagcgggacaucagcaccgagaucuaccaagccggcuccaccccuugcaacggcguggagggcuucaacugcuacuucccucugcagagcuacggcuuccagcccaccaacggcgugggcuaccagcccuaccgggugguggugcugagcuucgagcugcugcacgccccagccaccguguguggccccaagaagagcaccaaccuggugaagaacaagugcgugaacuucaacuucaacggccuuaccggcaccggcgugcugaccgagagcaacaagaaauuccugcccuuucagcaguucggccgggacaucgccgacaccaccgacgcugugcgggauccccagacccuggagauccuggacaucaccccuugcagcuucggcggcgugagcgugaucaccccaggcaccaacaccagcaaccagguggccgugcuguaccagggcgugaacugcaccgaggugcccguggccauccacgccgaccagcugacacccaccuggcgggucuacagcaccggcagcaacguguuccagacccgggccgguugccugaucggcgccgagcacgugaacaacagcuacgagugcgacauccccaucggcgccggcaucugugccagcuaccagacccagaccaauucaccccggagggcaaggagcguggccagccagagcaucaucgccuacaccaugagccugggcgccgagaacagcguggccuacagcaacaacagcaucgccauccccaccaacuucaccaucagcgugaccaccgagauucugcccgugagcaugaccaagaccagcguggacugcaccauguacaucugcggcgacagcaccgagugcagcaaccugcugcugcaguacggcagcuucugcacccagcugaaccgggcccugaccggcaucgccguggagcaggacaagaacacccaggagguguucgcccaggugaagcagaucuacaagaccccucccaucaaggacuucggcggcuucaacuucagccagauccugcccgaccccagcaagcccagcaagcggagcuucaucgaggaccugcuguucaacaaggugacccuagccgacgccggcuucaucaagcaguacggcgacugccucggcgacauagccgcccgggaccugaucugcgcccagaaguucaacggccugaccgugcugccuccccugcugaccgacgagaugaucgcccaguacaccagcgcccuguuagccggaaccaucaccagcggcuggacuuucggcgcuggagccgcucugcagauccccuucgccaugcagauggccuaccgguucaacggcaucggcgugacccagaacgugcuguacgagaaccagaagcugaucgccaaccaguucaacagcgccaucggcaagauccaggacagccugagcagcaccgcuagcgcccugggcaagcugcaggacguggugaaccagaacgcccaggcccugaacacccuggugaagcagcugagcagcaacuucggcgccaucagcagcgugcugaacgacauccugagccggcuggacaaggucgaggccgaggugcagaucgaccggcugaucacuggccggcugcagagccugcagaccuacgugacccagcagcugauccgggccgccgagauucgggccagcgccaaccuggccgccaccaagaugagcgagugcgugcugggccagagcaagcggguggacuucugcggcaagggcuaccaccugaugagcuuuccccagagcgcaccccacggagugguguuccugcacgugaccuacgugcccgcccaggagaagaacuucaccaccgccccagccaucugccacgacggcaaggcccacuuuccccgggagggcguguucgugagcaacggcacccacugguucgugacccagcggaacuucuacgagccccagaucaucaccaccgacaacaccuucgugagcggcaacugcgacguggugaucggcaucgugaacaacaccguguacgauccccugcagcccgagcuggacagcuucaaggaggagcuggacaaguacuucaagaaucacaccagccccgacguggaccugggcgacaucagcggcaucaacgccagcguggugaacauccagaaggagaucgaucggcugaacgagguggccaagaaccugaacgagagccugaucgaccugcaggagcugggcaaguacgagcaguacaucaaguggcccugguacaucuggcugggcuucaucgccggccugaucgccaucgugaucgugaccaucaugcugugcugcaugaccagcugcugcagcugccugaagggcuguugcagcugcggcagcugcugcaaguucgacgaggacgacagcgagcccgugcugaagggcgugaagcugcacuacaccugaggacuaguuauaagacugacuagcccgaugggccucccaacgggcccuccuccccuccuugcaccgagauuaauaaaaaaaaaaaaaaaaaaaaaaaaaaaaaaaaaaaaaaaaaaaaaaaaaaaaaaaaaaaaaaaaaaaaaaaaaaaaaaaaaaaaaaaaaaaaaaaaaaaa

SEQ ID NO: 25435 - RNA, 4005 nt, Artificial Sequence
  SARS-CoV-2/Wuhan/WIV05/2019__EPI_ISL_402128 spike protein mRNA gc (1-1273)(H69del_V70del_A222V_Y453F_S477N_D614G_I692V)
aggagaaagcuuaccauguucguguuccuggugcugcugccccuggugagcagccagugcgugaaccugaccacccggacccagcugccaccagccuacaccaacagcuucacccggggcgucuacuaccccgacaagguguuccggagcagcguccugcacagcacccaggaccuguuccugcccuucuucagcaacgugaccugguuccacgccaucagcggcaccaacggcaccaagcgguucgacaaccccgugcugcccuucaacgacggcguguacuucgccagcaccgagaagagcaacaucauccggggcuggaucuucggcaccacccuggacagcaagacccagagccugcugaucgugaauaacgccaccaacguggugaucaaggugugcgaguuccaguucugcaacgaccccuuccugggcguguacuaccacaagaacaacaagagcuggauggagagcgaguuccggguguacagcagcgccaacaacugcaccuucgaguacgugagccagcccuuccugauggaccuggagggcaagcagggcaacuucaagaaccugcgggaguucguguucaagaacaucgacggcuacuucaagaucuacagcaagcacaccccaaucaaccuggugcgggaucugccccagggcuucucagugcuggagccccugguggaccugcccaucggcaucaacaucacccgguuccagacccugcuggcccugcaccggagcuaccugaccccaggcgacagcagcagcggguggacagcaggcgcggcugcuuacuacgugggcuaccugcagccccggaccuuccugcugaaguacaacgagaacggcaccaucaccgacgccguggacugcgcccuggacccucugagcgagaccaagugcacccugaagagcuucaccguggagaagggcaucuaccagaccagcaacuuccgggugcagcccaccgagagcaucgugcgguuccccaacaucaccaaccugugccccuucggcgagguguucaacgccacccgguucgccagcguguacgccuggaaccggaagcggaucagcaacugcguggccgacuacagcgugcuguacaacagcgccagcuucagcaccuucaagugcuacggcgugagccccaccaagcugaacgaccugugcuucaccaacguguacgccgacagcuucgugauccguggcgacgaggugcggcagaucgcacccggccagacaggcaagaucgccgacuacaacuacaagcugcccgacgacuucaccggcugcgugaucgccuggaacagcaacaaccucgacagcaaggugggcggcaacuacaacuaccuguuccggcuguuccggaagagcaaccugaagcccuucgagcgggacaucagcaccgagaucuaccaagccggcaacaccccuugcaacggcguggagggcuucaacugcuacuucccucugcagagcuacggcuuccagcccaccaacggcgugggcuaccagcccuaccgggugguggugcugagcuucgagcugcugcacgccccagccaccguguguggccccaagaagagcaccaaccuggugaagaacaagugcgugaacuucaacuucaacggccuuaccggcaccggcgugcugaccgagagcaacaagaaauuccugcccuuucagcaguucggccgggacaucgccgacaccaccgacgcugugcgggauccccagacccuggagauccuggacaucaccccuugcagcuucggcggcgugagcgugaucaccccaggcaccaacaccagcaaccagguggccgugcuguaccagggcgugaacugcaccgaggugcccguggccauccacgccgaccagcugacacccaccuggcgggucuacagcaccggcagcaacguguuccagacccgggccgguugccugaucggcgccgagcacgugaacaacagcuacgagugcgacauccccaucggcgccggcaucugugccagcuaccagacccagaccaauucaccccggagggcaaggagcguggccagccagagcgugaucgccuacaccaugagccugggcgccgagaacagcguggccuacagcaacaacagcaucgccauccccaccaacuucaccaucagcgugaccaccgagauucugcccgugagcaugaccaagaccagcguggacugcaccauguacaucugcggcgacagcaccgagugcagcaaccugcugcugcaguacggcagcuucugcacccagcugaaccgggcccugaccggcaucgccguggagcaggacaagaacacccaggagguguucgcccaggugaagcagaucuacaagaccccucccaucaaggacuucggcggcuucaacuucagccagauccugcccgaccccagcaagcccagcaagcggagcuucaucgaggaccugcuguucaacaaggugacccuagccgacgccggcuucaucaagcaguacggcgacugccucggcgacauagccgcccgggaccugaucugcgcccagaaguucaacggccugaccgugcugccuccccugcugaccgacgagaugaucgcccaguacaccagcgcccuguuagccggaaccaucaccagcggcuggacuuucggcgcuggagccgcucugcagauccccuucgccaugcagauggccuaccgguucaacggcaucggcgugacccagaacgugcuguacgagaaccagaagcugaucgccaaccaguucaacagcgccaucggcaagauccaggacagccugagcagcaccgcuagcgcccugggcaagcugcaggacguggugaaccagaacgcccaggcccugaacacccuggugaagcagcugagcagcaacuucggcgccaucagcagcgugcugaacgacauccugagccggcuggacaaggucgaggccgaggugcagaucgaccggcugaucacuggccggcugcagagccugcagaccuacgugacccagcagcugauccgggccgccgagauucgggccagcgccaaccuggccgccaccaagaugagcgagugcgugcugggccagagcaagcggguggacuucugcggcaagggcuaccaccugaugagcuuuccccagagcgcaccccacggagugguguuccugcacgugaccuacgugcccgcccaggagaagaacuucaccaccgccccagccaucugccacgacggcaaggcccacuuuccccgggagggcguguucgugagcaacggcacccacugguucgugacccagcggaacuucuacgagccccagaucaucaccaccgacaacaccuucgugagcggcaacugcgacguggugaucggcaucgugaacaacaccguguacgauccccugcagcccgagcuggacagcuucaaggaggagcuggacaaguacuucaagaaucacaccagccccgacguggaccugggcgacaucagcggcaucaacgccagcguggugaacauccagaaggagaucgaucggcugaacgagguggccaagaaccugaacgagagccugaucgaccugcaggagcugggcaaguacgagcaguacaucaaguggcccugguacaucuggcugggcuucaucgccggccugaucgccaucgugauggugaccaucaugcugugcugcaugaccagcugcugcagcugccugaagggcuguugcagcugcggcagcugcugcaaguucgacgaggacgacagcgagcccgugcugaagggcgugaagcugcacuacaccugaggacuaguuauaagacugacuagcccgaugggccucccaacgggcccuccuccccuccuugcaccgagauuaauaaaaaaaaaaaaaaaaaaaaaaaaaaaaaaaaaaaaaaaaaaaaaaaaaaaaaaaaaaaaaaaaaaaaaaaaaaaaaaaaaaaaaaaaaaaaaaaaaaaa

SEQ ID NO: 25436 - RNA, 4005 nt, Artificial Sequence
  SARS-CoV-2/Wuhan/WIV05/2019__EPI_ISL_402128 spike protein mRNA gc (1-1273)(H69del_V70del_Y453F_D614G_I692V_M1229I)
aggagaaagcuuaccauguucguguuccuggugcugcugccccuggugagcagccagugcgugaaccugaccacccggacccagcugccaccagccuacaccaacagcuucacccggggcgucuacuaccccgacaagguguuccggagcagcguccugcacagcacccaggaccuguuccugcccuucuucagcaacgugaccugguuccacgccaucagcggcaccaacggcaccaagcgguucgacaaccccgugcugcccuucaacgacggcguguacuucgccagcaccgagaagagcaacaucauccggggcuggaucuucggcaccacccuggacagcaagacccagagccugcugaucgugaauaacgccaccaacguggugaucaaggugugcgaguuccaguucugcaacgaccccuuccugggcguguacuaccacaagaacaacaagagcuggauggagagcgaguuccggguguacagcagcgccaacaacugcaccuucgaguacgugagccagcccuuccugauggaccuggagggcaagcagggcaacuucaagaaccugcgggaguucguguucaagaacaucgacggcuacuucaagaucuacagcaagcacaccccaaucaaccuggugcgggaucugccccagggcuucucagcccuggagccccugguggaccugcccaucggcaucaacaucacccgguuccagacccugcuggcccugcaccggagcuaccugaccccaggcgacagcagcagcggguggacagcaggcgcggcugcuuacuacgugggcuaccugcagccccggaccuuccugcugaaguacaacgagaacggcaccaucaccgacgccguggacugcgcccuggacccucugagcgagaccaagugcacccugaagagcuucaccguggagaagggcaucuaccagaccagcaacuuccgggugcagcccaccgagagcaucgugcgguuccccaacaucaccaaccugugccccuucggcgagguguucaacgccacccgguucgccagcguguacgccuggaaccggaagcggaucagcaacugcguggccgacuacagcgugcuguacaacagcgccagcuucagcaccuucaagugcuacggcgugagccccaccaagcugaacgaccugugcuucaccaacguguacgccgacagcuucgugauccguggcgacgaggugcggcagaucgcacccggccagacaggcaagaucgccgacuacaacuacaagcugcccgacgacuucaccggcugcgugaucgccuggaacagcaacaaccucgacagcaaggugggcggcaacuacaacuaccuguuccggcuguuccggaagagcaaccugaagcccuucgagcgggacaucagcaccgagaucuaccaagccggcuccaccccuugcaacggcguggagggcuucaacugcuacuucccucugcagagcuacggcuuccagcccaccaacggcgugggcuaccagcccuaccgggugguggugcugagcuucgagcugcugcacgccccagccaccguguguggccccaagaagagcaccaaccuggugaagaacaagugcgugaacuucaacuucaacggccuuaccggcaccggcgugcugaccgagagcaacaagaaauuccugcccuuucagcaguucggccgggacaucgccgacaccaccgacgcugugcgggauccccagacccuggagauccuggacaucaccccuugcagcuucggcggcgugagcgugaucaccccaggcaccaacaccagcaaccagguggccgugcuguaccagggcgugaacugcaccgaggugcccguggccauccacgccgaccagcugacacccaccuggcgggucuacagcaccggcagcaacguguuccagacccgggccgguugccugaucggcgccgagcacgugaacaacagcuacgagugcgacauccccaucggcgccggcaucugugccagcuaccagacccagaccaauucaccccggagggcaaggagcguggccagccagagcgugaucgccuacaccaugagccugggcgccgagaacagcguggccuacagcaacaacagcaucgccauccccaccaacuucaccaucagcgugaccaccgagauucugcccgugagcaugaccaagaccagcguggacugcaccauguacaucugcggcgacagcaccgagugcagcaaccugcugcugcaguacggcagcuucugcacccagcugaaccgggcccugaccggcaucgccguggagcaggacaagaacacccaggagguguucgcccaggugaagcagaucuacaagaccccucccaucaaggacuucggcggcuucaacuucagccagauccugcccgaccccagcaagcccagcaagcggagcuucaucgaggaccugcuguucaacaaggugacccuagccgacgccggcuucaucaagcaguacggcgacugccucggcgacauagccgcccgggaccugaucugcgcccagaaguucaacggccugaccgugcugccuccccugcugaccgacgagaugaucgcccaguacaccagcgcccuguuagccggaaccaucaccagcggcuggacuuucggcgcuggagccgcucugcagauccccuucgccaugcagauggccuaccgguucaacggcaucggcgugacccagaacgugcuguacgagaaccagaagcugaucgccaaccaguucaacagcgccaucggcaagauccaggacagccugagcagcaccgcuagcgcccugggcaagcugcaggacguggugaaccagaacgcccaggcccugaacacccuggugaagcagcugagcagcaacuucggcgccaucagcagcgugcugaacgacauccugagccggcuggacaaggucgaggccgaggugcagaucgaccggcugaucacuggccggcugcagagccugcagaccuacgugacccagcagcugauccgggccgccgagauucgggccagcgccaaccuggccgccaccaagaugagcgagugcgugcugggccagagcaagcggguggacuucugcggcaagggcuaccaccugaugagcuuuccccagagcgcaccccacggagugguguuccugcacgugaccuacgugcccgcccaggagaagaacuucaccaccgccccagccaucugccacgacggcaaggcccacuuuccccgggagggcguguucgugagcaacggcacccacugguucgugacccagcggaacuucuacgagccccagaucaucaccaccgacaacaccuucgugagcggcaacugcgacguggugaucggcaucgugaacaacaccguguacgauccccugcagcccgagcuggacagcuucaaggaggagcuggacaaguacuucaagaaucacaccagccccgacguggaccugggcgacaucagcggcaucaacgccagcguggugaacauccagaaggagaucgaucggcugaacgagguggccaagaaccugaacgagagccugaucgaccugcaggagcugggcaaguacgagcaguacaucaaguggcccugguacaucuggcugggcuucaucgccggccugaucgccaucgugaucgugaccaucaugcugugcugcaugaccagcugcugcagcugccugaagggcuguugcagcugcggcagcugcugcaaguucgacgaggacgacagcgagcccgugcugaagggcgugaagcugcacuacaccugaggacuaguuauaagacugacuagcccgaugggccucccaacgggcccuccuccccuccuugcaccgagauuaauaaaaaaaaaaaaaaaaaaaaaaaaaaaaaaaaaaaaaaaaaaaaaaaaaaaaaaaaaaaaaaaaaaaaaaaaaaaaaaaaaaaaaaaaaaaaaaaaaaaa

SEQ ID NO: 25437 - RNA, 4002 nt, Artificial Sequence
  SARS-CoV-2/Wuhan/WIV05/2019__EPI_ISL_402128 spike protein mRNA gc (1-1273)(H69del_V70del_Y144del_N501Y_A570D_D614G_P681H_T716I_S982 A_D1118H)
aggagaaagcuuaccauguucguguuccuggugcugcugccccuggugagcagccagugcgugaaccugaccacccggacccagcugccaccagccuacaccaacagcuucacccggggcgucuacuaccccgacaagguguuccggagcagcguccugcacagcacccaggaccuguuccugcccuucuucagcaacgugaccugguuccacgccaucagcggcaccaacggcaccaagcgguucgacaaccccgugcugcccuucaacgacggcguguacuucgccagcaccgagaagagcaacaucauccggggcuggaucuucggcaccacccuggacagcaagacccagagccugcugaucgugaauaacgccaccaacguggugaucaaggugugcgaguuccaguucugcaacgaccccuuccugggcguguaccacaagaacaacaagagcuggauggagagcgaguuccggguguacagcagcgccaacaacugcaccuucgaguacgugagccagcccuuccugauggaccuggagggcaagcagggcaacuucaagaaccugcgggaguucguguucaagaacaucgacggcuacuucaagaucuacagcaagcacaccccaaucaaccuggugcgggaucugccccagggcuucucagcccuggagccccugguggaccugcccaucggcaucaacaucacccgguuccagacccugcuggcccugcaccggagcuaccugaccccaggcgacagcagcagcggguggacagcaggcgcggcugcuuacuacgugggcuaccugcagccccggaccuuccugcugaaguacaacgagaacggcaccaucaccgacgccguggacugcgcccuggacccucugagcgagaccaagugcacccugaagagcuucaccguggagaagggcaucuaccagaccagcaacuuccgggugcagcccaccgagagcaucgugcgguuccccaacaucaccaaccugugccccuucggcgagguguucaacgccacccgguucgccagcguguacgccuggaaccggaagcggaucagcaacugcguggccgacuacagcgugcuguacaacagcgccagcuucagcaccuucaagugcuacggcgugagccccaccaagcugaacgaccugugcuucaccaacguguacgccgacagcuucgugauccguggcgacgaggugcggcagaucgcacccggccagacaggcaagaucgccgacuacaacuacaagcugcccgacgacuucaccggcugcgugaucgccuggaacagcaacaaccucgacagcaaggugggcggcaacuacaacuaccuguaccggcuguuccggaagagcaaccugaagcccuucgagcgggacaucagcaccgagaucuaccaagccggcuccaccccuugcaacggcguggagggcuucaacugcuacuucccucugcagagcuacggcuuccagcccaccuacggcgugggcuaccagcccuaccgggugguggugcugagcuucgagcugcugcacgccccagccaccguguguggccccaagaagagcaccaaccuggugaagaacaagugcgugaacuucaacuucaacggccuuaccggcaccggcgugcugaccgagagcaacaagaaauuccugcccuuucagcaguucggccgggacaucgacgacaccaccgacgcugugcgggauccccagacccuggagauccuggacaucaccccuugcagcuucggcggcgugagcgugaucaccccaggcaccaacaccagcaaccagguggccgugcuguaccagggcgugaacugcaccgaggugcccguggccauccacgccgaccagcugacacccaccuggcgggucuacagcaccggcagcaacguguuccagacccgggccgguugccugaucggcgccgagcacgugaacaacagcuacgagugcgacauccccaucggcgccggcaucugugccagcuaccagacccagaccaauucacaccggagggcaaggagcguggccagccagagcaucaucgccuacaccaugagccugggcgccgagaacagcguggccuacagcaacaacagcaucgccauccccaucaacuucaccaucagcgugaccaccgagauucugcccgugagcaugaccaagaccagcguggacugcaccauguacaucugcggcgacagcaccgagugcagcaaccugcugcugcaguacggcagcuucugcacccagcugaaccgggcccugaccggcaucgccguggagcaggacaagaacacccaggagguguucgcccaggugaagcagaucuacaagaccccucccaucaaggacuucggcggcuucaacuucagccagauccugcccgaccccagcaagcccagcaagcggagcuucaucgaggaccugcuguucaacaaggugacccuagccgacgccggcuucaucaagcaguacggcgacugccucggcgacauagccgcccgggaccugaucugcgcccagaaguucaacggccugaccgugcugccuccccugcugaccgacgagaugaucgcccaguacaccagcgcccuguuagccggaaccaucaccagcggcuggacuuucggcgcuggagccgcucugcagauccccuucgccaugcagauggccuaccgguucaacggcaucggcgugacccagaacgugcuguacgagaaccagaagcugaucgccaaccaguucaacagcgccaucggcaagauccaggacagccugagcagcaccgcuagcgcccugggcaagcugcaggacguggugaaccagaacgcccaggcccugaacacccuggugaagcagcugagcagcaacuucggcgccaucagcagcgugcugaacgacauccuggcccggcuggacaaggucgaggccgaggugcagaucgaccggcugaucacuggccggcugcagagccugcagaccuacgugacccagcagcugauccgggccgccgagauucgggccagcgccaaccuggccgccaccaagaugagcgagugcgugcugggccagagcaagcggguggacuucugcggcaagggcuaccaccugaugagcuuuccccagagcgcaccccacggagugguguuccugcacgugaccuacgugcccgcccaggagaagaacuucaccaccgccccagccaucugccacgacggcaaggcccacuuuccccgggagggcguguucgugagcaacggcacccacugguucgugacccagcggaacuucuacgagccccagaucaucaccacccacaacaccuucgugagcggcaacugcgacguggugaucggcaucgugaacaacaccguguacgauccccugcagcccgagcuggacagcuucaaggaggagcuggacaaguacuucaagaaucacaccagccccgacguggaccugggcgacaucagcggcaucaacgccagcguggugaacauccagaaggagaucgaucggcugaacgagguggccaagaaccugaacgagagccugaucgaccugcaggagcugggcaaguacgagcaguacaucaaguggcccugguacaucuggcugggcuucaucgccggccugaucgccaucgugauggugaccaucaugcugugcugcaugaccagcugcugcagcugccugaagggcuguugcagcugcggcagcugcugcaaguucgacgaggacgacagcgagcccgugcugaagggcgugaagcugcacuacaccugaggacuaguuauaagacugacuagcccgaugggccucccaacgggcccuccuccccuccuugcaccgagauuaauaaaaaaaaaaaaaaaaaaaaaaaaaaaaaaaaaaaaaaaaaaaaaaaaaaaaaaaaaaaaaaaaaaaaaaaaaaaaaaaaaaaaaaaaaaaaaaaaaaaa

SEQ ID NO: 25438 - RNA, 4011 nt, Artificial Sequence
  SARS-CoV-2/Wuhan/WIV05/2019__EPI_ISL_402128 spike protein mRNA gc (1-1273)(K417N_E484K_N501Y_D614G)
aggagaaagcuuaccauguucguguuccuggugcugcugccccuggugagcagccagugcgugaaccugaccacccggacccagcugccaccagccuacaccaacagcuucacccggggcgucuacuaccccgacaagguguuccggagcagcguccugcacagcacccaggaccuguuccugcccuucuucagcaacgugaccugguuccacgccauccacgugagcggcaccaacggcaccaagcgguucgacaaccccgugcugcccuucaacgacggcguguacuucgccagcaccgagaagagcaacaucauccggggcuggaucuucggcaccacccuggacagcaagacccagagccugcugaucgugaauaacgccaccaacguggugaucaaggugugcgaguuccaguucugcaacgaccccuuccugggcguguacuaccacaagaacaacaagagcuggauggagagcgaguuccggguguacagcagcgccaacaacugcaccuucgaguacgugagccagcccuuccugauggaccuggagggcaagcagggcaacuucaagaaccugcgggaguucguguucaagaacaucgacggcuacuucaagaucuacagcaagcacaccccaaucaaccuggugcgggaucugccccagggcuucucagcccuggagccccugguggaccugcccaucggcaucaacaucacccgguuccagacccugcuggcccugcaccggagcuaccugaccccaggcgacagcagcagcggguggacagcaggcgcggcugcuuacuacgugggcuaccugcagccccggaccuuccugcugaaguacaacgagaacggcaccaucaccgacgccguggacugcgcccuggacccucugagcgagaccaagugcacccugaagagcuucaccguggagaagggcaucuaccagaccagcaacuuccgggugcagcccaccgagagcaucgugcgguuccccaacaucaccaaccugugccccuucggcgagguguucaacgccacccgguucgccagcguguacgccuggaaccggaagcggaucagcaacugcguggccgacuacagcgugcuguacaacagcgccagcuucagcaccuucaagugcuacggcgugagccccaccaagcugaacgaccugugcuucaccaacguguacgccgacagcuucgugauccguggcgacgaggugcggcagaucgcacccggccagacaggcaacaucgccgacuacaacuacaagcugcccgacgacuucaccggcugcgugaucgccuggaacagcaacaaccucgacagcaaggugggcggcaacuacaacuaccuguaccggcuguuccggaagagcaaccugaagcccuucgagcgggacaucagcaccgagaucuaccaagccggcuccaccccuugcaacggcgugaagggcuucaacugcuacuucccucugcagagcuacggcuuccagcccaccuacggcgugggcuaccagcccuaccgggugguggugcugagcuucgagcugcugcacgccccagccaccguguguggccccaagaagagcaccaaccuggugaagaacaagugcgugaacuucaacuucaacggccuuaccggcaccggcgugcugaccgagagcaacaagaaauuccugcccuuucagcaguucggccgggacaucgccgacaccaccgacgcugugcgggauccccagacccuggagauccuggacaucaccccuugcagcuucggcggcgugagcgugaucaccccaggcaccaacaccagcaaccagguggccgugcuguaccagggcgugaacugcaccgaggugcccguggccauccacgccgaccagcugacacccaccuggcgggucuacagcaccggcagcaacguguuccagacccgggccgguugccugaucggcgccgagcacgugaacaacagcuacgagugcgacauccccaucggcgccggcaucugugccagcuaccagacccagaccaauucaccccggagggcaaggagcguggccagccagagcaucaucgccuacaccaugagccugggcgccgagaacagcguggccuacagcaacaacagcaucgccauccccaccaacuucaccaucagcgugaccaccgagauucugcccgugagcaugaccaagaccagcguggacugcaccauguacaucugcggcgacagcaccgagugcagcaaccugcugcugcaguacggcagcuucugcacccagcugaaccgggcccugaccggcaucgccguggagcaggacaagaacacccaggagguguucgcccaggugaagcagaucuacaagaccccucccaucaaggacuucggcggcuucaacuucagccagauccugcccgaccccagcaagcccagcaagcggagcuucaucgaggaccugcuguucaacaaggugacccuagccgacgccggcuucaucaagcaguacggcgacugccucggcgacauagccgcccgggaccugaucugcgcccagaaguucaacggccugaccgugcugccuccccugcugaccgacgagaugaucgcccaguacaccagcgcccuguuagccggaaccaucaccagcggcuggacuuucggcgcuggagccgcucugcagauccccuucgccaugcagauggccuaccgguucaacggcaucggcgugacccagaacgugcuguacgagaaccagaagcugaucgccaaccaguucaacagcgccaucggcaagauccaggacagccugagcagcaccgcuagcgcccugggcaagcugcaggacguggugaaccagaacgcccaggcccugaacacccuggugaagcagcugagcagcaacuucggcgccaucagcagcgugcugaacgacauccugagccggcuggacaaggucgaggccgaggugcagaucgaccggcugaucacuggccggcugcagagccugcagaccuacgugacccagcagcugauccgggccgccgagauucgggccagcgccaaccuggccgccaccaagaugagcgagugcgugcugggccagagcaagcggguggacuucugcggcaagggcuaccaccugaugagcuuuccccagagcgcaccccacggagugguguuccugcacgugaccuacgugcccgcccaggagaagaacuucaccaccgccccagccaucugccacgacggcaaggcccacuuuccccgggagggcguguucgugagcaacggcacccacugguucgugacccagcggaacuucuacgagccccagaucaucaccaccgacaacaccuucgugagcggcaacugcgacguggugaucggcaucgugaacaacaccguguacgauccccugcagcccgagcuggacagcuucaaggaggagcuggacaaguacuucaagaaucacaccagccccgacguggaccugggcgacaucagcggcaucaacgccagcguggugaacauccagaaggagaucgaucggcugaacgagguggccaagaaccugaacgagagccugaucgaccugcaggagcugggcaaguacgagcaguacaucaaguggcccugguacaucuggcugggcuucaucgccggccugaucgccaucgugauggugaccaucaugcugugcugcaugaccagcugcugcagcugccugaagggcuguugcagcugcggcagcugcugcaaguucgacgaggacgacagcgagcccgugcugaagggcgugaagcugcacuacaccugaggacuaguuauaagacugacuagcccgaugggccucccaacgggcccuccuccccuccuugcaccgagauuaauaaaaaaaaaaaaaaaaaaaaaaaaaaaaaaaaaaaaaaaaaaaaaaaaaaaaaaaaaaaaaaaaaaaaaaaaaaaaaaaaaaaaaaaaaaaaaaaaaaaa

SEQ ID NO: 25439 - RNA, 4002 nt, Artificial Sequence
  SARS-CoV-2/Wuhan/WIV05/2019__EPI_ISL_402128 spike protein mRNA gc (1-1273)(L18F_D80A_D215G_L242del_A243del_L244del_R246I_K417N_E484 K_N501Y_D614G_A701V)
aggagaaagcuuaccauguucguguuccuggugcugcugccccuggugagcagccagugcgugaacuucaccacccggacccagcugccaccagccuacaccaacagcuucacccggggcgucuacuaccccgacaagguguuccggagcagcguccugcacagcacccaggaccuguuccugcccuucuucagcaacgugaccugguuccacgccauccacgugagcggcaccaacggcaccaagcgguucgccaaccccgugcugcccuucaacgacggcguguacuucgccagcaccgagaagagcaacaucauccggggcuggaucuucggcaccacccuggacagcaagacccagagccugcugaucgugaauaacgccaccaacguggugaucaaggugugcgaguuccaguucugcaacgaccccuuccugggcguguacuaccacaagaacaacaagagcuggauggagagcgaguuccggguguacagcagcgccaacaacugcaccuucgaguacgugagccagcccuuccugauggaccuggagggcaagcagggcaacuucaagaaccugcgggaguucguguucaagaacaucgacggcuacuucaagaucuacagcaagcacaccccaaucaaccuggugcggggccugccccagggcuucucagcccuggagccccugguggaccugcccaucggcaucaacaucacccgguuccagacccugcacaucagcuaccugaccccaggcgacagcagcagcggguggacagcaggcgcggcugcuuacuacgugggcuaccugcagccccggaccuuccugcugaaguacaacgagaacggcaccaucaccgacgccguggacugcgcccuggacccucugagcgagaccaagugcacccugaagagcuucaccguggagaagggcaucuaccagaccagcaacuuccgggugcagcccaccgagagcaucgugcgguuccccaacaucaccaaccugugccccuucggcgagguguucaacgccacccgguucgccagcguguacgccuggaaccggaagcggaucagcaacugcguggccgacuacagcgugcuguacaacagcgccagcuucagcaccuucaagugcuacggcgugagccccaccaagcugaacgaccugugcuucaccaacguguacgccgacagcuucgugauccguggcgacgaggugcggcagaucgcacccggccagacaggcaacaucgccgacuacaacuacaagcugcccgacgacuucaccggcugcgugaucgccuggaacagcaacaaccucgacagcaaggugggcggcaacuacaacuaccuguaccggcuguuccggaagagcaaccugaagcccuucgagcgggacaucagcaccgagaucuaccaagccggcuccaccccuugcaacggcgugaagggcuucaacugcuacuucccucugcagagcuacggcuuccagcccaccuacggcgugggcuaccagcccuaccgggugguggugcugagcuucgagcugcugcacgccccagccaccguguguggccccaagaagagcaccaaccuggugaagaacaagugcgugaacuucaacuucaacggccuuaccggcaccggcgugcugaccgagagcaacaagaaauuccugcccuuucagcaguucggccgggacaucgccgacaccaccgacgcugugcgggauccccagacccuggagauccuggacaucaccccuugcagcuucggcggcgugagcgugaucaccccaggcaccaacaccagcaaccagguggccgugcuguaccagggcgugaacugcaccgaggugcccguggccauccacgccgaccagcugacacccaccuggcgggucuacagcaccggcagcaacguguuccagacccgggccgguugccugaucggcgccgagcacgugaacaacagcuacgagugcgacauccccaucggcgccggcaucugugccagcuaccagacccagaccaauucaccccggagggcaaggagcguggccagccagagcaucaucgccuacaccaugagccugggcguggagaacagcguggccuacagcaacaacagcaucgccauccccaccaacuucaccaucagcgugaccaccgagauucugcccgugagcaugaccaagaccagcguggacugcaccauguacaucugcggcgacagcaccgagugcagcaaccugcugcugcaguacggcagcuucugcacccagcugaaccgggcccugaccggcaucgccguggagcaggacaagaacacccaggagguguucgcccaggugaagcagaucuacaagaccccucccaucaaggacuucggcggcuucaacuucagccagauccugcccgaccccagcaagcccagcaagcggagcuucaucgaggaccugcuguucaacaaggugacccuagccgacgccggcuucaucaagcaguacggcgacugccucggcgacauagccgcccgggaccugaucugcgcccagaaguucaacggccugaccgugcugccuccccugcugaccgacgagaugaucgcccaguacaccagcgcccuguuagccggaaccaucaccagcggcuggacuuucggcgcuggagccgcucugcagauccccuucgccaugcagauggccuaccgguucaacggcaucggcgugacccagaacgugcuguacgagaaccagaagcugaucgccaaccaguucaacagcgccaucggcaagauccaggacagccugagcagcaccgcuagcgcccugggcaagcugcaggacguggugaaccagaacgcccaggcccugaacacccuggugaagcagcugagcagcaacuucggcgccaucagcagcgugcugaacgacauccugagccggcuggacaaggucgaggccgaggugcagaucgaccggcugaucacuggccggcugcagagccugcagaccuacgugacccagcagcugauccgggccgccgagauucgggccagcgccaaccuggccgccaccaagaugagcgagugcgugcugggccagagcaagcggguggacuucugcggcaagggcuaccaccugaugagcuuuccccagagcgcaccccacggagugguguuccugcacgugaccuacgugcccgcccaggagaagaacuucaccaccgccccagccaucugccacgacggcaaggcccacuuuccccgggagggcguguucgugagcaacggcacccacugguucgugacccagcggaacuucuacgagccccagaucaucaccaccgacaacaccuucgugagcggcaacugcgacguggugaucggcaucgugaacaacaccguguacgauccccugcagcccgagcuggacagcuucaaggaggagcuggacaaguacuucaagaaucacaccagccccgacguggaccugggcgacaucagcggcaucaacgccagcguggugaacauccagaaggagaucgaucggcugaacgagguggccaagaaccugaacgagagccugaucgaccugcaggagcugggcaaguacgagcaguacaucaaguggcccugguacaucuggcugggcuucaucgccggccugaucgccaucgugauggugaccaucaugcugugcugcaugaccagcugcugcagcugccugaagggcuguugcagcugcggcagcugcugcaaguucgacgaggacgacagcgagcccgugcugaagggcgugaagcugcacuacaccugaggacuaguuauaagacugacuagcccgaugggccucccaacgggcccuccuccccuccuugcaccgagauuaauaaaaaaaaaaaaaaaaaaaaaaaaaaaaaaaaaaaaaaaaaaaaaaaaaaaaaaaaaaaaaaaaaaaaaaaaaaaaaaaaaaaaaaaaaaaaaaaaaaaa

SEQ ID NO: 25440 - RNA, 4011 nt, Artificial Sequence
  SARS-CoV-2/Wuhan/WIV05/2019__EPI_ISL_402128 spike protein mRNA gc (1-1273)(E484K_D614G)
aggagaaagcuuaccauguucguguuccuggugcugcugccccuggugagcagccagugcgugaaccugaccacccggacccagcugccaccagccuacaccaacagcuucacccggggcgucuacuaccccgacaagguguuccggagcagcguccugcacagcacccaggaccuguuccugcccuucuucagcaacgugaccugguuccacgccauccacgugagcggcaccaacggcaccaagcgguucgacaaccccgugcugcccuucaacgacggcguguacuucgccagcaccgagaagagcaacaucauccggggcuggaucuucggcaccacccuggacagcaagacccagagccugcugaucgugaauaacgccaccaacguggugaucaaggugugcgaguuccaguucugcaacgaccccuuccugggcguguacuaccacaagaacaacaagagcuggauggagagcgaguuccggguguacagcagcgccaacaacugcaccuucgaguacgugagccagcccuuccugauggaccuggagggcaagcagggcaacuucaagaaccugcgggaguucguguucaagaacaucgacggcuacuucaagaucuacagcaagcacaccccaaucaaccuggugcgggaucugccccagggcuucucagcccuggagccccugguggaccugcccaucggcaucaacaucacccgguuccagacccugcuggcccugcaccggagcuaccugaccccaggcgacagcagcagcggguggacagcaggcgcggcugcuuacuacgugggcuaccugcagccccggaccuuccugcugaaguacaacgagaacggcaccaucaccgacgccguggacugcgcccuggacccucugagcgagaccaagugcacccugaagagcuucaccguggagaagggcaucuaccagaccagcaacuuccgggugcagcccaccgagagcaucgugcgguuccccaacaucaccaaccugugccccuucggcgagguguucaacgccacccgguucgccagcguguacgccuggaaccggaagcggaucagcaacugcguggccgacuacagcgugcuguacaacagcgccagcuucagcaccuucaagugcuacggcgugagccccaccaagcugaacgaccugugcuucaccaacguguacgccgacagcuucgugauccguggcgacgaggugcggcagaucgcacccggccagacaggcaagaucgccgacuacaacuacaagcugcccgacgacuucaccggcugcgugaucgccuggaacagcaacaaccucgacagcaaggugggcggcaacuacaacuaccuguaccggcuguuccggaagagcaaccugaagcccuucgagcgggacaucagcaccgagaucuaccaagccggcuccaccccuugcaacggcgugaagggcuucaacugcuacuucccucugcagagcuacggcuuccagcccaccaacggcgugggcuaccagcccuaccgggugguggugcugagcuucgagcugcugcacgccccagccaccguguguggccccaagaagagcaccaaccuggugaagaacaagugcgugaacuucaacuucaacggccuuaccggcaccggcgugcugaccgagagcaacaagaaauuccugcccuuucagcaguucggccgggacaucgccgacaccaccgacgcugugcgggauccccagacccuggagauccuggacaucaccccuugcagcuucggcggcgugagcgugaucaccccaggcaccaacaccagcaaccagguggccgugcuguaccagggcgugaacugcaccgaggugcccguggccauccacgccgaccagcugacacccaccuggcgggucuacagcaccggcagcaacguguuccagacccgggccgguugccugaucggcgccgagcacgugaacaacagcuacgagugcgacauccccaucggcgccggcaucugugccagcuaccagacccagaccaauucaccccggagggcaaggagcguggccagccagagcaucaucgccuacaccaugagccugggcgccgagaacagcguggccuacagcaacaacagcaucgccauccccaccaacuucaccaucagcgugaccaccgagauucugcccgugagcaugaccaagaccagcguggacugcaccauguacaucugcggcgacagcaccgagugcagcaaccugcugcugcaguacggcagcuucugcacccagcugaaccgggcccugaccggcaucgccguggagcaggacaagaacacccaggagguguucgcccaggugaagcagaucuacaagaccccucccaucaaggacuucggcggcuucaacuucagccagauccugcccgaccccagcaagcccagcaagcggagcuucaucgaggaccugcuguucaacaaggugacccuagccgacgccggcuucaucaagcaguacggcgacugccucggcgacauagccgcccgggaccugaucugcgcccagaaguucaacggccugaccgugcugccuccccugcugaccgacgagaugaucgcccaguacaccagcgcccuguuagccggaaccaucaccagcggcuggacuuucggcgcuggagccgcucugcagauccccuucgccaugcagauggccuaccgguucaacggcaucggcgugacccagaacgugcuguacgagaaccagaagcugaucgccaaccaguucaacagcgccaucggcaagauccaggacagccugagcagcaccgcuagcgcccugggcaagcugcaggacguggugaaccagaacgcccaggcccugaacacccuggugaagcagcugagcagcaacuucggcgccaucagcagcgugcugaacgacauccugagccggcuggacaaggucgaggccgaggugcagaucgaccggcugaucacuggccggcugcagagccugcagaccuacgugacccagcagcugauccgggccgccgagauucgggccagcgccaaccuggccgccaccaagaugagcgagugcgugcugggccagagcaagcggguggacuucugcggcaagggcuaccaccugaugagcuuuccccagagcgcaccccacggagugguguuccugcacgugaccuacgugcccgcccaggagaagaacuucaccaccgccccagccaucugccacgacggcaaggcccacuuuccccgggagggcguguucgugagcaacggcacccacugguucgugacccagcggaacuucuacgagccccagaucaucaccaccgacaacaccuucgugagcggcaacugcgacguggugaucggcaucgugaacaacaccguguacgauccccugcagcccgagcuggacagcuucaaggaggagcuggacaaguacuucaagaaucacaccagccccgacguggaccugggcgacaucagcggcaucaacgccagcguggugaacauccagaaggagaucgaucggcugaacgagguggccaagaaccugaacgagagccugaucgaccugcaggagcugggcaaguacgagcaguacaucaaguggcccugguacaucuggcugggcuucaucgccggccugaucgccaucgugauggugaccaucaugcugugcugcaugaccagcugcugcagcugccugaagggcuguugcagcugcggcagcugcugcaaguucgacgaggacgacagcgagcccgugcugaagggcgugaagcugcacuacaccugaggacuaguuauaagacugacuagcccgaugggccucccaacgggcccuccuccccuccuugcaccgagauuaauaaaaaaaaaaaaaaaaaaaaaaaaaaaaaaaaaaaaaaaaaaaaaaaaaaaaaaaaaaaaaaaaaaaaaaaaaaaaaaaaaaaaaaaaaaaaaaaaaaaa

SEQ ID NO: 25441 - RNA, 4011 nt, Artificial Sequence
  SARS-CoV-2/Wuhan/WIV05/2019__EPI_ISL_402128 spike protein mRNA gc (1-1273)(L18F_T20N_P26S_D138Y_R190S_K417T_E484K_N501Y_D614G_H655Y _T1027I)
aggagaaagcuuaccauguucguguuccuggugcugcugccccuggugagcagccagugcgugaacuucaccaaccggacccagcugccaagcgccuacaccaacagcuucacccggggcgucuacuaccccgacaagguguuccggagcagcguccugcacagcacccaggaccuguuccugcccuucuucagcaacgugaccugguuccacgccauccacgugagcggcaccaacggcaccaagcgguucgacaaccccgugcugcccuucaacgacggcguguacuucgccagcaccgagaagagcaacaucauccggggcuggaucuucggcaccacccuggacagcaagacccagagccugcugaucgugaauaacgccaccaacguggugaucaaggugugcgaguuccaguucugcaacuaccccuuccugggcguguacuaccacaagaacaacaagagcuggauggagagcgaguuccggguguacagcagcgccaacaacugcaccuucgaguacgugagccagcccuuccugauggaccuggagggcaagcagggcaacuucaagaaccugagcgaguucguguucaagaacaucgacggcuacuucaagaucuacagcaagcacaccccaaucaaccuggugcgggaucugccccagggcuucucagcccuggagccccugguggaccugcccaucggcaucaacaucacccgguuccagacccugcuggcccugcaccggagcuaccugaccccaggcgacagcagcagcggguggacagcaggcgcggcugcuuacuacgugggcuaccugcagccccggaccuuccugcugaaguacaacgagaacggcaccaucaccgacgccguggacugcgcccuggacccucugagcgagaccaagugcacccugaagagcuucaccguggagaagggcaucuaccagaccagcaacuuccgggugcagcccaccgagagcaucgugcgguuccccaacaucaccaaccugugccccuucggcgagguguucaacgccacccgguucgccagcguguacgccuggaaccggaagcggaucagcaacugcguggccgacuacagcgugcuguacaacagcgccagcuucagcaccuucaagugcuacggcgugagccccaccaagcugaacgaccugugcuucaccaacguguacgccgacagcuucgugauccguggcgacgaggugcggcagaucgcacccggccagacaggcaccaucgccgacuacaacuacaagcugcccgacgacuucaccggcugcgugaucgccuggaacagcaacaaccucgacagcaaggugggcggcaacuacaacuaccuguaccggcuguuccggaagagcaaccugaagcccuucgagcgggacaucagcaccgagaucuaccaagccggcuccaccccuugcaacggcgugaagggcuucaacugcuacuucccucugcagagcuacggcuuccagcccaccuacggcgugggcuaccagcccuaccgggugguggugcugagcuucgagcugcugcacgccccagccaccguguguggccccaagaagagcaccaaccuggugaagaacaagugcgugaacuucaacuucaacggccuuaccggcaccggcgugcugaccgagagcaacaagaaauuccugcccuuucagcaguucggccgggacaucgccgacaccaccgacgcugugcgggauccccagacccuggagauccuggacaucaccccuugcagcuucggcggcgugagcgugaucaccccaggcaccaacaccagcaaccagguggccgugcuguaccagggcgugaacugcaccgaggugcccguggccauccacgccgaccagcugacacccaccuggcgggucuacagcaccggcagcaacguguuccagacccgggccgguugccugaucggcgccgaguacgugaacaacagcuacgagugcgacauccccaucggcgccggcaucugugccagcuaccagacccagaccaauucaccccggagggcaaggagcguggccagccagagcaucaucgccuacaccaugagccugggcgccgagaacagcguggccuacagcaacaacagcaucgccauccccaccaacuucaccaucagcgugaccaccgagauucugcccgugagcaugaccaagaccagcguggacugcaccauguacaucugcggcgacagcaccgagugcagcaaccugcugcugcaguacggcagcuucugcacccagcugaaccgggcccugaccggcaucgccguggagcaggacaagaacacccaggagguguucgcccaggugaagcagaucuacaagaccccucccaucaaggacuucggcggcuucaacuucagccagauccugcccgaccccagcaagcccagcaagcggagcuucaucgaggaccugcuguucaacaaggugacccuagccgacgccggcuucaucaagcaguacggcgacugccucggcgacauagccgcccgggaccugaucugcgcccagaaguucaacggccugaccgugcugccuccccugcugaccgacgagaugaucgcccaguacaccagcgcccuguuagccggaaccaucaccagcggcuggacuuucggcgcuggagccgcucugcagauccccuucgccaugcagauggccuaccgguucaacggcaucggcgugacccagaacgugcuguacgagaaccagaagcugaucgccaaccaguucaacagcgccaucggcaagauccaggacagccugagcagcaccgcuagcgcccugggcaagcugcaggacguggugaaccagaacgcccaggcccugaacacccuggugaagcagcugagcagcaacuucggcgccaucagcagcgugcugaacgacauccugagccggcuggacaaggucgaggccgaggugcagaucgaccggcugaucacuggccggcugcagagccugcagaccuacgugacccagcagcugauccgggccgccgagauucgggccagcgccaaccuggccgccaucaagaugagcgagugcgugcugggccagagcaagcggguggacuucugcggcaagggcuaccaccugaugagcuuuccccagagcgcaccccacggagugguguuccugcacgugaccuacgugcccgcccaggagaagaacuucaccaccgccccagccaucugccacgacggcaaggcccacuuuccccgggagggcguguucgugagcaacggcacccacugguucgugacccagcggaacuucuacgagccccagaucaucaccaccgacaacaccuucgugagcggcaacugcgacguggugaucggcaucgugaacaacaccguguacgauccccugcagcccgagcuggacagcuucaaggaggagcuggacaaguacuucaagaaucacaccagccccgacguggaccugggcgacaucagcggcaucaacgccagcguggugaacauccagaaggagaucgaucggcugaacgagguggccaagaaccugaacgagagccugaucgaccugcaggagcugggcaaguacgagcaguacaucaaguggcccugguacaucuggcugggcuucaucgccggccugaucgccaucgugauggugaccaucaugcugugcugcaugaccagcugcugcagcugccugaagggcuguugcagcugcggcagcugcugcaaguucgacgaggacgacagcgagcccgugcugaagggcgugaagcugcacuacaccugaggacuaguuauaagacugacuagcccgaugggccucccaacgggcccuccuccccuccuugcaccgagauuaauaaaaaaaaaaaaaaaaaaaaaaaaaaaaaaaaaaaaaaaaaaaaaaaaaaaaaaaaaaaaaaaaaaaaaaaaaaaaaaaaaaaaaaaaaaaaaaaaaaaa

SEQ ID NO: 25442 - RNA, 4011 nt, Artificial Sequence
  SARS-CoV-2/Wuhan/WIV05/2019__EPI_ISL_402128 spike protein mRNA gc (1-1273)(S13I_W152C_L452R_D614G)
aggagaaagcuuaccauguucguguuccuggugcugcugccccuggugagcauccagugcgugaaccugaccacccggacccagcugccaccagccuacaccaacagcuucacccggggcgucuacuaccccgacaagguguuccggagcagcguccugcacagcacccaggaccuguuccugcccuucuucagcaacgugaccugguuccacgccauccacgugagcggcaccaacggcaccaagcgguucgacaaccccgugcugcccuucaacgacggcguguacuucgccagcaccgagaagagcaacaucauccggggcuggaucuucggcaccacccuggacagcaagacccagagccugcugaucgugaauaacgccaccaacguggugaucaaggugugcgaguuccaguucugcaacgaccccuuccugggcguguacuaccacaagaacaacaagagcugcauggagagcgaguuccggguguacagcagcgccaacaacugcaccuucgaguacgugagccagcccuuccugauggaccuggagggcaagcagggcaacuucaagaaccugcgggaguucguguucaagaacaucgacggcuacuucaagaucuacagcaagcacaccccaaucaaccuggugcgggaucugccccagggcuucucagcccuggagccccugguggaccugcccaucggcaucaacaucacccgguuccagacccugcuggcccugcaccggagcuaccugaccccaggcgacagcagcagcggguggacagcaggcgcggcugcuuacuacgugggcuaccugcagccccggaccuuccugcugaaguacaacgagaacggcaccaucaccgacgccguggacugcgcccuggacccucugagcgagaccaagugcacccugaagagcuucaccguggagaagggcaucuaccagaccagcaacuuccgggugcagcccaccgagagcaucgugcgguuccccaacaucaccaaccugugccccuucggcgagguguucaacgccacccgguucgccagcguguacgccuggaaccggaagcggaucagcaacugcguggccgacuacagcgugcuguacaacagcgccagcuucagcaccuucaagugcuacggcgugagccccaccaagcugaacgaccugugcuucaccaacguguacgccgacagcuucgugauccguggcgacgaggugcggcagaucgcacccggccagacaggcaagaucgccgacuacaacuacaagcugcccgacgacuucaccggcugcgugaucgccuggaacagcaacaaccucgacagcaaggugggcggcaacuacaacuaccgcuaccggcuguuccggaagagcaaccugaagcccuucgagcgggacaucagcaccgagaucuaccaagccggcuccaccccuugcaacggcguggagggcuucaacugcuacuucccucugcagagcuacggcuuccagcccaccaacggcgugggcuaccagcccuaccgggugguggugcugagcuucgagcugcugcacgccccagccaccguguguggccccaagaagagcaccaaccuggugaagaacaagugcgugaacuucaacuucaacggccuuaccggcaccggcgugcugaccgagagcaacaagaaauuccugcccuuucagcaguucggccgggacaucgccgacaccaccgacgcugugcgggauccccagacccuggagauccuggacaucaccccuugcagcuucggcggcgugagcgugaucaccccaggcaccaacaccagcaaccagguggccgugcuguaccagggcgugaacugcaccgaggugcccguggccauccacgccgaccagcugacacccaccuggcgggucuacagcaccggcagcaacguguuccagacccgggccgguugccugaucggcgccgagcacgugaacaacagcuacgagugcgacauccccaucggcgccggcaucugugccagcuaccagacccagaccaauucaccccggagggcaaggagcguggccagccagagcaucaucgccuacaccaugagccugggcgccgagaacagcguggccuacagcaacaacagcaucgccauccccaccaacuucaccaucagcgugaccaccgagauucugcccgugagcaugaccaagaccagcguggacugcaccauguacaucugcggcgacagcaccgagugcagcaaccugcugcugcaguacggcagcuucugcacccagcugaaccgggcccugaccggcaucgccguggagcaggacaagaacacccaggagguguucgcccaggugaagcagaucuacaagaccccucccaucaaggacuucggcggcuucaacuucagccagauccugcccgaccccagcaagcccagcaagcggagcuucaucgaggaccugcuguucaacaaggugacccuagccgacgccggcuucaucaagcaguacggcgacugccucggcgacauagccgcccgggaccugaucugcgcccagaaguucaacggccugaccgugcugccuccccugcugaccgacgagaugaucgcccaguacaccagcgcccuguuagccggaaccaucaccagcggcuggacuuucggcgcuggagccgcucugcagauccccuucgccaugcagauggccuaccgguucaacggcaucggcgugacccagaacgugcuguacgagaaccagaagcugaucgccaaccaguucaacagcgccaucggcaagauccaggacagccugagcagcaccgcuagcgcccugggcaagcugcaggacguggugaaccagaacgcccaggcccugaacacccuggugaagcagcugagcagcaacuucggcgccaucagcagcgugcugaacgacauccugagccggcuggacaaggucgaggccgaggugcagaucgaccggcugaucacuggccggcugcagagccugcagaccuacgugacccagcagcugauccgggccgccgagauucgggccagcgccaaccuggccgccaccaagaugagcgagugcgugcugggccagagcaagcggguggacuucugcggcaagggcuaccaccugaugagcuuuccccagagcgcaccccacggagugguguuccugcacgugaccuacgugcccgcccaggagaagaacuucaccaccgccccagccaucugccacgacggcaaggcccacuuuccccgggagggcguguucgugagcaacggcacccacugguucgugacccagcggaacuucuacgagccccagaucaucaccaccgacaacaccuucgugagcggcaacugcgacguggugaucggcaucgugaacaacaccguguacgauccccugcagcccgagcuggacagcuucaaggaggagcuggacaaguacuucaagaaucacaccagccccgacguggaccugggcgacaucagcggcaucaacgccagcguggugaacauccagaaggagaucgaucggcugaacgagguggccaagaaccugaacgagagccugaucgaccugcaggagcugggcaaguacgagcaguacaucaaguggcccugguacaucuggcugggcuucaucgccggccugaucgccaucgugauggugaccaucaugcugugcugcaugaccagcugcugcagcugccugaagggcuguugcagcugcggcagcugcugcaaguucgacgaggacgacagcgagcccgugcugaagggcgugaagcugcacuacaccugaggacuaguuauaagacugacuagcccgaugggccucccaacgggcccuccuccccuccuugcaccgagauuaauaaaaaaaaaaaaaaaaaaaaaaaaaaaaaaaaaaaaaaaaaaaaaaaaaaaaaaaaaaaaaaaaaaaaaaaaaaaaaaaaaaaaaaaaaaaaaaaaaaaa

SEQ ID NO: 25443 - RNA, 4011 nt, Artificial Sequence
  SARS-CoV-2/Wuhan/WIV05/2019__EPI_ISL_402128 spike protein mRNA gc (1-1273)
aggagaaagcuuaccauguucguguuccuggugcugcugccccuggugagcagccagugcgugaaccugaccacccggacccagcugcccccugccuacaccaacagcuucacccggggcguguacuaccccgacaagguguuccggagcagcgugcugcacagcacccaggaccuguuccugcccuucuucagcaacgugaccugguuccacgccauccacgugagcggcaccaacggcaccaagcgguucgacaacccagugcugcccuucaacgacggcguguacuucgccagcaccgagaagucaaacaucauccggggcuggaucuucggcaccacccuggacagcaagacacagagccugcugaucgugaacaacgccaccaacguggugaucaaggugugcgaguuucaguucugcaacgaccccuuccugggcguguacuaccacaagaacaacaagagcuggauggagagcgaguuccgggucuacagcagcgcuaacaauugcaccuucgaguacgugagccagcccuuccugauggaccucgagggcaagcagggcaacuucaagaaccugcgggaguucguguucaagaacaucgauggcuacuucaagaucuacagcaagcacacccccaucaaccuggugcgggaccugccccagggauucagcgcccuggagccucugguggaccugcccaucggcaucaacaucaccagguuccagacccugcuggcccugcaccggagcuaccugacccccggcgacagcagcagcggcuggaccgccggcgccgccgcauacuacgugggcuaccugcagccacggaccuuccugcugaaguacaacgagaacggcaccaucaccgacgccguggacugcgcccuggacccccugagcgagaccaagugcacccuaaagagcuucaccguggagaagggcaucuaccagaccagcaacuuccgggugcagcccacugagagcaucgugcgguuccccaacauuaccaaccugugucccuucggcgagguguucaacgccacccgguucgccagcguguacgccuggaaccggaagcggaucagcaacugcguggccgacuacagcgugcuguacaacagcgccagcuucagcaccuucaagugcuacggcgugagcccuaccaagcugaacgaccugugcuucaccaacguguacgcugacagcuucgugauccggggcgacgaggugcggcagaucgcccccggccagaccggcaagaucgccgacuacaacuacaagcugcccgacgacuucaccggcugcgugaucgccuggaacagcaacaaccuggacagcaaggugggcggcaacuacaacuaccuguaccggcuguuccguaagagcaaccugaagccauucgagcgggacaucagcaccgagaucuaccaggccggcagcacccccugcaacgguguggagggcuuuaacugcuacuucccccugcagagcuacggcuuccagcccaccaacggcgugggcuaccagcccuaccgggugguggugcugagcuucgagcugcugcacgcccccgccaccgugugcggcccuaaaaagagcaccaaccuggugaagaacaagugcgugaacuucaauuucaacggccugaccggcaccggcgugcugaccgagagcaacaagaaguuccugcccuuccagcaguucggccgggauaucgccgacaccaccgacgcagugcgggacccccagacccuggagauccuggacaucaccccaugcagcuucggcggcgugagcgucaucacccccggcacaaacaccagcaaccagguggccgugcuguaccaggacgugaacugcaccgaggugcccguggccauccacgccgaccagcugacccccaccuggcggguguacagcaccggaagcaacguguuccagacccgggccggcugccugaucggcgccgagcacgugaacaacuccuacgagugcgacauccccaucggcgcuggcaucugcgccagcuaccagacccagaccaacagcccccggcgggcccggagcguggccagccagagcaucaucgccuacaccaugagcuuaggcgccgagaacagcguggccuacagcaacaacagcaucgcgaucccuaccaacuucaccaucagcgugaccaccgagauacugcccgugagcaugaccaagaccagcguggacuguaccauguacaucugcggcgacagcaccgagugcagcaaccugcugcugcaguacggcagcuucugcacccagcugaaccgggcccugaccggcaucgccguggagcaggacaagaacacccaagagguguucgcccaggugaagcagaucuacaagacucccccaaucaaggacuucggcggcuucaacuucagccagauccugcccgaccccagcaagcccagcaagcggagcuucaucgaggaccugcuguucaacaaggugacccuggccgacgccggcuucaucaagcaguacggcgauugccugggcgacaucgccgcucgggaccugaucugcgcccagaaguucaacgggcugaccgugcugcccccucugcugaccgacgagaugaucgcccaguacaccagcgcccugcuugccggcaccaucaccagcggcuggaccuucggcgccggcgcagcccugcagauccccuucgccaugcagauggccuaccgguucaacggcaucggcgugacccagaacgugcuguacgagaaccagaagcugaucgccaaccaguucaacagcgccaucggcaagauccaggacagccugagcagcaccgccagcgcccugggcaagcugcaggacguggugaaccagaacgcucaggcccugaacacccuggugaagcagcugagcagcaacuucggcgccaucagcucagugcugaaugacauccugagcaggcuggacaagguggaggccgaggugcagaucgaccggcugaucaccggccggcugcagagccugcagaccuacgugacccagcagcugauccgggccgccgagauccgggccagcgccaaccuggcagccaccaagaugagcgagugcgugcugggccagagcaagcggguggacuuuugcggcaagggcuaccaccugaugagcuucccccagagcgccccacacggcgugguguuccuccacgucacauacgugcccgcccaggagaagaacuucaccaccgcccccgccauuugccacgacggcaaggcucacuucccccgggagggcguguucgugagcaacggaacccacugguucgugacccagcggaacuucuacgagccccagaucaucaccaccgacaacaccuucgugagcggcaacugcgacguggugaucggcaucgugaacaacaccguguacgacccccugcagccugagcuggacagcuucaaggaggagcuggacaaguacuucaagaaccacaccagccccgauguggaccugggcgacaucagcggcaucaacgccagcguggugaacauccagaaggagaucgaccggcugaacgagguggccaagaaccugaacgagagccugaucgaccugcaggagcugggcaaguacgagcaguacaucaaguggcccugguacaucuggcugggcuucaucgccggccugaucgccaucgugauggugaccaucaugcugugcugcaugaccagcugcuguagcugccugaagggcugcugcagcugcggcagcugcugcaaguucgacgaggacgacagcgagccagugcugaagggcgugaagcugcacuacaccugaggacuaguuauaagacugacuagcccgaugggccucccaacgggcccuccuccccuccuugcaccgagauuaauaaaaaaaaaaaaaaaaaaaaaaaaaaaaaaaaaaaaaaaaaaaaaaaaaaaaaaaaaaaaaaaaaaaaaaaaaaaaaaaaaaaaaaaaaaaaaaaaaaaa

SEQ ID NO: 25444 - RNA, 4011 nt, Artificial Sequence
  SARS-CoV-2/Wuhan/WIV05/2019__EPI_ISL_402128 spike protein mRNA gc (1-1273)(D614G)
aggagaaagcuuaccauguucguguuccuggugcugcugccccuggugagcagccagugcgugaaccugaccacccggacccagcugcccccugccuacaccaacagcuucacccggggcguguacuaccccgacaagguguuccggagcagcgugcugcacagcacccaggaccuguuccugcccuucuucagcaacgugaccugguuccacgccauccacgugagcggcaccaacggcaccaagcgguucgacaacccagugcugcccuucaacgacggcguguacuucgccagcaccgagaagucaaacaucauccggggcuggaucuucggcaccacccuggacagcaagacacagagccugcugaucgugaacaacgccaccaacguggugaucaaggugugcgaguuucaguucugcaacgaccccuuccugggcguguacuaccacaagaacaacaagagcuggauggagagcgaguuccgggucuacagcagcgcuaacaauugcaccuucgaguacgugagccagcccuuccugauggaccucgagggcaagcagggcaacuucaagaaccugcgggaguucguguucaagaacaucgauggcuacuucaagaucuacagcaagcacacccccaucaaccuggugcgggaccugccccagggauucagcgcccuggagccucugguggaccugcccaucggcaucaacaucaccagguuccagacccugcuggcccugcaccggagcuaccugacccccggcgacagcagcagcggcuggaccgccggcgccgccgcauacuacgugggcuaccugcagccacggaccuuccugcugaaguacaacgagaacggcaccaucaccgacgccguggacugcgcccuggacccccugagcgagaccaagugcacccuaaagagcuucaccguggagaagggcaucuaccagaccagcaacuuccgggugcagcccacugagagcaucgugcgguuccccaacauuaccaaccugugucccuucggcgagguguucaacgccacccgguucgccagcguguacgccuggaaccggaagcggaucagcaacugcguggccgacuacagcgugcuguacaacagcgccagcuucagcaccuucaagugcuacggcgugagcccuaccaagcugaacgaccugugcuucaccaacguguacgcugacagcuucgugauccggggcgacgaggugcggcagaucgcccccggccagaccggcaagaucgccgacuacaacuacaagcugcccgacgacuucaccggcugcgugaucgccuggaacagcaacaaccuggacagcaaggugggcggcaacuacaacuaccuguaccggcuguuccguaagagcaaccugaagccauucgagcgggacaucagcaccgagaucuaccaggccggcagcacccccugcaacgguguggagggcuuuaacugcuacuucccccugcagagcuacggcuuccagcccaccaacggcgugggcuaccagcccuaccgggugguggugcugagcuucgagcugcugcacgcccccgccaccgugugcggcccuaaaaagagcaccaaccuggugaagaacaagugcgugaacuucaauuucaacggccugaccggcaccggcgugcugaccgagagcaacaagaaguuccugcccuuccagcaguucggccgggauaucgccgacaccaccgacgcagugcgggacccccagacccuggagauccuggacaucaccccaugcagcuucggcggcgugagcgucaucacccccggcacaaacaccagcaaccagguggccgugcuguaccagggagugaacugcaccgaggugcccguggccauccacgccgaccagcugacccccaccuggcggguguacagcaccggcagcaacguguuccagacccgggccggcugccugaucggcgccgagcacgugaacaacuccuacgagugcgacauccccaucggcgcuggcaucugcgccagcuaccagacccagaccaacagcccccggcgggcccggagcguggccagccagagcaucaucgccuacaccaugagcuuaggcgccgagaacagcguggccuacagcaacaacagcaucgcgaucccuaccaacuucaccaucagcgugaccaccgagauacugcccgugagcaugaccaagaccagcguggacuguaccauguacaucugcggcgacagcaccgagugcagcaaccugcugcugcaguacggcagcuucugcacccagcugaaccgggcccugaccggcaucgccguggagcaggacaagaacacccaagagguguucgcccaggugaagcagaucuacaagacucccccaaucaaggacuucggcggcuucaacuucagccagauccugcccgaccccagcaagcccagcaagcggagcuucaucgaggaccugcuguucaacaaggugacccuggccgacgccggcuucaucaagcaguacggcgacugccugggggauaucgccgcucgggaccugaucugcgcccagaaguucaacggccugaccgugcugcccccucugcugaccgacgagaugaucgcccaguacaccagcgcccugcuugccggcaccaucaccagcggcuggaccuucggcgccggcgcagcccugcagauccccuucgccaugcagauggccuaccgguucaacggcaucggcgugacccagaacgugcuguacgagaaccagaagcugaucgccaaccaguucaacagcgccaucggcaagauccaggacagccugagcagcaccgccagcgcccugggcaagcugcaggacguggugaaccagaacgcucaggcccugaacacccuggugaagcagcugagcagcaacuucggcgccaucagcucagugcugaaugacauccugagcaggcuggacaagguggaggccgaggugcagaucgaccggcugaucaccggccggcugcagagccugcagaccuacgugacccagcagcugauccgggccgccgagauccgggccagcgccaaccuggcagccaccaagaugagcgagugcgugcugggccagagcaagcggguggacuuuugcggcaagggcuaccaccugaugagcuucccccagagcgccccacacggcgugguguuccuccacgucacauacgugcccgcccaggagaagaacuucaccaccgcccccgccauuugccacgacggcaaggcucacuucccccgggagggaguguucgugagcaacggcacccacugguucgugacccagcggaacuucuacgagccccagaucaucaccaccgacaacaccuucgugagcggcaacugcgacguggugaucggcaucgugaacaacaccguguacgacccccugcagccugagcuggacagcuucaaggaggagcuggacaaguacuucaagaaccacaccagccccgacguggaucugggcgacaucagcggcaucaacgccagcguggugaacauccagaaggagaucgaccggcugaacgagguggccaagaaccugaacgagagccugaucgaccugcaggagcugggcaaguacgagcaguacaucaaguggcccugguacaucuggcugggcuucaucgccggccugaucgccaucgugauggugaccaucaugcugugcugcaugaccagcugcuguagcugccugaagggcugcugcagcugcggcagcugcugcaaguucgacgaggacgacagcgagccagugcugaagggcgugaagcugcacuacaccugaggacuaguuauaagacugacuagcccgaugggccucccaacgggcccuccuccccuccuugcaccgagauuaauaaaaaaaaaaaaaaaaaaaaaaaaaaaaaaaaaaaaaaaaaaaaaaaaaaaaaaaaaaaaaaaaaaaaaaaaaaaaaaaaaaaaaaaaaaaaaaaaaaaa

SEQ ID NO: 25445 - RNA, 4011 nt, Artificial Sequence
  SARS-CoV-2/Wuhan/WIV05/2019__EPI_ISL_402128 spike protein mRNA gc (1-1273)(A222V_D614G)
aggagaaagcuuaccauguucguguuccuggugcugcugccccuggugagcagccagugcgugaaccugaccacccggacccagcugcccccugccuacaccaacagcuucacccggggcguguacuaccccgacaagguguuccggagcagcgugcugcacagcacccaggaccuguuccugcccuucuucagcaacgugaccugguuccacgccauccacgugagcggcaccaacggcaccaagcgguucgacaacccagugcugcccuucaacgacggcguguacuucgccagcaccgagaagucaaacaucauccggggcuggaucuucggcaccacccuggacagcaagacacagagccugcugaucgugaacaacgccaccaacguggugaucaaggugugcgaguuucaguucugcaacgaccccuuccugggcguguacuaccacaagaacaacaagagcuggauggagagcgaguuccgggucuacagcagcgcuaacaauugcaccuucgaguacgugagccagcccuuccugauggaccucgagggcaagcagggcaacuucaagaaccugcgggaguucguguucaagaacaucgauggcuacuucaagaucuacagcaagcacacccccaucaaccuggugcgggaccugccccagggauucagcgugcuggagccucugguggaccugcccaucggcaucaacaucaccagguuccagacccugcuggcccugcaccggagcuaccugacccccggcgacagcagcagcggcuggaccgccggcgccgccgccuacuacgugggcuaccugcagccacggaccuuccugcugaaguacaacgagaacggcaccaucaccgacgcaguggacugcgcccuggacccccugagcgagaccaagugcacccuaaagagcuucaccguggagaagggcaucuaccagaccagcaacuuccgggugcagcccacugagagcaucgugcgguuccccaacauuaccaaccugugucccuucggcgagguguucaacgccacccgguucgccagcguguacgccuggaaccggaagcggaucagcaacugcguggccgacuacagcgugcuguacaacagcgccagcuucagcaccuucaagugcuacggcgugagcccuaccaagcugaacgaccugugcuucaccaacguguacgccgacagcuucgugauccggggcgacgaggugcggcagaucgcucccggccagaccggcaagaucgccgacuacaacuacaagcugcccgacgacuucaccggcugcgugaucgccuggaacagcaacaaccuggacagcaaggugggcggcaacuacaacuaccuguaccggcuguuccguaagagcaaccugaagccauucgagcgggacaucagcaccgagaucuaccaggccggcagcacccccugcaacgguguggagggcuuuaacugcuacuucccccugcagagcuacggcuuccagcccaccaacggcgugggcuaccagcccuaccgggugguggugcugagcuucgagcugcugcacgcccccgccaccgugugcggcccuaaaaagagcaccaaccuggugaagaacaagugcgugaacuucaauuucaacggccugaccggcaccggcgugcugaccgagagcaacaagaaguuccugcccuuccagcaguucggccgggauaucgccgacaccaccgacgccgugcgggacccccagacccuggagauccuggacaucaccccaugcagcuucggcggcgucagcgugaucacccccggcacaaacaccagcaaccagguggcagugcuguaccagggagugaacugcaccgaggugcccguggccauccacgccgaccagcugacccccaccuggcggguguacagcaccggcagcaacguguuccagacccgggccggcugccugaucggcgccgagcacgugaacaacuccuacgagugcgacauccccaucggcgccggcaucugcgcuagcuaccagacccagaccaacagcccccggcgggcccggagcguggccagccagagcaucaucgccuacaccaugagcuuaggcgccgagaacagcguggccuacagcaacaacagcaucgccaucccuaccaacuucaccaucagcgugaccaccgagauacugcccgugagcaugaccaagaccagcguggacuguaccauguacaucugcggcgacagcaccgagugcagcaaccugcugcugcaguacggcagcuucugcacccagcugaaccgggcgcugaccggcaucgccguggagcaggacaagaacacccaagagguguucgcccaggugaagcagaucuacaagacucccccaaucaaggacuucggcggcuucaacuucagccagauccugcccgaccccagcaagcccagcaagcggagcuucaucgaggaccugcuguucaacaaggugacccuggccgacgccggcuucaucaagcaguacggcgacugccugggggauaucgccgcccgggaccugaucugcgcucagaaguucaacggccugaccgugcugcccccucugcugaccgacgagaugaucgcccaguacaccagcgcccugcuugccggcaccaucaccagcggcuggaccuucggcgccggcgccgcacugcagauccccuucgccaugcagauggccuaccgguucaacggcaucggcgugacccagaacgugcuguacgagaaccagaagcugaucgccaaccaguucaacagcgccaucggcaagauccaggacagccugagcagcaccgccagcgcccugggcaagcugcaggacguggugaaccagaacgcccaggcucugaacacccuggugaagcagcugagcagcaacuucggcgccaucagcucagugcugaaugacauccugagcaggcuggacaagguggaggccgaggugcagaucgaccggcugaucaccggccggcugcagagccugcagaccuacgugacccagcagcugauccgggccgccgagauccgggccagcgccaaccuggccgcaaccaagaugagcgagugcgugcugggccagagcaagcggguggacuuuugcggcaagggcuaccaccugaugagcuucccccagagcgccccacacggcguggucuuccuccacgugacauacgugcccgcccaggagaagaacuucaccaccgcccccgccauuugccacgacggcaaggcccacuucccccgggagggaguguucgugagcaacggcacccacugguucgugacccagcggaacuucuacgagccccagaucaucaccaccgacaacaccuucgugagcggcaacugcgacguggugaucggcaucgugaacaacaccguguacgacccccugcagccugagcuggacagcuucaaggaggagcuggacaaguacuucaagaaccacaccagccccgacguggaucugggcgacaucagcggcaucaacgcuagcguggugaacauccagaaggagaucgaccggcugaacgagguggccaagaaccugaacgagagccugaucgaccugcaggagcugggcaaguacgagcaguacaucaaguggcccugguacaucuggcugggcuucaucgccggccugaucgccaucgugauggugaccaucaugcugugcugcaugaccagcugcuguagcugccugaagggcugcugcagcugcggcagcugcugcaaguucgacgaggacgacagcgagccagugcugaagggcgugaagcugcacuacaccugaggacuaguuauaagacugacuagcccgaugggccucccaacgggcccuccuccccuccuugcaccgagauuaauaaaaaaaaaaaaaaaaaaaaaaaaaaaaaaaaaaaaaaaaaaaaaaaaaaaaaaaaaaaaaaaaaaaaaaaaaaaaaaaaaaaaaaaaaaaaaaaaaaaa

SEQ ID NO: 25446 - RNA, 4011 nt, Artificial Sequence
  SARS-CoV-2/Wuhan/WIV05/2019__EPI_ISL_402128 spike protein mRNA gc (1-1273)(N439K_D614G)
aggagaaagcuuaccauguucguguuccuggugcugcugccccuggugagcagccagugcgugaaccugaccacccggacccagcugcccccugccuacaccaacagcuucacccggggcguguacuaccccgacaagguguuccggagcagcgugcugcacagcacccaggaccuguuccugcccuucuucagcaacgugaccugguuccacgccauccacgugagcggcaccaacggcaccaagcgguucgacaacccagugcugcccuucaacgacggcguguacuucgccagcaccgagaagucaaacaucauccggggcuggaucuucggcaccacccuggacagcaagacacagagccugcugaucgugaacaacgccaccaacguggugaucaaggugugcgaguuucaguucugcaacgaccccuuccugggcguguacuaccacaagaacaacaagagcuggauggagagcgaguuccgggucuacagcagcgcuaacaauugcaccuucgaguacgugagccagcccuuccugauggaccucgagggcaagcagggcaacuucaagaaccugcgggaguucguguucaagaacaucgauggcuacuucaagaucuacagcaagcacacccccaucaaccuggugcgggaccugccccagggauucagcgcccuggagccucugguggaccugcccaucggcaucaacaucaccagguuccagacccugcuggcccugcaccggagcuaccugacccccggcgacagcagcagcggcuggaccgccggcgccgccgcauacuacgugggcuaccugcagccacggaccuuccugcugaaguacaacgagaacggcaccaucaccgacgccguggacugcgcccuggacccccugagcgagaccaagugcacccuaaagagcuucaccguggagaagggcaucuaccagaccagcaacuuccgggugcagcccacugagagcaucgugcgguuccccaacauuaccaaccugugucccuucggcgagguguucaacgccacccgguucgccagcguguacgccuggaaccggaagcggaucagcaacugcguggccgacuacagcgugcuguacaacagcgccagcuucagcaccuucaagugcuacggcgugagcccuaccaagcugaacgaccugugcuucaccaacguguacgcugacagcuucgugauccggggcgacgaggugcggcagaucgcccccggccagaccggcaagaucgccgacuacaacuacaagcugcccgacgacuucaccggcugcgugaucgccuggaacagcaagaaccuggacagcaaggugggcggcaacuacaacuaccuguaccggcuguuccguaagagcaaccugaagccauucgagcgggacaucagcaccgagaucuaccaggccggcagcacccccugcaacgguguggagggcuuuaacugcuacuucccccugcagagcuacggcuuccagcccaccaacggcgugggcuaccagcccuaccgggugguggugcugagcuucgagcugcugcacgcccccgccaccgugugcggcccuaaaaagagcaccaaccuggugaagaacaagugcgugaacuucaacuucaauggccugaccggcaccggcgugcugaccgagagcaacaagaaguuccugcccuuccagcaguucggccgggauaucgccgacaccaccgacgcagugcgggacccccagacccuggagauccuggacaucaccccaugcagcuucggcggcgugagcgucaucacccccggcacaaacaccagcaaccagguggccgugcuguaccagggagugaacugcaccgaggugcccguggccauccacgccgaccagcugacccccaccuggcggguguacagcaccggcagcaacguguuccagacccgggccggcugccugaucggcgccgagcacgugaacaacuccuacgagugcgacauccccaucggcgcuggcaucugcgccagcuaccagacccagaccaacagcccccggcgggcccggagcguggccagccagagcaucaucgccuacaccaugagcuuaggcgccgagaacagcguggccuacagcaacaacagcaucgcgaucccuaccaacuucaccaucagcgugaccaccgagauacugcccgugagcaugaccaagaccagcguggacuguaccauguacaucugcggcgacagcaccgagugcagcaaccugcugcugcaguacggcagcuucugcacccagcugaaccgggcccugaccggcaucgccguggagcaggacaagaacacccaagagguguucgcccaggugaagcagaucuacaagacucccccaaucaaggacuucggcggcuucaacuucagccagauccugcccgaccccagcaagcccagcaagcggagcuucaucgaggaccugcuguucaacaaggugacccuggccgacgccggcuucaucaagcaguacggcgacugccugggggauaucgccgcucgggaccugaucugcgcccagaaguucaacggccugaccgugcugcccccucugcugaccgacgagaugaucgcccaguacaccagcgcccugcuugccggcaccaucaccagcggcuggaccuucggcgccggcgcagcccugcagauccccuucgccaugcagauggccuaccgguucaacggcaucggcgugacccagaacgugcuguacgagaaccagaagcugaucgccaaccaguucaacagcgccaucggcaagauccaggacagccugagcagcaccgccagcgcccugggcaagcugcaggacguggugaaccagaacgcucaggcccugaacacccuggugaagcagcugagcagcaacuucggcgccaucagcucagugcugaacgacauccugagcaggcuggacaagguggaggccgaggugcagaucgaccggcugaucaccggccggcugcagagccugcagaccuacgugacccagcagcugauccgggccgccgagauccgggccagcgccaaucuggcagccaccaagaugagcgagugcgugcugggccagagcaagcggguggacuuuugcggcaagggcuaccaccugaugagcuucccccagagcgccccacacggcgugguguuccuccacgucacauacgugcccgcccaggagaagaacuucaccaccgcccccgccauuugccacgacggcaaggcucacuucccccgggagggaguguucgugagcaacggcacccacugguucgugacccagcggaacuucuacgagccccagaucaucaccaccgacaacaccuucgugagcggcaacugcgacguggugaucggcaucgugaacaacaccguguacgacccccugcagccugagcuggacagcuucaaggaggagcuggacaaguacuucaagaaccacaccagccccgacguggaucugggcgacaucagcggcaucaacgccagcguggugaacauccagaaggagaucgaccggcugaacgagguggccaagaaccugaacgagagccugaucgaccugcaggagcugggcaaguacgagcaguacaucaaguggcccugguacaucuggcugggcuucaucgccggccugaucgccaucgugauggugaccaucaugcugugcugcaugaccagcugcuguagcugccugaagggcugcugcagcugcggcagcugcugcaaguucgacgaggacgacagcgagccagugcugaagggcgugaagcugcacuacaccugaggacuaguuauaagacugacuagcccgaugggccucccaacgggcccuccuccccuccuugcaccgagauuaauaaaaaaaaaaaaaaaaaaaaaaaaaaaaaaaaaaaaaaaaaaaaaaaaaaaaaaaaaaaaaaaaaaaaaaaaaaaaaaaaaaaaaaaaaaaaaaaaaaaa

SEQ ID NO: 25447 - RNA, 4011 nt, Artificial Sequence
  SARS-CoV-2/Wuhan/WIV05/2019__EPI_ISL_402128 spike protein mRNA gc (1-1273)(S477N_D614G)
aggagaaagcuuaccauguucguguuccuggugcugcugccccuggugagcagccagugcgugaaccugaccacccggacccagcugcccccugccuacaccaacagcuucacccggggcguguacuaccccgacaagguguuccggagcagcgugcugcacagcacccaggaccuguuccugcccuucuucagcaacgugaccugguuccacgccauccacgugagcggcaccaacggcaccaagcgguucgacaacccagugcugcccuucaacgacggcguguacuucgccagcaccgagaagucaaacaucauccggggcuggaucuucggcaccacccuggacagcaagacacagagccugcugaucgugaacaacgccaccaacguggugaucaaggugugcgaguuucaguucugcaacgaccccuuccugggcguguacuaccacaagaacaacaagagcuggauggagagcgaguuccgggucuacagcagcgcuaacaauugcaccuucgaguacgugagccagcccuuccugauggaccucgagggcaagcagggcaacuucaagaaccugcgggaguucguguucaagaacaucgauggcuacuucaagaucuacagcaagcacacccccaucaaccuggugcgggaccugccccagggauucagcgcccuggagccucugguggaccugcccaucggcaucaacaucaccagguuccagacccugcuggcccugcaccggagcuaccugacccccggcgacagcagcagcggcuggaccgccggcgccgccgcauacuacgugggcuaccugcagccacggaccuuccugcugaaguacaacgagaacggcaccaucaccgacgccguggacugcgcccuggacccccugagcgagaccaagugcacccuaaagagcuucaccguggagaagggcaucuaccagaccagcaacuuccgggugcagcccacugagagcaucgugcgguuccccaacauuaccaaccugugucccuucggcgagguguucaacgccacccgguucgccagcguguacgccuggaaccggaagcggaucagcaacugcguggccgacuacagcgugcuguacaacagcgccagcuucagcaccuucaagugcuacggcgugagcccuaccaagcugaacgaccugugcuucaccaacguguacgcugacagcuucgugauccggggcgacgaggugcggcagaucgcccccggccagaccggcaagaucgccgacuacaacuacaagcugcccgacgacuucaccggcugcgugaucgccuggaacagcaacaaccuggacagcaaggugggcggcaacuacaacuaccuguaccggcuguuccguaagagcaaccugaagccauucgagcgggacaucagcaccgagaucuaccaggccggcaacacccccugcaacgguguggagggcuuuaacugcuacuucccccugcagagcuacggcuuccagcccaccaacggcgugggcuaccagcccuaccgggugguggugcugagcuucgagcugcugcacgcccccgccaccgugugcggcccuaaaaagagcaccaaccuggugaagaacaagugcgugaauuucaacuucaacggccugaccggcaccggcgugcugaccgagagcaacaagaaguuccugcccuuccagcaguucggccgggauaucgccgacaccaccgacgcagugcgggacccccagacccuggagauccuggacaucaccccaugcagcuucggcggcgugagcgucaucacccccggcacaaacaccagcaaccagguggccgugcuguaccagggagugaacugcaccgaggugcccguggccauccacgccgaccagcugacccccaccuggcggguguacagcaccggcagcaacguguuccagacccgggccggcugccugaucggcgccgagcacgugaacaacagcuacgagugcgacauccccaucggcgcuggcaucugcgccuccuaccagacccagaccaacagcccccggcgggcccggagcguggccagccagagcaucaucgccuacaccaugagcuuaggcgccgagaacagcguggccuacagcaacaacagcaucgcgaucccuaccaacuucaccaucagcgugaccaccgagauacugcccgugagcaugaccaagaccagcguggacuguaccauguacaucugcggcgacagcaccgagugcagcaaccugcugcugcaguacggcagcuucugcacccagcugaaccgggcccugaccggcaucgccguggagcaggacaagaacacccaagagguguucgcccaggugaagcagaucuacaagacucccccaaucaaggacuucggcggcuucaacuucagccagauccugcccgaccccagcaagcccagcaagcggagcuucaucgaggaccugcuguucaacaaggugacccuggccgacgccggcuucaucaagcaguacggcgacugccugggggauaucgccgcucgggaccugaucugcgcccagaaguucaacggccugaccgugcugcccccucugcugaccgacgagaugaucgcccaguacaccagcgcccugcuugccggcaccaucaccagcggcuggaccuucggcgccggcgcagcccugcagauccccuucgccaugcagauggccuaccgguucaacggcaucggcgugacccagaacgugcuguacgagaaccagaagcugaucgccaaccaguucaacagcgccaucggcaagauccaggacagccugagcagcaccgccagcgcccugggcaagcugcaggacguggugaaccagaacgcucaggcccugaacacccuggugaagcagcugagcagcaauuucggcgccaucagcagcgugcugaacgacauccugucaaggcuggacaagguggaggccgaggugcagaucgaccggcugaucaccggccggcugcagagccugcagaccuacgugacccagcagcugauccgggccgccgagauccgggccagcgccaaccuggcagccaccaagaugagcgagugcgugcugggccagagcaagcggguggacuuuugcggcaagggcuaccaccugaugagcuucccccagagcgccccacacggcgugguguuccuccacgucacauacgugcccgcccaggagaagaacuucaccaccgcccccgccauuugccacgacggcaaggcucacuucccccgggagggaguguucgugagcaacggcacccacugguucgugacccagcggaacuucuacgagccccagaucaucaccaccgacaacaccuucgugagcggcaacugcgacguggugaucggcaucgugaacaacaccguguacgacccccugcagccugagcuggacagcuucaaggaggagcuggacaaguacuucaagaaccacaccagccccgacguggaucugggcgacaucagcggcaucaacgccagcguggugaacauccagaaggagaucgaccggcugaacgagguggccaagaaccugaacgagagccugaucgaccugcaggagcugggcaaguacgagcaguacaucaaguggcccugguacaucuggcugggcuucaucgccggccugaucgccaucgugauggugaccaucaugcugugcugcaugaccagcugcuguagcugccugaagggcugcugcagcugcggcagcugcugcaaguucgacgaggacgacagcgagccagugcugaagggcgugaagcugcacuacaccugaggacuaguuauaagacugacuagcccgaugggccucccaacgggcccuccuccccuccuugcaccgagauuaauaaaaaaaaaaaaaaaaaaaaaaaaaaaaaaaaaaaaaaaaaaaaaaaaaaaaaaaaaaaaaaaaaaaaaaaaaaaaaaaaaaaaaaaaaaaaaaaaaaaa

SEQ ID NO: 25448 - RNA, 4011 nt, Artificial Sequence
  SARS-CoV-2/Wuhan/WIV05/2019__EPI_ISL_402128 spike protein mRNA gc (1-1273)(N501Y_D614G)
aggagaaagcuuaccauguucguguuccuggugcugcugccccuggugagcagccagugcgugaaccugaccacccggacccagcugcccccugccuacaccaacagcuucacccggggcguguacuaccccgacaagguguuccggagcagcgugcugcacagcacccaggaccuguuccugcccuucuucagcaacgugaccugguuccacgccauccacgugagcggcaccaacggcaccaagcgguucgacaacccagugcugcccuucaacgacggcguguacuucgccagcaccgagaagucaaacaucauccggggcuggaucuucggcaccacccuggacagcaagacacagagccugcugaucgugaacaacgccaccaacguggugaucaaggugugcgaguuucaguucugcaacgaccccuuccugggcguguacuaccacaagaacaacaagagcuggauggagagcgaguuccgggucuacagcagcgcuaacaauugcaccuucgaguacgugagccagcccuuccugauggaccucgagggcaagcagggcaacuucaagaaccugcgggaguucguguucaagaacaucgauggcuacuucaagaucuacagcaagcacacccccaucaaccuggugcgggaccugccccagggauucagcgcccuggagccucugguggaccugcccaucggcaucaacaucaccagguuccagacccugcuggcccugcaccggagcuaccugacccccggcgacagcagcagcggcuggaccgccggcgccgccgcauacuacgugggcuaccugcagccacggaccuuccugcugaaguacaacgagaacggcaccaucaccgacgccguggacugcgcccuggacccccugagcgagaccaagugcacccuaaagagcuucaccguggagaagggcaucuaccagaccagcaacuuccgggugcagcccacugagagcaucgugcgguuccccaacauuaccaaccugugucccuucggcgagguguucaacgccacccgguucgccagcguguacgccuggaaccggaagcggaucagcaacugcguggccgacuacagcgugcuguacaacagcgccagcuucagcaccuucaagugcuacggcgugagcccuaccaagcugaacgaccugugcuucaccaacguguacgcugacagcuucgugauccggggcgacgaggugcggcagaucgcccccggccagaccggcaagaucgccgacuacaacuacaagcugcccgacgacuucaccggcugcgugaucgccuggaacagcaacaaccuggacagcaaggugggcggcaacuacaacuaccuguaccggcuguuccguaagagcaaccugaagccauucgagcgggacaucagcaccgagaucuaccaggccggcagcacccccugcaacgguguggagggcuuuaacugcuacuucccccugcagagcuacggcuuccagcccaccuacggcgugggcuaccagcccuaccgggugguggugcugagcuucgagcugcugcacgcccccgccaccgugugcggcccuaaaaagagcaccaaccuggugaagaacaagugcgugaacuucaacuucaauggccugaccggcaccggcgugcugaccgagagcaacaagaaguuccugcccuuccagcaguucggccgggauaucgccgacaccaccgacgcagugcgggacccccagacccuggagauccuggacaucaccccaugcagcuucggcggcgugagcgucaucacccccggcacaaacaccagcaaccagguggccgugcuguaccagggagugaacugcaccgaggugcccguggccauccacgccgaccagcugacccccaccuggcggguguacagcaccggcagcaacguguuccagacccgggccggcugccugaucggcgccgagcacgugaacaacuccuacgagugcgacauccccaucggcgcuggcaucugcgccagcuaccagacccagaccaacagcccccggcgggcccggagcguggccagccagagcaucaucgccuacaccaugagcuuaggcgccgagaacagcguggccuacagcaacaacagcaucgcgaucccuaccaacuucaccaucagcgugaccaccgagauacugcccgugagcaugaccaagaccagcguggacuguaccauguacaucugcggcgacagcaccgagugcagcaaccugcugcugcaguacggcagcuucugcacccagcugaaccgggcccugaccggcaucgccguggagcaggacaagaacacccaagagguguucgcccaggugaagcagaucuacaagacucccccaaucaaggacuucggcggcuucaacuucagccagauccugcccgaccccagcaagcccagcaagcggagcuucaucgaggaccugcuguucaacaaggugacccuggccgacgccggcuucaucaagcaguacggcgacugccugggggauaucgccgcucgggaccugaucugcgcccagaaguucaacggccugaccgugcugcccccucugcugaccgacgagaugaucgcccaguacaccagcgcccugcuugccggcaccaucaccagcggcuggaccuucggcgccggcgcagcccugcagauccccuucgccaugcagauggccuaccgguucaacggcaucggcgugacccagaacgugcuguacgagaaccagaagcugaucgccaaccaguucaacagcgccaucggcaagauccaggacagccugagcagcaccgccagcgcccugggcaagcugcaggacguggugaaccagaacgcucaggcccugaacacccuggugaagcagcugagcagcaacuucggcgccaucagcucagugcugaacgacauccugagcaggcuggacaagguggaggccgaggugcagaucgaccggcugaucaccggccggcugcagagccugcagaccuacgugacccagcagcugauccgggccgccgagauccgggccagcgccaaucuggcagccaccaagaugagcgagugcgugcugggccagagcaagcggguggacuuuugcggcaagggcuaccaccugaugagcuucccccagagcgccccacacggcgugguguuccuccacgucacauacgugcccgcccaggagaagaacuucaccaccgcccccgccauuugccacgacggcaaggcucacuucccccgggagggaguguucgugagcaacggcacccacugguucgugacccagcggaacuucuacgagccccagaucaucaccaccgacaacaccuucgugagcggcaacugcgacguggugaucggcaucgugaacaacaccguguacgacccccugcagccugagcuggacagcuucaaggaggagcuggacaaguacuucaagaaccacaccagccccgacguggaucugggcgacaucagcggcaucaacgccagcguggugaacauccagaaggagaucgaccggcugaacgagguggccaagaaccugaacgagagccugaucgaccugcaggagcugggcaaguacgagcaguacaucaaguggcccugguacaucuggcugggcuucaucgccggccugaucgccaucgugauggugaccaucaugcugugcugcaugaccagcugcuguagcugccugaagggcugcugcagcugcggcagcugcugcaaguucgacgaggacgacagcgagccagugcugaagggcgugaagcugcacuacaccugaggacuaguuauaagacugacuagcccgaugggccucccaacgggcccuccuccccuccuugcaccgagauuaauaaaaaaaaaaaaaaaaaaaaaaaaaaaaaaaaaaaaaaaaaaaaaaaaaaaaaaaaaaaaaaaaaaaaaaaaaaaaaaaaaaaaaaaaaaaaaaaaaaaa

SEQ ID NO: 25449 - RNA, 4005 nt, Artificial Sequence
  SARS-CoV-2/Wuhan/WIV05/2019__EPI_ISL_402128 spike protein mRNA gc (1-1273)(H69del_V70del_D614G)
aggagaaagcuuaccauguucguguuccuggugcugcugccccuggugagcagccagugcgugaaccugaccacccggacccagcugcccccugccuacaccaacagcuucacccggggcguguacuaccccgacaagguguuccggagcagcgugcugcacagcacccaggaccuguuccugcccuucuucagcaacgugaccugguuccacgccaucagcggcaccaacggcaccaagcgguucgacaacccagugcugcccuucaacgacggcguguacuucgccagcaccgagaagucaaacaucauccggggcuggaucuucggcaccacccuggacagcaagacacagagccugcugaucgugaacaacgccaccaacguggugaucaaggugugcgaguuucaguucugcaacgaccccuuccugggcguguacuaccacaagaacaacaagagcuggauggagagcgaguuccggguguacagcagcgcuaacaauugcaccuucgaguacgucagccagcccuuccugauggaccucgagggcaagcagggcaacuucaagaaccugcgggaguucguguucaagaacaucgauggcuacuucaagaucuacagcaagcacacccccaucaaccuggugcgggaccugccccagggauucagcgcccuggagccucugguggaccugcccaucggcaucaacaucaccagguuccagacccugcuggcccugcaccggagcuaccugacccccggcgacagcagcagcggcuggaccgccggcgccgccgcauacuacgugggcuaccugcagccacggaccuuccugcugaaguacaacgagaacggcaccaucaccgacgccguggacugcgcccuggacccccugagcgagaccaagugcacccuaaagagcuucaccguggagaagggcaucuaccagaccagcaacuuccgggugcagcccacugagagcaucgugcgguuccccaacauuaccaaccugugucccuucggcgagguguucaacgccacccgguucgccagcguguacgccuggaaccggaagcggaucagcaacugcguggccgacuacagcgugcuguacaacagcgccagcuucagcaccuucaagugcuacggcgugagcccuaccaagcugaacgaccugugcuucaccaacguguacgcugacagcuucgugauccggggcgacgaggugcggcagaucgcccccggccagaccggcaagaucgccgacuacaacuacaagcugcccgacgacuucaccggcugcgugaucgccuggaacagcaacaaccuggacagcaaggugggcggcaacuacaacuaccuguaccggcuguuccguaagagcaaccugaagccauucgagcgggacaucagcaccgagaucuaccaggccggcagcacccccugcaacgguguggagggcuuuaacugcuacuucccccugcagagcuacggcuuccagcccaccaacggcgugggcuaccagcccuaccgggugguggugcugagcuucgagcugcugcacgcccccgccaccgugugcggcccuaaaaagagcaccaaccuggugaagaacaagugcgugaacuucaauuucaacggccugaccggcaccggcgugcugaccgagagcaacaagaaguuccugcccuuccagcaguucggccgggauaucgccgacaccaccgacgcagugcgggacccccagacccuggagauccuggacaucaccccaugcagcuucggcggcgugagcgugaucacccccggcacaaacaccagcaaccaggucgccgugcuguaccagggagugaacugcaccgaggugcccguggccauccacgccgaccagcugacccccaccuggcggguguacagcaccggcagcaacguguuccagacccgggccggcugccugaucggcgccgagcacgugaacaacuccuacgagugcgacauccccaucggcgcuggcaucugcgccagcuaccagacccagaccaacagcccccggcgggcccggagcguggccagccagagcaucaucgccuacaccaugagcuuaggcgccgagaacagcguggccuacagcaacaacagcaucgcgaucccuaccaacuucaccaucagcgugaccaccgagauacugcccgugagcaugaccaagaccagcguggacuguaccauguacaucugcggcgacagcaccgagugcagcaaccugcugcugcaguacggcagcuucugcacccagcugaaccgggcccugaccggcaucgccguggagcaggacaagaacacccaagagguguucgcccaggugaagcagaucuacaagacucccccaaucaaggacuucggcggcuucaacuucagccagauccugcccgaccccagcaagcccagcaagcggagcuucaucgaggaccugcuguucaacaaggugacccuggccgacgccggcuucaucaagcaguacggcgacugccugggggauaucgccgcucgggaccugaucugcgcccagaaguucaacggccugaccgugcugcccccucugcugaccgacgagaugaucgcccaguacaccagcgcccugcuugccggcaccaucaccagcggcuggaccuucggcgccggcgcagcccugcagauccccuucgccaugcagauggccuaccgguucaacggcaucggcgugacccagaacgugcuguacgagaaccagaagcugaucgccaaccaguucaacagcgccaucggcaagauccaggacagccugagcagcaccgccagcgcccugggcaagcugcaggacguggugaaccagaacgcucaggcccugaacacccuggugaagcagcugagcagcaacuucggcgccaucagcucagugcugaaugacauccugagcaggcuggacaagguggaggccgaggugcagaucgaccggcugaucaccggccggcugcagagccugcagaccuacgugacccagcagcugauccgggccgccgagauccgggccagcgccaaccuggcagccaccaagaugagcgagugcgugcugggccagagcaagcggguggacuuuugcggcaagggcuaccaccugaugagcuucccccagagcgccccacacggcgugguguuccuccacgugacauacguccccgcccaggagaagaacuucaccaccgcccccgccauuugccacgacggcaaggcucacuucccccgggagggaguguucgugagcaacggcacccacugguucgugacccagcggaacuucuacgagccccagaucaucaccaccgacaacaccuucgugagcggcaacugcgacguggugaucggcaucgugaacaacaccguguacgacccccugcagccugagcuggacagcuucaaggaggagcuggacaaguacuucaagaaccacaccagccccgacguggaucugggcgacaucagcggcaucaacgccagcguggugaacauccagaaggagaucgaccggcugaacgagguggccaagaaccugaacgagagccugaucgaccugcaggagcugggcaaguacgagcaguacaucaaguggcccugguacaucuggcugggcuucaucgccggccugaucgccaucgugauggugaccaucaugcugugcugcaugaccagcugcuguagcugccugaagggcugcugcagcugcggcagcugcugcaaguucgacgaggacgacagcgagccagugcugaagggcgugaagcugcacuacaccugaggacuaguuauaagacugacuagcccgaugggccucccaacgggcccuccuccccuccuugcaccgagauuaauaaaaaaaaaaaaaaaaaaaaaaaaaaaaaaaaaaaaaaaaaaaaaaaaaaaaaaaaaaaaaaaaaaaaaaaaaaaaaaaaaaaaaaaaaaaaaaaaaaaa

SEQ ID NO: 25450 - RNA, 4011 nt, Artificial Sequence
  SARS-CoV-2/Wuhan/WIV05/2019__EPI_ISL_402128 spike protein mRNA gc (1-1273)(Y453F_D614G)
aggagaaagcuuaccauguucguguuccuggugcugcugccccuggugagcagccagugcgugaaccugaccacccggacccagcugcccccugccuacaccaacagcuucacccggggcguguacuaccccgacaagguguuccggagcagcgugcugcacagcacccaggaccuguuccugcccuucuucagcaacgugaccugguuccacgccauccacgugagcggcaccaacggcaccaagcgguucgacaacccagugcugcccuucaacgacggcguguacuucgccagcaccgagaagucaaacaucauccggggcuggaucuucggcaccacccuggacagcaagacacagagccugcugaucgugaacaacgccaccaacguggugaucaaggugugcgaguuucaguucugcaacgaccccuuccugggcguguacuaccacaagaacaacaagagcuggauggagagcgaguuccgggucuacagcagcgcuaacaauugcaccuucgaguacgugagccagcccuuccugauggaccucgagggcaagcagggcaacuucaagaaccugcgggaguucguguucaagaacaucgauggcuacuucaagaucuacagcaagcacacccccaucaaccuggugcgggaccugccccagggauucagcgcccuggagccucugguggaccugcccaucggcaucaacaucaccagguuccagacccugcuggcccugcaccggagcuaccugacccccggcgacagcagcagcggcuggaccgccggcgccgccgcauacuacgugggcuaccugcagccacggaccuuccugcugaaguacaacgagaacggcaccaucaccgacgccguggacugcgcccuggacccccugagcgagaccaagugcacccuaaagagcuucaccguggagaagggcaucuaccagaccagcaacuuccgggugcagcccacugagagcaucgugcgguuccccaacauuaccaaccugugucccuucggcgagguguucaacgccacccgguucgccagcguguacgccuggaaccggaagcggaucagcaacugcguggccgacuacagcgugcuguacaacagcgccagcuucagcaccuucaagugcuacggcgugagcccuaccaagcugaacgaccugugcuucaccaacguguacgcugacagcuucgugauccggggcgacgaggugcggcagaucgcccccggccagaccggcaagaucgccgacuacaacuacaagcugcccgacgacuucaccggcugcgugaucgccuggaacagcaacaaccuggacagcaaggugggcggcaacuacaacuaccuguuccggcuguuccguaagagcaaccugaagccauuugagcgggacaucagcaccgagaucuaccaggccggcagcacccccugcaacgguguggagggcuucaacugcuacuucccccugcagagcuacggcuuccagcccaccaacggcgugggcuaccagcccuaccgggugguggugcugagcuucgagcugcugcacgcccccgccaccgugugcggcccuaaaaagagcaccaaccuggugaagaacaagugcgugaacuucaauuucaacggccugaccggcaccggcgugcugaccgagagcaacaagaaguuccugcccuuccagcaguucggccgggauaucgccgacaccaccgacgcagugcgggacccccagacccuggagauccuggacaucaccccaugcagcuucggcggcgugagcgucaucacccccggcacaaacaccagcaaccagguggccgugcuguaccagggagugaacugcaccgaggugcccguggccauccacgccgaccagcugacccccaccuggcggguguacagcaccggcagcaacguguuccagacccgggccggcugccugaucggcgccgagcacgugaacaacuccuacgagugcgacauccccaucggcgcuggcaucugcgccagcuaccagacccagaccaacagcccccggcgggcccggagcguggccagccagagcaucaucgccuacaccaugagcuuaggcgccgagaacagcguggccuacagcaacaacagcaucgcgaucccuaccaacuucaccaucagcgugaccaccgagauacugcccgugagcaugaccaagaccagcguggacuguaccauguacaucugcggcgacagcaccgagugcagcaaccugcugcugcaguacggcagcuucugcacccagcugaaccgggcccugaccggcaucgccguggagcaggacaagaacacccaagagguguucgcccaggugaagcagaucuacaagacucccccaaucaaggacuucggcggcuucaacuucagccagauccugcccgaccccagcaagcccagcaagcggagcuucaucgaggaccugcuguucaacaaggugacccuggccgacgccggcuucaucaagcaguacggcgacugccugggggauaucgccgcucgggaccugaucugcgcccagaaguucaacggccugaccgugcugcccccucugcugaccgacgagaugaucgcccaguacaccagcgcccugcuugccggcaccaucaccagcggcuggaccuucggcgccggcgcagcccugcagauccccuucgccaugcagauggccuaccgguucaacggcaucggcgugacccagaacgugcuguacgagaaccagaagcugaucgccaaccaguucaacagcgccaucggcaagauccaggacagccugagcagcaccgccagcgcccugggcaagcugcaggacguggugaaccagaacgcucaggcccugaacacccuggugaagcagcugagcagcaacuuuggcgccaucagcucagugcugaaugacauccugagcaggcuggacaagguggaggccgaggugcagaucgaccggcugaucaccggccggcugcagagccugcagaccuacgugacccagcagcugauccgggccgccgagauccgggccagcgccaaccuggcagccaccaagaugagcgagugcgugcugggccagagcaagcggguggacuucugcggcaagggcuaccaccugaugagcuucccccagagcgccccacacggcgugguguuccuccacgucacauacgugcccgcccaggagaagaacuucaccaccgcccccgccauuugccacgacggcaaggcucacuucccccgggagggaguguucgugagcaacggcacccacugguucgugacccagcggaacuucuacgagccccagaucaucaccaccgacaacaccuucgugagcggcaacugcgacguggugaucggcaucgugaacaacaccguguacgacccccugcagccugagcuggacagcuucaaggaggagcuggacaaguacuucaagaaccacaccagccccgacguggaucugggcgacaucagcggcaucaacgccagcguggugaacauccagaaggagaucgaccggcugaacgagguggccaagaaccugaacgagagccugaucgaccugcaggagcugggcaaguacgagcaguacaucaaguggcccugguacaucuggcugggcuucaucgccggccugaucgccaucgugauggugaccaucaugcugugcugcaugaccagcugcuguagcugccugaagggcugcugcagcugcggcagcugcugcaaguucgacgaggacgacagcgagccagugcugaagggcgugaagcugcacuacaccugaggacuaguuauaagacugacuagcccgaugggccucccaacgggcccuccuccccuccuugcaccgagauuaauaaaaaaaaaaaaaaaaaaaaaaaaaaaaaaaaaaaaaaaaaaaaaaaaaaaaaaaaaaaaaaaaaaaaaaaaaaaaaaaaaaaaaaaaaaaaaaaaaaaa

SEQ ID NO: 25451 - RNA, 4011 nt, Artificial Sequence
  SARS-CoV-2/Wuhan/WIV05/2019__EPI_ISL_402128 spike protein mRNA gc (1-1273)(D614G_I692V)
aggagaaagcuuaccauguucguguuccuggugcugcugccccuggugagcagccagugcgugaaccugaccacccggacccagcugcccccugccuacaccaacagcuucacccggggcguguacuaccccgacaagguguuccggagcagcgugcugcacagcacccaggaccuguuccugcccuucuucagcaacgugaccugguuccacgccauccacgugagcggcaccaacggcaccaagcgguucgacaacccagugcugcccuucaacgacggcguguacuucgccagcaccgagaagucaaacaucauccggggcuggaucuucggcaccacccuggacagcaagacacagagccugcugaucgugaacaacgccaccaacguggugaucaaggugugcgaguuucaguucugcaacgaccccuuccugggcguguacuaccacaagaacaacaagagcuggauggagagcgaguuccgggucuacagcagcgcuaacaauugcaccuucgaguacgugagccagcccuuccugauggaccucgagggcaagcagggcaacuucaagaaccugcgggaguucguguucaagaacaucgauggcuacuucaagaucuacagcaagcacacccccaucaaccuggugcgggaccugccccagggauucagcgcccuggagccucugguggaccugcccaucggcaucaacaucaccagguuccagacccugcuggcccugcaccggagcuaccugacccccggcgacagcagcagcggcuggaccgccggcgccgccgcauacuacgugggcuaccugcagccacggaccuuccugcugaaguacaacgagaacggcaccaucaccgacgccguggacugcgcccuggacccccugagcgagaccaagugcacccuaaagagcuucaccguggagaagggcaucuaccagaccagcaacuuccgggugcagcccacugagagcaucgugcgguuccccaacauuaccaaccugugucccuucggcgagguguucaacgccacccgguucgccagcguguacgccuggaaccggaagcggaucagcaacugcguggccgacuacagcgugcuguacaacagcgccagcuucagcaccuucaagugcuacggcgugagcccuaccaagcugaacgaccugugcuucaccaacguguacgcugacagcuucgugauccggggcgacgaggugcggcagaucgcccccggccagaccggcaagaucgccgacuacaacuacaagcugcccgacgacuucaccggcugcgugaucgccuggaacagcaacaaccuggacagcaaggugggcggcaacuacaacuaccuguaccggcuguuccguaagagcaaccugaagccauucgagcgggacaucagcaccgagaucuaccaggccggcagcacccccugcaacgguguggagggcuuuaacugcuacuucccccugcagagcuacggcuuccagcccaccaacggcgugggcuaccagcccuaccgggugguggugcugagcuucgagcugcugcacgcccccgccaccgugugcggcccuaaaaagagcaccaaccuggugaagaacaagugcgugaacuucaauuucaacggccugaccggcaccggcgugcugaccgagagcaacaagaaguuccugcccuuccagcaguucggccgggauaucgccgacaccaccgacgcagugcgggacccccagacccuggagauccuggacaucaccccaugcagcuucggcggcgugagcgucaucacccccggcacaaacaccagcaaccagguggccgugcuguaccagggagugaacugcaccgaggugcccguggccauccacgccgaccagcugacccccaccuggcggguguacagcaccggcagcaacguguuccagacccgggccggcugccugaucggcgccgagcacgugaacaacuccuacgagugcgacauccccaucggcgcuggcaucugcgccagcuaccagacccagaccaacagcccccggcgggcccggagcguggccagccagagcgugaucgccuacaccaugagcuuaggcgccgagaacagcguggccuacagcaacaacagcaucgcgaucccuaccaacuucaccaucagcgugaccaccgagauccugcccgugagcaugaccaagaccagcguggacuguaccauguacauaugcggcgacagcaccgagugcagcaaccugcugcugcaguacggcagcuucugcacccagcugaaccgggcccugaccggcaucgccguggagcaggacaagaacacccaagagguguucgcccaggugaagcagaucuacaagacucccccaaucaaggacuucggcggcuucaacuucagccagauccugcccgaccccagcaagcccagcaagcggagcuucaucgaggaccugcuguucaacaaggugacccuggccgacgccggcuucaucaagcaguacggcgacugccugggggauaucgccgcucgggaccugaucugcgcccagaaguucaacggccugaccgugcugcccccucugcugaccgacgagaugaucgcccaguacaccagcgcccugcuugccggcaccaucaccagcggcuggaccuucggcgccggcgcagcccugcagauccccuucgccaugcagauggccuaccgguucaacggcaucggcgugacccagaacgugcuguacgagaaccagaagcugaucgccaaccaguucaacagcgccaucggcaagauccaggacagccugagcagcaccgccagcgcccugggcaagcugcaggacguggugaaccagaacgcucaggcccugaacacccuggugaagcagcugagcagcaacuucggcgccaucagcucagugcugaaugacauccugagcaggcuggacaagguggaggccgaggugcagaucgaccggcugaucaccggccggcugcagagccugcagaccuacgugacccagcagcugauccgggccgccgagauccgggccagcgccaaccuggcagccaccaagaugagcgagugcgugcugggccagagcaagcggguggacuuuugcggcaagggcuaccaccugaugagcuucccccagagcgccccacacggcguggucuuccuccacgugacauacgugcccgcccaggagaagaacuucaccaccgcccccgccaucugccacgacggcaaggcucacuucccccgggagggaguguucgugagcaacggcacccacugguucgugacccagcggaacuucuacgagccccagauuaucaccaccgacaacaccuucgugagcggcaacugcgacguggugaucggcaucgugaacaacaccguguacgacccccugcagccugagcuggacagcuucaaggaggagcuggacaaguacuucaagaaccacaccagccccgacguggaucugggcgacaucagcggcaucaacgccagcguggugaacauccagaaggagaucgaccggcugaacgagguggccaagaaccugaacgagagccugaucgaccugcaggagcugggcaaguacgagcaguacaucaaguggcccugguacaucuggcugggcuucaucgccggccugaucgccaucgugauggugaccaucaugcugugcugcaugaccagcugcuguagcugccugaagggcugcugcagcugcggcagcugcugcaaguucgacgaggacgacagcgagccagugcugaagggcgugaagcugcacuacaccugaggacuaguuauaagacugacuagcccgaugggccucccaacgggcccuccuccccuccuugcaccgagauuaauaaaaaaaaaaaaaaaaaaaaaaaaaaaaaaaaaaaaaaaaaaaaaaaaaaaaaaaaaaaaaaaaaaaaaaaaaaaaaaaaaaaaaaaaaaaaaaaaaaaa

SEQ ID NO: 25452 - RNA, 4011 nt, Artificial Sequence
  SARS-CoV-2/Wuhan/WIV05/2019__EPI_ISL_402128 spike protein mRNA gc (1-1273)(D614G_M1229I)
aggagaaagcuuaccauguucguguuccuggugcugcugccccuggugagcagccagugcgugaaccugaccacccggacccagcugcccccugccuacaccaacagcuucacccggggcguguacuaccccgacaagguguuccggagcagcgugcugcacagcacccaggaccuguuccugcccuucuucagcaacgugaccugguuccacgccauccacgugagcggcaccaacggcaccaagcgguucgacaacccagugcugcccuucaacgacggcguguacuucgccagcaccgagaagucaaacaucauccggggcuggaucuucggcaccacccuggacagcaagacacagagccugcugaucgugaacaacgccaccaacguggugaucaaggugugcgaguuucaguucugcaacgaccccuuccugggcguguacuaccacaagaacaacaagagcuggauggagagcgaguuccgggucuacagcagcgcuaacaauugcaccuucgaguacgugagccagcccuuccugauggaccucgagggcaagcagggcaacuucaagaaccugcgggaguucguguucaagaacaucgauggcuacuucaagaucuacagcaagcacacccccaucaaccuggugcgggaccugccccagggauucagcgcccuggagccucugguggaccugcccaucggcaucaacaucaccagguuccagacccugcuggcccugcaccggagcuaccugacccccggcgacagcagcagcggcuggaccgccggcgccgccgcauacuacgugggcuaccugcagccacggaccuuccugcugaaguacaacgagaacggcaccaucaccgacgccguggacugcgcccuggacccccugagcgagaccaagugcacccuaaagagcuucaccguggagaagggcaucuaccagaccagcaacuuccgggugcagcccacugagagcaucgugcgguuccccaacauuaccaaccugugucccuucggcgagguguucaacgccacccgguucgccagcguguacgccuggaaccggaagcggaucagcaacugcguggccgacuacagcgugcuguacaacagcgccagcuucagcaccuucaagugcuacggcgugagcccuaccaagcugaacgaccugugcuucaccaacguguacgcugacagcuucgugauccggggcgacgaggugcggcagaucgcccccggccagaccggcaagaucgccgacuacaacuacaagcugcccgacgacuucaccggcugcgugaucgccuggaacagcaacaaccuggacagcaaggugggcggcaacuacaacuaccuguaccggcuguuccguaagagcaaccugaagccauucgagcgggacaucagcaccgagaucuaccaggccggcagcacccccugcaacgguguggagggcuuuaacugcuacuucccccugcagagcuacggcuuccagcccaccaacggcgugggcuaccagcccuaccgggugguggugcugagcuucgagcugcugcacgcccccgccaccgugugcggcccuaaaaagagcaccaaccuggugaagaacaagugcgugaacuucaauuucaacggccugaccggcaccggcgugcugaccgagagcaacaagaaguuccugcccuuccagcaguucggccgggauaucgccgacaccaccgacgcagugcgggacccccagacccuggagauccuggacaucaccccaugcagcuucggcggcgugagcgucaucacccccggcacaaacaccagcaaccagguggccgugcuguaccagggagugaacugcaccgaggugcccguggccauccacgccgaccagcugacccccaccuggcggguguacagcaccggcagcaacguguuccagacccgggccggcugccugaucggcgccgagcacgugaacaacuccuacgagugcgacauccccaucggcgcuggcaucugcgccagcuaccagacccagaccaacagcccccggcgggcccggagcguggccagccagagcaucaucgccuacaccaugagcuuaggcgccgagaacagcguggccuacagcaacaacagcaucgcgaucccuaccaacuucaccaucagcgugaccaccgagauacugcccgugagcaugaccaagaccagcguggacuguaccauguacaucugcggcgacagcaccgagugcagcaaccugcugcugcaguacggcagcuucugcacccagcugaaccgggcccugaccggcaucgccguggagcaggacaagaacacccaagagguguucgcccaggugaagcagaucuacaagacucccccaaucaaggacuucggcggcuucaacuucagccagauccugcccgaccccagcaagcccagcaagcggagcuucaucgaggaccugcuguucaacaaggugacccuggccgacgccggcuucaucaagcaguacggcgacugccugggggauaucgccgcucgggaccugaucugcgcccagaaguucaacggccugaccgugcugcccccucugcugaccgacgagaugaucgcccaguacaccagcgcccugcuugccggcaccaucaccagcggcuggaccuucggcgccggcgcagcccugcagauccccuucgccaugcagauggccuaccgguucaacggcaucggcgugacccagaacgugcuguacgagaaccagaagcugaucgccaaccaguucaacagcgccaucggcaagauccaggacagccugagcagcaccgccagcgcccugggcaagcugcaggacguggugaaccagaacgcucaggcccugaacacccuggugaagcagcugagcagcaacuucggcgccaucagcucagugcugaaugacauccugagcaggcuggacaagguggaggccgaggugcagaucgaccggcugaucaccggccggcugcagagccugcagaccuacgugacccagcagcugauccgggccgccgagauccgggccagcgccaaccuggcagccaccaagaugagcgagugcgugcugggccagagcaagcggguggacuuuugcggcaagggcuaccaccugaugagcuucccccagagcgccccacacggcgugguguuccuccacgucacauacgugcccgcccaggagaagaacuucaccaccgcccccgccauuugccacgacggcaaggcucacuucccccgggagggaguguucgugagcaacggcacccacugguucgugacccagcggaacuucuacgagccccagaucaucaccaccgacaacaccuucgugagcggcaacugcgacguggugaucggcaucgugaacaacaccguguacgacccccugcagccugagcuggacagcuucaaggaggagcuggacaaguacuucaagaaccacaccagccccgacguggaucugggcgacaucagcggcaucaacgccagcguggugaacauccagaaggagaucgaccggcugaacgagguggccaagaaccugaacgagagccugaucgaccugcaggagcugggcaaguacgagcaguacaucaaguggcccugguacaucuggcugggcuucaucgccggccugaucgccaucgugaucgugaccaucaugcugugcugcaugaccagcugcuguagcugccugaagggcugcugcagcugcggcagcugcugcaaguucgacgaggacgacagcgagccagugcugaagggcgugaagcugcacuacaccugaggacuaguuauaagacugacuagcccgaugggccucccaacgggcccuccuccccuccuugcaccgagauuaauaaaaaaaaaaaaaaaaaaaaaaaaaaaaaaaaaaaaaaaaaaaaaaaaaaaaaaaaaaaaaaaaaaaaaaaaaaaaaaaaaaaaaaaaaaaaaaaaaaaa

SEQ ID NO: 25453 - RNA, 4005 nt, Artificial Sequence
  SARS-CoV-2/Wuhan/WIV05/2019__EPI_ISL_402128 spike protein mRNA gc (1-1273)(H69del_V70del_A222V_Y453F_S477N_D614G_I692V)
aggagaaagcuuaccauguucguguuccuggugcugcugccccuggugagcagccagugcgugaaccugaccacccggacccagcugcccccugccuacaccaacagcuucacccggggcguguacuaccccgacaagguguuccggagcagcgugcugcacagcacccaggaccuguuccugcccuucuucagcaacgugaccugguuccacgccaucagcggcaccaacggcaccaagcgguucgacaacccagugcugcccuucaacgacggcguguacuucgccagcaccgagaagucaaacaucauccggggcuggaucuucggcaccacccuggacagcaagacacagagccugcugaucgugaacaacgccaccaacguggugaucaaggugugcgaguuucaguucugcaacgaccccuuccugggcguguacuaccacaagaacaacaagagcuggauggagagcgaguuccggguguacagcagcgcuaacaauugcaccuucgaguacgucagccagcccuuccugauggaccucgagggcaagcagggcaacuucaagaaccugcgggaguucguguucaagaacaucgauggcuacuucaagaucuacagcaagcacacccccaucaaccuggugcgggaccugccccagggauucagcgugcuggagccucugguggaccugcccaucggcaucaacaucaccagguuccagacccugcuggcccugcaccggagcuaccugacccccggcgacagcagcagcggcuggaccgccggcgccgccgccuacuacgugggcuaccugcagccacggaccuuccugcugaaguacaacgagaacggcaccaucaccgacgcaguggacugcgcccuggacccccugagcgagaccaagugcacccuaaagagcuucaccguggagaagggcaucuaccagaccagcaacuuccgggugcagcccacugagagcaucgugcgguuccccaacauuaccaaccugugucccuucggcgagguguucaacgccacccgguucgccagcguguacgccuggaaccggaagcggaucagcaacugcguggccgacuacagcgugcuguacaacagcgccagcuucagcaccuucaagugcuacggcgugagcccuaccaagcugaacgaccugugcuucaccaacguguacgccgacagcuucgugauccggggcgacgaggugcggcagaucgcucccggccagaccggcaagaucgccgacuacaacuacaagcugcccgacgacuucaccggcugcgugaucgccuggaacagcaacaaccuggacagcaaggugggcggcaacuacaacuaccuguuccggcuguuccguaagagcaaccugaagccauuugagcgggacaucagcaccgagaucuaccaggccggcaacacccccugcaacgguguggagggcuucaacugcuacuucccccugcagagcuacggcuuccagcccaccaacggcgugggcuaccagcccuaccgggugguggugcugagcuucgagcugcugcacgcccccgccaccgugugcggcccuaaaaagagcaccaaccuggugaagaacaagugcgugaauuucaacuucaacggccugaccggcaccggcgugcugaccgagagcaacaagaaguuccugcccuuccagcaguucggccgggauaucgccgacaccaccgacgccgugcgggacccccagacccuggagauccuggacaucaccccaugcagcuucggcggcgugagcgucaucacccccggcacaaacaccagcaaccagguggcagugcuguaccagggagugaacugcaccgaggugcccguggccauccacgccgaccagcugacccccaccuggcggguguacagcaccggcagcaacguguuccagacccgggccggcugccugaucggcgccgagcacgugaacaacagcuacgagugcgacauccccaucggcgccggcaucugcgcuuccuaccagacccagaccaacagcccccggcgggcccggagcguggccagccagagcgugaucgccuacaccaugagcuuaggcgccgagaacagcguggccuacagcaacaacagcaucgccaucccuaccaacuucaccaucagcgugaccaccgagauccugcccgugagcaugaccaagaccagcguggacuguaccauguacauaugcggcgacagcaccgagugcagcaaccugcugcugcaguacggcagcuucugcacccagcugaaccgggcgcugaccggcaucgccguggagcaggacaagaacacccaagagguguucgcccaggugaagcagaucuacaagacucccccaaucaaggacuucggcggcuucaacuucagccagauccugcccgaccccagcaagcccagcaagcggagcuucaucgaggaccugcuguucaacaaggugacccuggccgacgccggcuucaucaagcaguacggcgacugccugggggauaucgccgcccgggaccugaucugcgcucagaaguucaacggccugaccgugcugcccccucugcugaccgacgagaugaucgcccaguacaccagcgcccugcuugccggcaccaucaccagcggcuggaccuucggcgccggcgccgcacugcagauccccuucgccaugcagauggccuaccgguucaacggcaucggcgugacccagaacgugcuguacgagaaccagaagcugaucgccaaccaguucaacagcgccaucggcaagauccaggacagccugagcagcaccgccagcgcccugggcaagcugcaggacguggugaaccagaacgcccaggcucugaacacccuggugaagcagcugagcagcaauuuuggcgccaucagcagcgugcugaacgacauccugucaaggcuggacaagguggaggccgaggugcagaucgaccggcugaucaccggccggcugcagagccugcagaccuacgugacccagcagcugauccgggccgccgagauccgggccagcgccaaccuggccgcaaccaagaugagcgagugcgugcugggccagagcaagcggguggacuucugcggcaagggcuaccaccugaugagcuucccccagagcgccccacacggcguggucuuccuccacgugacauacgugcccgcccaggagaagaacuucaccaccgcccccgccaucugccacgacggcaaggcccacuucccccgggagggaguguucgugagcaacggcacccacugguucgugacccagcggaacuucuacgagccccagauuaucaccaccgacaacaccuucgugagcggcaacugcgacguggugaucggcaucgugaacaacaccguguacgacccccugcagccugagcuggacagcuucaaggaggagcuggacaaguacuucaagaaccacaccagccccgacguggaucugggcgacaucagcggcaucaacgcuagcguggugaacauccagaaggagaucgaccggcugaacgagguggccaagaaccugaacgagagccugaucgaccugcaggagcugggcaaguacgagcaguacaucaaguggcccugguacaucuggcugggcuucaucgccggccugaucgccaucgugauggugaccaucaugcugugcugcaugaccagcugcuguagcugccugaagggcugcugcagcugcggcagcugcugcaaguucgacgaggacgacagcgagccagugcugaagggcgugaagcugcacuacaccugaggacuaguuauaagacugacuagcccgaugggccucccaacgggcccuccuccccuccuugcaccgagauuaauaaaaaaaaaaaaaaaaaaaaaaaaaaaaaaaaaaaaaaaaaaaaaaaaaaaaaaaaaaaaaaaaaaaaaaaaaaaaaaaaaaaaaaaaaaaaaaaaaaaa

SEQ ID NO: 25454 - RNA, 4005 nt, Artificial Sequence
  SARS-CoV-2/Wuhan/WIV05/2019__EPI_ISL_402128 spike protein mRNA gc (1-1273)(H69del_V70del_Y453F_D614G_I692V_M1229I)
aggagaaagcuuaccauguucguguuccuggugcugcugccccuggugagcagccagugcgugaaccugaccacccggacccagcugcccccugccuacaccaacagcuucacccggggcguguacuaccccgacaagguguuccggagcagcgugcugcacagcacccaggaccuguuccugcccuucuucagcaacgugaccugguuccacgccaucagcggcaccaacggcaccaagcgguucgacaacccagugcugcccuucaacgacggcguguacuucgccagcaccgagaagucaaacaucauccggggcuggaucuucggcaccacccuggacagcaagacacagagccugcugaucgugaacaacgccaccaacguggugaucaaggugugcgaguuucaguucugcaacgaccccuuccugggcguguacuaccacaagaacaacaagagcuggauggagagcgaguuccggguguacagcagcgcuaacaauugcaccuucgaguacgucagccagcccuuccugauggaccucgagggcaagcagggcaacuucaagaaccugcgggaguucguguucaagaacaucgauggcuacuucaagaucuacagcaagcacacccccaucaaccuggugcgggaccugccccagggauucagcgcccuggagccucugguggaccugcccaucggcaucaacaucaccagguuccagacccugcuggcccugcaccggagcuaccugacccccggcgacagcagcagcggcuggaccgccggcgccgccgcauacuacgugggcuaccugcagccacggaccuuccugcugaaguacaacgagaacggcaccaucaccgacgccguggacugcgcccuggacccccugagcgagaccaagugcacccuaaagagcuucaccguggagaagggcaucuaccagaccagcaacuuccgggugcagcccacugagagcaucgugcgguuccccaacauuaccaaccugugucccuucggcgagguguucaacgccacccgguucgccagcguguacgccuggaaccggaagcggaucagcaacugcguggccgacuacagcgugcuguacaacagcgccagcuucagcaccuucaagugcuacggcgugagcccuaccaagcugaacgaccugugcuucaccaacguguacgcugacagcuucgugauccggggcgacgaggugcggcagaucgcccccggccagaccggcaagaucgccgacuacaacuacaagcugcccgacgacuucaccggcugcgugaucgccuggaacagcaacaaccuggacagcaaggugggcggcaacuacaacuaccuguuccggcuguuccguaagagcaaccugaagccauuugagcgggacaucagcaccgagaucuaccaggccggcagcacccccugcaacgguguggagggcuucaacugcuacuucccccugcagagcuacggcuuccagcccaccaacggcgugggcuaccagcccuaccgggugguggugcugagcuucgagcugcugcacgcccccgccaccgugugcggcccuaaaaagagcaccaaccuggugaagaacaagugcgugaacuucaauuucaacggccugaccggcaccggcgugcugaccgagagcaacaagaaguuccugcccuuccagcaguucggccgggauaucgccgacaccaccgacgcagugcgggacccccagacccuggagauccuggacaucaccccaugcagcuucggcggcgugagcgugaucacccccggcacaaacaccagcaaccaggucgccgugcuguaccagggagugaacugcaccgaggugcccguggccauccacgccgaccagcugacccccaccuggcggguguacagcaccggcagcaacguguuccagacccgggccggcugccugaucggcgccgagcacgugaacaacuccuacgagugcgacauccccaucggcgcuggcaucugcgccagcuaccagacccagaccaacagcccccggcgggcccggagcguggccagccagagcgugaucgccuacaccaugagcuuaggcgccgagaacagcguggccuacagcaacaacagcaucgcgaucccuaccaacuucaccaucagcgugaccaccgagauccugcccgugagcaugaccaagaccagcguggacuguaccauguacauaugcggcgacagcaccgagugcagcaaccugcugcugcaguacggcagcuucugcacccagcugaaccgggcccugaccggcaucgccguggagcaggacaagaacacccaagagguguucgcccaggugaagcagaucuacaagacucccccaaucaaggacuucggcggcuucaacuucagccagauccugcccgaccccagcaagcccagcaagcggagcuucaucgaggaccugcuguucaacaaggugacccuggccgacgccggcuucaucaagcaguacggcgacugccugggggauaucgccgcucgggaccugaucugcgcccagaaguucaacggccugaccgugcugcccccucugcugaccgacgagaugaucgcccaguacaccagcgcccugcuugccggcaccaucaccagcggcuggaccuucggcgccggcgcagcccugcagauccccuucgccaugcagauggccuaccgguucaacggcaucggcgugacccagaacgugcuguacgagaaccagaagcugaucgccaaccaguucaacagcgccaucggcaagauccaggacagccugagcagcaccgccagcgcccugggcaagcugcaggacguggugaaccagaacgcucaggcccugaacacccuggugaagcagcugagcagcaacuuuggcgccaucagcucagugcugaaugacauccugagcaggcuggacaagguggaggccgaggugcagaucgaccggcugaucaccggccggcugcagagccugcagaccuacgugacccagcagcugauccgggccgccgagauccgggccagcgccaaccuggcagccaccaagaugagcgagugcgugcugggccagagcaagcggguggacuucugcggcaagggcuaccaccugaugagcuucccccagagcgccccacacggcgugguguuccuccacgucacauacgugcccgcccaggagaagaacuucaccaccgcccccgccaucugccacgacggcaaggcucacuucccccgggagggaguguucgugagcaacggcacccacugguucgugacccagcggaacuucuacgagccccagauuaucaccaccgacaacaccuucgugagcggcaacugcgacguggugaucggcaucgugaacaacaccguguacgacccccugcagccugagcuggacagcuucaaggaggagcuggacaaguacuucaagaaccacaccagccccgacguggaucugggcgacaucagcggcaucaacgccagcguggugaacauccagaaggagaucgaccggcugaacgagguggccaagaaccugaacgagagccugaucgaccugcaggagcugggcaaguacgagcaguacaucaaguggcccugguacaucuggcugggcuucaucgccggccugaucgccaucgugaucgugaccaucaugcugugcugcaugaccagcugcuguagcugccugaagggcugcugcagcugcggcagcugcugcaaguucgacgaggacgacagcgagccagugcugaagggcgugaagcugcacuacaccugaggacuaguuauaagacugacuagcccgaugggccucccaacgggcccuccuccccuccuugcaccgagauuaauaaaaaaaaaaaaaaaaaaaaaaaaaaaaaaaaaaaaaaaaaaaaaaaaaaaaaaaaaaaaaaaaaaaaaaaaaaaaaaaaaaaaaaaaaaaaaaaaaaaa

SEQ ID NO: 25455 - RNA, 4002 nt, Artificial Sequence
  SARS-CoV-2/Wuhan/WIV05/2019__EPI_ISL_402128 spike protein mRNA gc (1-1273)(H69del_V70del_Y144del_N501Y_A570D_D614G_P681H_T716I_S982 A_D1118H)
aggagaaagcuuaccauguucguguuccuggugcugcugccccuggugagcagccagugcgugaaccugaccacccggacccagcugcccccugccuacaccaacagcuucacccggggcguguacuaccccgacaagguguuccggagcagcgugcugcacagcacccaggaccuguuccugcccuucuucagcaacgugaccugguuccacgccaucagcggcaccaacggcaccaagcgguucgacaacccagugcugcccuucaacgacggcguguacuucgccagcaccgagaagucaaacaucauccggggcuggaucuucggcaccacccuggacagcaagacacagagccugcugaucgugaacaacgccaccaacguggugaucaaggugugcgaguuucaguucugcaacgaccccuuccugggcguguaccacaagaacaacaagagcuggauggagagcgaguuccggguguacagcagcgcuaacaauugcaccuucgaguacgucagccagcccuuccugauggaccucgagggcaagcagggcaacuucaagaaccugcgggaguucguguucaagaacaucgauggcuacuucaagaucuacagcaagcacacccccaucaaccuggugcgggaccugccccagggauucagcgcccuggagccucugguggaccugcccaucggcaucaacaucaccagguuccagacccugcuggcccugcaccggagcuaccugacccccggcgacagcagcagcggcuggaccgccggcgccgccgcauacuacgugggcuaccugcagccacggaccuuccugcugaaguacaacgagaacggcaccaucaccgacgccguggacugcgcccuggacccccugagcgagaccaagugcacccuaaagagcuucaccguggagaagggcaucuaccagaccagcaacuuccgggugcagcccacugagagcaucgugcgguuccccaacauuaccaaccugugucccuucggcgagguguucaacgccacccgguucgccagcguguacgccuggaaccggaagcggaucagcaacugcguggccgacuacagcgugcuguacaacagcgccagcuucagcaccuucaagugcuacggcgugagcccuaccaagcugaacgaccugugcuucaccaacguguacgcugacagcuucgugauccggggcgacgaggugcggcagaucgcccccggccagaccggcaagaucgccgacuacaacuacaagcugcccgacgacuucaccggcugcgugaucgccuggaacagcaacaaccuggacagcaaggugggcggcaacuacaacuaccuguaccggcuguuccguaagagcaaccugaagccauucgagcgggacaucagcaccgagaucuaccaggccggcagcacccccugcaacgguguggagggcuuuaacugcuacuucccccugcagagcuacggcuuccagcccaccuacggcgugggcuaccagcccuaccgggugguggugcugagcuucgagcugcugcacgcccccgccaccgugugcggcccuaaaaagagcaccaaccuggugaagaacaagugcgugaacuucaacuucaauggccugaccggcaccggcgugcugaccgagagcaacaagaaguuccugcccuuccagcaguucggccgggauaucgacgacaccaccgacgccgugcgggacccccagacccuggagauccuggacaucaccccaugcagcuucggcggcgugagcgugaucacccccggcacaaacaccagcaaccaggucgcagugcuguaccagggagugaacugcaccgaggugcccguggccauccacgccgaccagcugacccccaccuggcggguguacagcaccggcagcaacguguuccagacccgggccggcugccugaucggcgccgagcacgugaacaacuccuacgagugcgacauccccaucggcgccggcaucugcgcuagcuaccagacccagaccaacagccaccggcgggcccggagcguggccagccagagcaucaucgccuacaccaugagcuuaggcgccgagaacagcguggccuacagcaacaacagcaucgccauccccaucaacuucaccauaagcgugaccaccgagauccugccugugagcaugaccaagaccagcguggacuguaccauguacaucugcggcgacagcaccgagugcagcaaccugcugcugcaguacggcagcuucugcacccagcugaaccgggcgcugaccggcaucgccguggagcaggacaagaacacccaagagguguucgcccaggugaagcagaucuacaagaccccacccaucaaggacuucggcggcuucaacuucagccagauccugcccgaccccagcaagcccagcaagcggagcuucaucgaggaccugcuguucaacaaggugacucuggccgacgccggcuucaucaagcaguacggcgauugccugggggacaucgccgcccgggaccugaucugcgcucagaaguucaacggccugaccgugcugccuccccugcugaccgacgagaugaucgcccaguacaccagcgcccugcuugccggcaccaucaccagcggcuggaccuucggcgccggcgccgcacugcagauccccuucgccaugcagauggccuaccgguucaacggcaucggcgugacccagaacgugcuguacgagaaccagaagcugaucgccaaccaguucaacagcgccaucggcaagauccaggacagccugagcagcaccgccagcgcccugggcaagcugcaggacguggugaaccagaacgcccaggcucugaacacccuggugaagcagcugagcagcaacuucggcgccaucagcucagugcugaacgacauccuggccaggcuggacaagguggaggccgaggugcagaucgaccggcugaucaccggccggcugcagagccugcagaccuacgugacccagcagcugauccgggccgccgagauucgggccagcgccaaucuggcagccaccaagaugagcgagugcgugcugggccagagcaagcggguggacuuuugcggcaagggcuaccaccugaugagcuucccccagagcgcuccccacggcgugguguuccuccacgugaccuacgucccagcccaggagaagaacuucacaaccgcccccgccaucugccacgacggcaaggcccacuucccccgggagggaguguucgugagcaacggcacccacugguucgugacccagcggaacuucuacgagccccagaucaucaccacccacaacaccuucgugagcggcaacugcgacguggugaucggcaucgugaacaacaccguguacgacccccugcagcccgagcuggacagcuucaaggaggagcuggacaaguacuucaagaaccacaccagcccugacguggaucugggcgacaucagcggcaucaacgccagcguggugaacauccagaaggagaucgaccggcugaacgagguggccaagaaccugaacgagagccugaucgaccugcaggagcugggcaaguacgagcaguacaucaaguggcccugguacaucuggcugggcuucaucgccggccugaucgccaucgugauggugaccaucaugcugugcugcaugaccagcugcuguagcugccugaagggcugcugcagcugcggcagcugcugcaaguucgacgaggacgacagcgagcccgugcugaagggcgugaagcugcacuacaccugaggacuaguuauaagacugacuagcccgaugggccucccaacgggcccuccuccccuccuugcaccgagauuaauaaaaaaaaaaaaaaaaaaaaaaaaaaaaaaaaaaaaaaaaaaaaaaaaaaaaaaaaaaaaaaaaaaaaaaaaaaaaaaaaaaaaaaaaaaaaaaaaaaaa

SEQ ID NO: 25456 - RNA, 4011 nt, Artificial Sequence
  SARS-CoV-2/Wuhan/WIV05/2019__EPI_ISL_402128 spike protein mRNA gc (1-1273)(K417N_E484K_N501Y_D614G)
aggagaaagcuuaccauguucguguuccuggugcugcugccccuggugagcagccagugcgugaaccugaccacccggacccagcugcccccugccuacaccaacagcuucacccggggcguguacuaccccgacaagguguuccggagcagcgugcugcacagcacccaggaccuguuccugcccuucuucagcaacgugaccugguuccacgccauccacgugagcggcaccaacggcaccaagcgguucgacaacccagugcugcccuucaacgacggcguguacuucgccagcaccgagaagucaaacaucauccggggcuggaucuucggcaccacccuggacagcaagacacagagccugcugaucgugaacaacgccaccaacguggugaucaaggugugcgaguuucaguucugcaacgaccccuuccugggcguguacuaccacaagaacaacaagagcuggauggagagcgaguuccgggucuacagcagcgcuaacaauugcaccuucgaguacgugagccagcccuuccugauggaccucgagggcaagcagggcaacuucaagaaccugcgggaguucguguucaagaacaucgauggcuacuucaagaucuacagcaagcacacccccaucaaccuggugcgggaccugccccagggauucagcgcccuggagccucugguggaccugcccaucggcaucaacaucaccagguuccagacccugcuggcccugcaccggagcuaccugacccccggcgacagcagcagcggcuggaccgccggcgccgccgcauacuacgugggcuaccugcagccacggaccuuccugcugaaguacaacgagaacggcaccaucaccgacgccguggacugcgcccuggacccccugagcgagaccaagugcacccuaaagagcuucaccguggagaagggcaucuaccagaccagcaacuuccgggugcagcccacugagagcaucgugcgguuccccaacauuaccaaccugugucccuucggcgagguguucaacgccacccgguucgccagcguguacgccuggaaccggaagcggaucagcaacugcguggccgacuacagcgugcuguacaacagcgccagcuucagcaccuucaagugcuacggcgugagcccuaccaagcugaacgaccugugcuucaccaacguguacgcugacagcuucgugauccggggcgacgaggugcggcagaucgcccccggccagaccggcaacaucgccgacuacaacuacaagcugcccgacgacuucaccggcugcgugaucgccuggaacagcaacaaccuggacagcaaggugggcggcaacuacaacuaccuguaccggcuguuccguaagagcaaccugaagccauucgagcgggacaucagcaccgagaucuaccaggccggcagcacccccugcaacggugugaagggcuuuaacugcuacuucccccugcagagcuacggcuuccagcccaccuacggcgugggcuaccagcccuaccgggugguggugcugagcuucgagcugcugcacgcccccgccaccgugugcggcccuaaaaagagcaccaaccuggugaagaacaagugcgugaacuucaauuucaacggccugaccggcaccggcgugcugaccgagagcaacaagaaguuccugcccuuccagcaguucggccgggauaucgccgacaccaccgacgcagugcgggacccccagacccuggagauccuggacaucaccccaugcagcuucggcggcgugagcgucaucacccccggcacaaacaccagcaaccagguggccgugcuguaccagggagugaacugcaccgaggugcccguggccauccacgccgaccagcugacccccaccuggcggguguacagcaccggcagcaacguguuccagacccgggccggcugccugaucggcgccgagcacgugaacaacuccuacgagugcgacauccccaucggcgcuggcaucugcgccagcuaccagacccagaccaacagcccccggcgggcccggagcguggccagccagagcaucaucgccuacaccaugagcuuaggcgccgagaacagcguggccuacagcaacaacagcaucgcgaucccuaccaacuucaccaucagcgugaccaccgagauacugcccgugagcaugaccaagaccagcguggacuguaccauguacaucugcggcgacagcaccgagugcagcaaccugcugcugcaguacggcagcuucugcacccagcugaaccgggcccugaccggcaucgccguggagcaggacaagaacacccaagagguguucgcccaggugaagcagaucuacaagacucccccaaucaaggacuucggcggcuucaacuucagccagauccugcccgaccccagcaagcccagcaagcggagcuucaucgaggaccugcuguucaacaaggugacccuggccgacgccggcuucaucaagcaguacggcgacugccugggggauaucgccgcucgggaccugaucugcgcccagaaguucaacggccugaccgugcugcccccucugcugaccgacgagaugaucgcccaguacaccagcgcccugcuugccggcaccaucaccagcggcuggaccuucggcgccggcgcagcccugcagauccccuucgccaugcagauggccuaccgguucaacggcaucggcgugacccagaacgugcuguacgagaaccagaagcugaucgccaaccaguucaacagcgccaucggcaagauccaggacagccugagcagcaccgccagcgcccugggcaagcugcaggacguggugaaccagaacgcucaggcccugaacacccuggugaagcagcugagcagcaacuucggcgccaucagcucagugcugaaugacauccugagcaggcuggacaagguggaggccgaggugcagaucgaccggcugaucaccggccggcugcagagccugcagaccuacgugacccagcagcugauccgggccgccgagauccgggccagcgccaaccuggcagccaccaagaugagcgagugcgugcugggccagagcaagcggguggacuuuugcggcaagggcuaccaccugaugagcuucccccagagcgccccacacggcgugguguuccuccacgucacauacgugcccgcccaggagaagaacuucaccaccgcccccgccauuugccacgacggcaaggcucacuucccccgggagggaguguucgugagcaacggcacccacugguucgugacccagcggaacuucuacgagccccagaucaucaccaccgacaacaccuucgugagcggcaacugcgacguggugaucggcaucgugaacaacaccguguacgacccccugcagccugagcuggacagcuucaaggaggagcuggacaaguacuucaagaaccacaccagccccgacguggaucugggcgacaucagcggcaucaacgccagcguggugaacauccagaaggagaucgaccggcugaacgagguggccaagaaccugaacgagagccugaucgaccugcaggagcugggcaaguacgagcaguacaucaaguggcccugguacaucuggcugggcuucaucgccggccugaucgccaucgugauggugaccaucaugcugugcugcaugaccagcugcuguagcugccugaagggcugcugcagcugcggcagcugcugcaaguucgacgaggacgacagcgagccagugcugaagggcgugaagcugcacuacaccugaggacuaguuauaagacugacuagcccgaugggccucccaacgggcccuccuccccuccuugcaccgagauuaauaaaaaaaaaaaaaaaaaaaaaaaaaaaaaaaaaaaaaaaaaaaaaaaaaaaaaaaaaaaaaaaaaaaaaaaaaaaaaaaaaaaaaaaaaaaaaaaaaaaa

SEQ ID NO: 25457 - RNA, 4002 nt, Artificial Sequence
  SARS-CoV-2/Wuhan/WIV05/2019__EPI_ISL_402128 spike protein mRNA gc (1-1273)(L18F_D80A_D215G_L242del_A243del_L244del_R246I_K417N_E484 K_N501Y_D614G_A701V)
aggagaaagcuuaccauguucguguuccuggugcugcugccccuggugagcagccagugcgugaacuucaccacccggacccagcugcccccugccuacaccaacagcuucacccggggcguguacuaccccgacaagguguuccggagcagcgugcugcacagcacccaggaccuguuccugcccuucuucagcaacgugaccugguuccacgccauccacgugagcggcaccaacggcaccaagcgguucgccaacccagugcugcccuucaacgacggcguguacuucgccagcaccgagaagucaaacaucauccggggcuggaucuuuggcaccacccuggacagcaagacacagagccugcugaucgugaacaacgcuaccaacguggugaucaaggugugcgaguuccaguucugcaacgaccccuuccugggcguguacuaccacaagaacaacaagagcuggauggagagcgaguuccgggucuacagcagcgccaacaauugcaccuucgaguacgugagccagcccuuccugauggaccuggagggcaagcagggcaacuucaagaaccuccgggaguucguguucaagaacaucgacggcuacuucaagaucuacagcaagcacacccccaucaaccuggugcggggacugccccagggcuucagcgcccuggagccucugguggaucugcccaucggcaucaacaucaccagguuccagacccugcacaucagcuaccugacccccggcgacagcagcagcggcuggaccgccggcgccgccgcauacuacgugggcuaccugcagccacggaccuuccugcugaaguacaacgagaacggcaccaucaccgacgccguggacugcgcccuggacccccugagcgagaccaagugcacccuuaagagcuucaccguggagaagggcaucuaccagaccagcaacuuccgggugcagcccacugagagcauugugcgguuccccaacaucaccaaccugugucccuucggcgagguguucaacgccacccgguucgccagcguguacgccuggaaccggaagcggaucagcaacugcguggccgacuacagcgugcuguacaacagcgccagcuucagcaccuucaagugcuacggcgugagcccuaccaagcugaacgaccugugcuucaccaacguguacgcugacagcuucgugauccggggcgacgaggugcggcagaucgcccccggccagaccggcaacaucgccgacuacaacuacaagcugcccgacgacuucaccggcugcgugaucgccuggaacagcaacaaccuggacagcaaggugggcggcaacuacaacuaccuguaccggcuauuccguaagagcaaccugaagccauuugagcgggacaucagcaccgagaucuaccaggccgguagcacccccugcaacggcgugaagggcuucaacugcuacuucccccugcagagcuacggcuuccagcccaccuacggcgugggcuaccagcccuaccgggugguggugcugagcuucgagcugcugcacgcccccgccaccgugugcggcccuaaaaagagcaccaaccuggugaagaacaagugcgugaacuucaauuucaacggccugaccggcaccggcgugcugaccgagagcaacaagaaguuccugcccuuccagcaguucggccgggacaucgccgacaccaccgaugcagugcgggacccccagacccuggagauccuggacaucaccccaugcagcuucggcggcgugagcgucaucacccccggaacaaacaccagcaaccagguggccgugcuguaccagggcgugaacugcaccgaggugcccguggccauccacgccgaccagcugacccccaccuggcggguguacagcaccggcagcaacguguuccagacccgggccggcugccugaucggcgccgagcacgugaacaacuccuacgagugcgacauccccaucggcgcuggcaucugcgccagcuaccagacccagaccaacagcccccggcgggcccggagcguggccagccagagcaucaucgccuacaccaugagccugggcguggagaacagcguggccuacagcaacaacagcaucgccaucccuaccaacuucaccauaagcgugaccaccgagauccugcccgugagcaugaccaagaccagcguggacuguaccauguacaucugcggcgacagcaccgagugcagcaaccuguuacugcaguacggcagcuucugcacccagcugaaccgggcgcugaccggcaucgccguggagcaggacaagaacacccaagagguguucgcccaggugaagcagaucuacaagacucccccaaucaaggacuucggcggcuucaacuucagccagauccugcccgaccccagcaagcccagcaagcggagcuucaucgaggaccugcuguucaacaaggugacccuggccgacgccggcuucaucaagcaguacggggacugccugggcgacaucgccgcccgggaccugaucugcgcucagaaguucaacggccugaccgugcugcccccucugcugaccgaugagaugaucgcccaguacaccagcgcccugcuggccggcaccaucaccagcggcuggaccuucggcgccggcgccgcacugcagauccccuucgccaugcagauggccuaccgguucaacggcaucggcgugacccagaacgugcuguacgagaaccagaagcugaucgccaaccaguucaacagcgccaucggcaagauccaggacagccugagcagcaccgccagcgcccugggcaagcugcaggacguggugaaccagaacgcccaggcucugaacacccuggugaagcagcugagcagcaacuuuggcgccaucagcucagugcugaaugacauccugagccggcuggacaagguggaggccgaggugcagaucgacaggcugaucaccggccggcugcagagccugcagaccuacgugacccagcagcugauccgggccgccgagauucgggccagcgccaaccuggccgcaaccaagaugagcgagugcgugcugggccagagcaagcggguggacuucugcggcaagggcuaccaccugaugagcuucccccagagcgccccacacggcguggucuuccugcacgugacauacgugcccgcccaggagaagaacuucaccaccgcccccgccaucugccacgacggaaaggcccacuucccccgggagggcguguucgugagcaacggcacccacugguucgugacccagcggaacuucuacgagccccagaucaucaccaccgacaacaccuucgugagcggcaacugcgacguggugaucggcaucgugaacaacaccguguacgacccccugcagccugagcuggacagcuucaaggaggagcucgacaaguacuucaagaaccacaccagccccgacguggaccugggcgacaucagcggcaucaacgcuagcguggugaacauccagaaggagaucgaucggcugaacgagguggccaagaaccugaacgagagccugaucgaccugcaggagcugggcaaguacgagcaguacaucaaguggcccugguacaucuggcugggcuucaucgccggccugaucgccaucgugauggugaccaucaugcugugcugcaugaccagcugcuguagcugccugaagggcugcugcagcugcggcagcugcugcaaguucgacgaggacgacagcgagccagugcugaagggcgugaagcugcacuacaccugaggacuaguuauaagacugacuagcccgaugggccucccaacgggcccuccuccccuccuugcaccgagauuaauaaaaaaaaaaaaaaaaaaaaaaaaaaaaaaaaaaaaaaaaaaaaaaaaaaaaaaaaaaaaaaaaaaaaaaaaaaaaaaaaaaaaaaaaaaaaaaaaaaaa

SEQ ID NO: 25458 - RNA, 4011 nt, Artificial Sequence
  SARS-CoV-2/Wuhan/WIV05/2019__EPI_ISL_402128 spike protein mRNA gc (1-1273)(E484K_D614G)
aggagaaagcuuaccauguucguguuccuggugcugcugccccuggugagcagccagugcgugaaccugaccacccggacccagcugcccccugccuacaccaacagcuucacccggggcguguacuaccccgacaagguguuccggagcagcgugcugcacagcacccaggaccuguuccugcccuucuucagcaacgugaccugguuccacgccauccacgugagcggcaccaacggcaccaagcgguucgacaacccagugcugcccuucaacgacggcguguacuucgccagcaccgagaagucaaacaucauccggggcuggaucuucggcaccacccuggacagcaagacacagagccugcugaucgugaacaacgccaccaacguggugaucaaggugugcgaguuucaguucugcaacgaccccuuccugggcguguacuaccacaagaacaacaagagcuggauggagagcgaguuccgggucuacagcagcgcuaacaauugcaccuucgaguacgugagccagcccuuccugauggaccucgagggcaagcagggcaacuucaagaaccugcgggaguucguguucaagaacaucgauggcuacuucaagaucuacagcaagcacacccccaucaaccuggugcgggaccugccccagggauucagcgcccuggagccucugguggaccugcccaucggcaucaacaucaccagguuccagacccugcuggcccugcaccggagcuaccugacccccggcgacagcagcagcggcuggaccgccggcgccgccgcauacuacgugggcuaccugcagccacggaccuuccugcugaaguacaacgagaacggcaccaucaccgacgccguggacugcgcccuggacccccugagcgagaccaagugcacccuaaagagcuucaccguggagaagggcaucuaccagaccagcaacuuccgggugcagcccacugagagcaucgugcgguuccccaacauuaccaaccugugucccuucggcgagguguucaacgccacccgguucgccagcguguacgccuggaaccggaagcggaucagcaacugcguggccgacuacagcgugcuguacaacagcgccagcuucagcaccuucaagugcuacggcgugagcccuaccaagcugaacgaccugugcuucaccaacguguacgcugacagcuucgugauccggggcgacgaggugcggcagaucgcccccggccagaccggcaagaucgccgacuacaacuacaagcugcccgacgacuucaccggcugcgugaucgccuggaacagcaacaaccuggacagcaaggugggcggcaacuacaacuaccuguaccggcuguuccguaagagcaaccugaagccauucgagcgggacaucagcaccgagaucuaccaggccggcagcacccccugcaacggugugaagggcuuuaacugcuacuucccccugcagagcuacggcuuccagcccaccaacggcgugggcuaccagcccuaccgggugguggugcugagcuucgagcugcugcacgcccccgccaccgugugcggcccuaaaaagagcaccaaccuggugaagaacaagugcgugaacuucaauuucaacggccugaccggcaccggcgugcugaccgagagcaacaagaaguuccugcccuuccagcaguucggccgggauaucgccgacaccaccgacgcagugcgggacccccagacccuggagauccuggacaucaccccaugcagcuucggcggcgugagcgucaucacccccggcacaaacaccagcaaccagguggccgugcuguaccagggagugaacugcaccgaggugcccguggccauccacgccgaccagcugacccccaccuggcggguguacagcaccggcagcaacguguuccagacccgggccggcugccugaucggcgccgagcacgugaacaacuccuacgagugcgacauccccaucggcgcuggcaucugcgccagcuaccagacccagaccaacagcccccggcgggcccggagcguggccagccagagcaucaucgccuacaccaugagcuuaggcgccgagaacagcguggccuacagcaacaacagcaucgcgaucccuaccaacuucaccaucagcgugaccaccgagauacugcccgugagcaugaccaagaccagcguggacuguaccauguacaucugcggcgacagcaccgagugcagcaaccugcugcugcaguacggcagcuucugcacccagcugaaccgggcccugaccggcaucgccguggagcaggacaagaacacccaagagguguucgcccaggugaagcagaucuacaagacucccccaaucaaggacuucggcggcuucaacuucagccagauccugcccgaccccagcaagcccagcaagcggagcuucaucgaggaccugcuguucaacaaggugacccuggccgacgccggcuucaucaagcaguacggcgacugccugggggauaucgccgcucgggaccugaucugcgcccagaaguucaacggccugaccgugcugcccccucugcugaccgacgagaugaucgcccaguacaccagcgcccugcuugccggcaccaucaccagcggcuggaccuucggcgccggcgcagcccugcagauccccuucgccaugcagauggccuaccgguucaacggcaucggcgugacccagaacgugcuguacgagaaccagaagcugaucgccaaccaguucaacagcgccaucggcaagauccaggacagccugagcagcaccgccagcgcccugggcaagcugcaggacguggugaaccagaacgcucaggcccugaacacccuggugaagcagcugagcagcaacuucggcgccaucagcucagugcugaaugacauccugagcaggcuggacaagguggaggccgaggugcagaucgaccggcugaucaccggccggcugcagagccugcagaccuacgugacccagcagcugauccgggccgccgagauccgggccagcgccaaccuggcagccaccaagaugagcgagugcgugcugggccagagcaagcggguggacuuuugcggcaagggcuaccaccugaugagcuucccccagagcgccccacacggcgugguguuccuccacgucacauacgugcccgcccaggagaagaacuucaccaccgcccccgccauuugccacgacggcaaggcucacuucccccgggagggaguguucgugagcaacggcacccacugguucgugacccagcggaacuucuacgagccccagaucaucaccaccgacaacaccuucgugagcggcaacugcgacguggugaucggcaucgugaacaacaccguguacgacccccugcagccugagcuggacagcuucaaggaggagcuggacaaguacuucaagaaccacaccagccccgacguggaucugggcgacaucagcggcaucaacgccagcguggugaacauccagaaggagaucgaccggcugaacgagguggccaagaaccugaacgagagccugaucgaccugcaggagcugggcaaguacgagcaguacaucaaguggcccugguacaucuggcugggcuucaucgccggccugaucgccaucgugauggugaccaucaugcugugcugcaugaccagcugcuguagcugccugaagggcugcugcagcugcggcagcugcugcaaguucgacgaggacgacagcgagccagugcugaagggcgugaagcugcacuacaccugaggacuaguuauaagacugacuagcccgaugggccucccaacgggcccuccuccccuccuugcaccgagauuaauaaaaaaaaaaaaaaaaaaaaaaaaaaaaaaaaaaaaaaaaaaaaaaaaaaaaaaaaaaaaaaaaaaaaaaaaaaaaaaaaaaaaaaaaaaaaaaaaaaaa

SEQ ID NO: 25459 - RNA, 4011 nt, Artificial Sequence
  SARS-CoV-2/Wuhan/WIV05/2019__EPI_ISL_402128 spike protein mRNA gc (1-1273)(L18F_T20N_P26S_D138Y_R190S_K417T_E484K_N501Y_D614G_H655Y _T1027I)
aggagaaagcuuaccauguucguguuccuggugcugcugccccuggugagcagccagugcgugaacuucaccaaccggacccagcugcccagcgccuacaccaacagcuucacccggggcguguacuacccugacaagguguuccggagcagcgugcugcacagcacccaggaccuguuccugcccuucuucagcaacgugaccugguuccacgccauccacgugagcggcaccaacggcaccaagcgguucgacaaccccgugcugccauucaacgacggcguguacuucgccagcaccgagaagucaaacaucauccggggcuggaucuuuggcaccacccuggacagcaagacccagagccugcugaucgugaacaacgccacaaacguggugaucaaggugugcgaguuccaguucugcaacuaccccuuccugggcguguacuaccacaagaacaacaagagcuggauggagagcgaguuccgggucuacagcagcgcuaauaacugcaccuucgaguacgugagccagcccuuccugauggaccuggagggcaagcagggcaacuucaagaaccucagcgaguucguguucaagaacaucgacggcuacuucaagaucuacagcaagcacacccccaucaaccuggugcgggaucugccccagggauucagcgcccuggagccccugguggaccugccuaucggcaucaacaucacccgguuccagacccugcuggcccugcacaggagcuaccugacccccggcgacagcagcagcggcuggaccgccggcgccgccgcauacuacgugggcuaccugcagccccggaccuuccugcugaaguacaacgagaacggcaccaucaccgacgccguggacugcgcccuggacccacugagcgagaccaagugcacccuaaagagcuucaccguggagaagggcaucuaccagaccagcaacuuccgggugcagcccaccgagagcaucgugcgguuccccaacauuacuaaccugugucccuucggcgagguguucaacgccacccgguucgccagcguguacgccuggaaccggaagcggaucagcaacugcguggccgacuacagcgugcuguacaacagcgccagcuucagcaccuucaagugcuacggcgugagccccaccaagcugaacgaccugugcuucaccaacguguacgcugacagcuucgugauccggggcgacgaggugcggcagaucgccccuggccagaccggcaccaucgccgacuacaacuacaagcugcccgacgacuucaccggcugcgugaucgccuggaacagcaacaaccuggacagcaaggugggcggcaacuacaacuaccuguaccggcuguuccguaagagcaaccugaagcccuuugagcgggacaucagcaccgagaucuaccaggccggcagcaccccaugcaacggugugaagggcuucaacugcuacuucccccugcagagcuacggcuuccagcccaccuacggcgugggcuaccagcccuaccgggugguggugcugagcuucgagcugcugcacgcccccgccaccgugugcggccccaaaaagagcaccaaccuggugaagaacaagugcgugaacuucaauuucaacggccugaccggcaccggcgugcugaccgagagcaacaagaaguuccugccuuuccagcaguucggccgggacaucgccgauaccaccgacgcagugcgggacccccagacccuggagauccuggacaucacccccugcagcuucggcggcgugagcgucaucaccccaggcacaaacaccagcaaccagguggccgugcuguaccagggagugaacugcaccgaggugcccguggccauccacgccgaccagcugacccccaccuggcggguguacuccaccggcagcaacguguuccagacccgggccggcugccugaucggcgccgaguacgugaacaacagcuacgagugcgacauccccaucggcgcuggcaucugcgccagcuaccagacccagaccaacagcccccggcgggcccggagcguggccagccagagcaucaucgccuacaccaugagccugggcgccgagaacagcguggccuacagcaacaacagcaucgcgauccccaccaacuucaccaucagcgugaccaccgagauauuaccugugagcaugaccaagaccagcguggacuguaccauguacaucugcggcgacagcaccgagugcagcaaccugcugcugcaguacggcagcuucugcacccagcugaaccgggcccugaccggcaucgccguggagcaggacaagaacacccaagagguguucgcccaggugaagcagaucuacaagacuccacccaucaaggacuucggcggcuucaacuucagccagauccugcccgaccccagcaagcccagcaagcggagcuucaucgaggaccugcuguucaacaaggugacccuggccgacgccggcuucaucaagcaguacggcgacugccugggggacaucgccgcucgggaucugaucugcgcccagaaguucaacggccugaccgugcugccuccccugcugaccgacgagaugaucgcccaguacaccagcgcccugcuggccggcaccaucaccagcggcuggaccuucggcgccggcgcagcccuucagauccccuucgccaugcagauggccuaccgguucaacggcaucggcgugacccagaacgugcuguacgagaaccagaagcugaucgccaaccaguucaacagcgccaucggcaagauccaggacagccugagcagcaccgccagcgcccugggcaagcugcaggacguggugaaccagaacgcucaggcccugaacacccuggugaagcagcugagcucaaacuuuggcgccaucagcagcgugcugaaugacauccugagccggcuggacaagguggaggccgaggugcagaucgacaggcugaucaccggccggcugcagagccugcagaccuacgugacccagcagcugauccgggccgccgagauccgggccagcgccaaccuggcagccauuaagaugagcgagugcgugcugggccagagcaagcggguggacuucugcggcaagggcuaccaccugaugagcuucccccagagcgcuccccacggcgugguguuccugcacgucaccuacgugccagcccaggagaagaacuucacaaccgcccccgccaucugccacgacggcaaggcccacuucccccgggagggaguguucgugagcaacggcacccacugguucgugacccagcggaacuucuacgagccccagaucaucaccaccgacaacaccuucgugagcggcaacugcgacguggugaucggcaucgugaacaacaccguguacgacccccuccagcccgagcuggacagcuucaaggaggagcuggacaaguacuucaagaaccacaccagcccugacguggaccugggcgauaucagcggcaucaacgccagcguggugaacauccagaaggagaucgaccggcugaacgagguggccaagaaccugaacgagagccugaucgaccugcaggagcugggcaaguacgagcaguacaucaaguggcccugguacaucuggcugggcuucaucgccggccugaucgccaucgugauggugaccaucaugcugugcugcaugaccagcugcuguagcugccugaagggcugcugcagcugcggcagcugcugcaaguucgacgaggacgacagcgagcccgugcugaagggcgugaagcugcacuacaccugaggacuaguuauaagacugacuagcccgaugggccucccaacgggcccuccuccccuccuugcaccgagauuaauaaaaaaaaaaaaaaaaaaaaaaaaaaaaaaaaaaaaaaaaaaaaaaaaaaaaaaaaaaaaaaaaaaaaaaaaaaaaaaaaaaaaaaaaaaaaaaaaaaaa

SEQ ID NO: 25460 - RNA, 4011 nt, Artificial Sequence
  SARS-CoV-2/Wuhan/WIV05/2019__EPI_ISL_402128 spike protein mRNA gc (1-1273)(S13I_W152C_L452R_D614G)
aggagaaagcuuaccauguucguguuccuggugcugcugccccuggugagcauccagugcgugaaccugaccacccggacccagcugcccccugccuacaccaacagcuucacccggggcguguacuaccccgacaagguguuccggagcagcgugcugcacagcacccaggaccuguuccugcccuucuucagcaacgugaccugguuccacgccauccacgugagcggcaccaacggcaccaagcgguucgacaacccagugcugcccuucaacgacggcguguacuucgccagcaccgagaagucaaacaucauccggggcuggaucuucggcaccacccuggacagcaagacacagagccugcugaucgugaacaacgccaccaacguggugaucaaggugugcgaguuucaguucugcaacgaccccuuccugggcguguacuaccacaagaacaacaagagcugcauggagagcgaguuccgggucuacagcagcgcuaacaauugcaccuucgaguacgugagccagcccuuccugauggaccucgagggcaagcagggcaacuucaagaaccugcgggaguucguguucaagaacaucgauggcuacuucaagaucuacagcaagcacacccccaucaaccuggugcgggaccugccccagggauucagcgcccuggagccucugguggaccugcccaucggcaucaacaucaccagguuccagacccugcuggcccugcaccggagcuaccugacccccggcgacagcagcagcggcuggaccgccggcgccgccgcauacuacgugggcuaccugcagccacggaccuuccugcugaaguacaacgagaacggcaccaucaccgacgccguggacugcgcccuggacccccugagcgagaccaaguguacccuaaagagcuucaccguggagaagggcaucuaccagaccagcaacuuccgggugcagcccacugagagcauugugcgguuccccaacaucaccaaccugugccccuucggcgagguguucaacgccacccgguucgccagcguguacgccuggaaccggaagcggaucagcaacugcguggccgacuacagcgugcuguacaacagcgccagcuucagcaccuucaagugcuacggcgugagcccuaccaagcugaacgaccugugcuucaccaacguguacgcugacagcuucgugauccggggcgacgaggugcggcagaucgcccccggccagaccggcaagaucgccgacuacaacuacaagcugcccgacgacuucaccggcugcgugaucgccuggaacagcaacaaccuggacagcaaggugggcggcaacuacaacuaccgguaccggcuguuccguaagagcaaccugaagccauucgagcgggacaucagcaccgagaucuaccaggccggcagcacccccugcaacgguguggagggcuuuaacugcuacuucccccugcagagcuacggcuuccagcccaccaacggcgugggcuaccagcccuaccgggugguggugcugagcuucgagcugcugcacgcccccgccaccgugugcggcccuaaaaagagcaccaaccuggugaagaacaagugcgugaacuucaauuucaacggccugaccggcaccggcgugcugaccgagagcaacaagaaguuccugcccuuccagcaguucggccgggauaucgccgacaccaccgacgcagugcgggacccccagacccuggagauccuggacaucaccccaugcagcuucggcggcgugagcgucaucacccccggcacaaacaccagcaaccagguggccgugcuguaccagggagugaacugcaccgaggugcccguggccauccacgccgaccagcugacccccaccuggcggguguacagcaccggcagcaacguguuccagacccgggccggcugccugaucggcgccgagcacgugaacaacagcuacgagugcgacauccccaucggcgcuggcaucugugccuccuaccagacccagaccaacagcccccggcgggcccggagcguggccagccagagcaucaucgccuacaccaugagccugggcgccgagaacagcguggccuacagcaacaacagcaucgcgaucccuaccaacuucaccauaagcgugaccaccgagaucuuacccgugagcaugaccaagaccagcguggacugcaccauguacaucugcggcgacagcaccgagugcagcaaccugcugcugcaguacggcagcuucugcacccagcugaaccgggcccugaccggcaucgccguggagcaggacaagaacacccaagagguguucgcccaggugaagcagaucuacaagacucccccaaucaaggacuucggcggcuucaacuucagccagauccugcccgaccccagcaagcccagcaagcggagcuucaucgaggaccugcuguucaacaaggugacccuggccgacgccggcuucaucaagcaguacggcgacugccugggggauaucgccgcucgggaccugaucugcgcccagaaguucaacggccugaccgugcugcccccucugcugaccgacgagaugaucgcccaguacaccagcgcccugcuggccggcaccaucaccagcggcuggaccuucggcgccggcgcagcccuucagauccccuucgccaugcagauggccuacagguucaacggcaucggcgugacccagaacgugcuguacgagaaccagaagcugaucgccaaccaguucaacagcgccaucggcaagauccaggacagccugagcagcaccgccagcgcccugggcaagcugcaggacguggugaaccagaacgcucaggcccugaacacccuggugaagcagcugagcagcaacuucggcgccaucagcagcgugcugaaugacauccugucacggcuggacaagguggaggccgaggugcagaucgaccggcugaucaccggccggcugcagagccugcagaccuacgugacccagcagcugauccgggccgccgagauucgggccagcgccaaccuggcagccaccaagaugagcgagugcgugcugggccagagcaagcggguggacuuuugcggcaagggcuaccaccugaugagcuucccccagagcgccccacacggcgugguguuccugcacgucacauacgugcccgcccaggagaagaacuucaccaccgcccccgccaucugccacgacggcaaggcucacuucccccgggagggaguguucgugagcaacggcacccacugguucgugacccagcggaacuucuacgagccccagaucaucaccaccgacaacaccuucgugagcggcaacugcgacguggugaucggcaucgugaacaacaccguguacgacccccuccagccugagcuggacagcuucaaggaggagcuggacaaguacuucaagaaccacaccagccccgacguggaucugggcgacaucagcggcaucaacgccagcguggugaacauccagaaggagaucgaccggcugaacgagguggccaagaaccugaacgagagccugaucgaccugcaggagcugggcaaguacgagcaguacaucaaguggcccugguacaucuggcugggcuucaucgccggccugaucgccaucgugauggugaccaucaugcugugcugcaugaccagcuguugcagcugccugaagggcugcugcagcugcggcagcugcugcaaguucgacgaggacgacagcgagccagugcugaagggcgugaagcugcacuacaccugaggacuaguuauaagacugacuagcccgaugggccucccaacgggcccuccuccccuccuugcaccgagauuaauaaaaaaaaaaaaaaaaaaaaaaaaaaaaaaaaaaaaaaaaaaaaaaaaaaaaaaaaaaaaaaaaaaaaaaaaaaaaaaaaaaaaaaaaaaaaaaaaaaaa

SEQ ID NO: 25461 - RNA, 4011 nt, Artificial Sequence
  SARS-CoV-2/Wuhan/WIV05/2019__EPI_ISL_402128 spike protein mRNA gc mod (1-1273)
aggagaaagcuuaccauguucguguuucuggugcugcugccccugguguccagccagugugugaaccugaccaccagaacacagcugccuccagccuacaccaacagcuucaccagaggcguguacuaccccgacaagguguucagauccagcgugcugcacucuacccaggaccuguuccugccuuucuucagcaacgugaccugguuccacgccauccacguguccggcaccaauggcaccaagagauucgacaaccccgugcugcccuucaacgacgggguguacuuugccagcaccgagaaguccaacaucaucagaggcuggaucuucggcaccacacuggacagcaagacccagagccugcugaucgugaacaacgccaccaacguggucaucaaagugugcgaguuccaguucugcaacgaccccuuccugggcgucuacuaccacaagaacaacaagagcuggauggaaagcgaguuccggguguacagcagcgccaacaacugcaccuucgaguacgugucccagccuuuccugauggaccuggaaggcaagcagggcaacuucaagaaccugcgcgaguucguguucaagaacaucgacggcuacuucaaaaucuacagcaagcacaccccuaucaaccucgugcgggaucugccucagggcuucucugcucuggaaccccugguggaucugcccaucggcaucaacaucacccgguuucagacacugcuggcccugcacagaagcuaccugacaccuggcgauagcagcagcggauggacagcuggugccgccgcuuacuaugugggcuaccugcagccuagaaccuuccugcugaaguacaacgagaacggcaccaucaccgacgccguggauugugcucuggauccucugagcgagacaaagugcacccugaaguccuucaccguggaaaagggcaucuaccagaccagcaacuuccgggugcagcccaccgaauccaucgugcgguuccccaauaucaccaaucugugccccuucggcgagguguucaaugccaccagauucgccucuguguacgccuggaaccggaagcggaucagcaauugcguggccgacuacuccgugcuguacaacuccgccagcuucagcaccuucaagugcuacggcguguccccuaccaagcugaacgaccugugcuucacaaacguguacgccgacagcuucgugauccggggagaugaagugcggcagauugccccuggacagacaggcaagaucgccgacuacaacuacaagcugcccgacgacuucaccggcugugugauugccuggaacagcaacaaccuggacuccaaagucggcggcaacuacaauuaccuguaccggcuguuccggaaguccaaucugaagcccuucgagcgggacaucagcaccgaaaucuaucaggccggcagcaccccuugcaacggcguggaaggcuucaacugcuacuucccacugcaguccuacggcuuucagcccacaaauggcgugggcuaucagcccuacagagugguggugcugagcuucgaacugcugcaugcuccugccacagugugcggcccuaagaaaagcaccaaucucgugaagaacaaaugcgugaacuucaacuucaacggccugaccggcaccggcgugcugacagagagcaacaagaaguuccugccauuccagcaguuuggccgggauaucgccgauaccacagacgccguuagagauccccagacacuggaaauccuggacaucaccccaugcagcuucggcggagugucugugaucaccccuggcaccaacaccagcaaucagguggcagugcuguaccaggacgugaacuguaccgaagugcccguggccauucacgccgaucagcugacaccuacauggcggguguacuccaccggcagcaauguguuucagaccagagccggcugucugaucggagccgagcacgugaacaauagcuacgagugcgacauccccaucggcgcuggcaucugugccagcuaccagacacagacaaacagccccagacgggcuagaagcguggccagccagagcaucauugccuacacaaugucucugggcgccgagaacagcguggccuacuccaacaacucuaucgcuauccccaccaacuucaccaucagcgugaccaccgagauccugccuguguccaugaccaagaccagcguggacugcaccauguacaucugcggcgauuccaccgagugcuccaaccugcugcugcaguacggcagcuucugcacccagcugaauagagcccugacagggaucgccguggaacaggacaagaacacccaagagguguucgcccaagugaagcaaaucuacaagaccccuccuaucaaggacuucggcggcuucaauuucagccagauucugcccgauccuagcaagcccagcaagcggagcuucaucgaggaccugcuguucaacaaagugacacuggccgacgccggcuucaucaagcaguauggcgauugucugggcgacauugccgccagggaucugauuugcgcccagaaguuuaacggacugacagugcugccuccucugcugaccgaugagaugaucgcccaguacacaucugcccugcuggccggcacaaucacaagcggcuggacauuuggagcuggcgccgcucugcagauccccuuugcuaugcagauggccuaccgguucaacggcaucggagugacccagaaugugcuguacgagaaccagaagcugaucgccaaccaguucaacagcgccaucggcaagauccaggacagccugagcagcacagcaagcgcccugggaaagcugcaggacguggucaaccagaaugcccaggcacugaacacccuggucaagcagcuguccuccaacuucggcgccaucagcucugugcugaacgauauccugagcagacuggacaaggucgaggccgaggugcagaucgacagacugaucacaggcagacugcagagccuccagacauacgugacccagcagcugaucagagccgccgagauuagagccucugccaaucuggccgccaccaagaugucugagugugugcugggccagagcaagagaguggacuuuugcggcaagggcuaccaccugaugagcuucccucagucugccccucacggcgugguguuucugcacgugacauaugugcccgcucaagagaagaauuucaccaccgcuccagccaucugccacgacggcaaagcccacuuuccuagagaaggcguguucguguccaacggcacccauugguucgugacacagcggaacuucuacgagccccagaucaucaccaccgacaacaccuucgugucuggcaacugcgacguugugaucggcauugugaacaauaccguguacgacccucugcagcccgagcuggacagcuucaaagaggaacuggacaaguacuuuaagaaccacacaagccccgacguggaccugggcgauaucagcggaaucaaugccagcgucgugaacauccagaaagagaucgaccggcugaacgagguggccaagaaucugaacgagagccugaucgaccugcaagaacuggggaaguacgagcaguacaucaaguggcccugguacaucuggcugggcuuuaucgccggacugauugccaucgugauggucacaaucaugcuguguugcaugaccagcugcuguagcugccugaagggcuguuguagcuguggcagcugcugcaaguucgacgaggacgauucugagcccgugcugaagggcgugaaacugcacuacaccugaggacuaguuauaagacugacuagcccgaugggccucccaacgggcccuccuccccuccuugcaccgagauuaauaaaaaaaaaaaaaaaaaaaaaaaaaaaaaaaaaaaaaaaaaaaaaaaaaaaaaaaaaaaaaaaaaaaaaaaaaaaaaaaaaaaaaaaaaaaaaaaaaaaa

SEQ ID NO: 25462 - RNA, 4011 nt, Artificial Sequence
  SARS-CoV-2/Wuhan/WIV05/2019__EPI_ISL_402128 spike protein mRNA gc mod (1-1273)(D614G)
aggagaaagcuuaccauguucguguuucuggugcugcugccccugguguccagccagugugugaaccugaccaccagaacacagcugccuccagccuacaccaacagcuucaccagaggcguguacuaccccgacaagguguucagauccagcgugcugcacucuacccaggaccuguuccugccuuucuucagcaacgugaccugguuccacgccauccacguguccggcaccaauggcaccaagagauucgacaaccccgugcugcccuucaacgacgggguguacuuugccagcaccgagaaguccaacaucaucagaggcuggaucuucggcaccacacuggacagcaagacccagagccugcugaucgugaacaacgccaccaacguggucaucaaagugugcgaguuccaguucugcaacgaccccuuccugggcgucuacuaccacaagaacaacaagagcuggauggaaagcgaguuccggguguacagcagcgccaacaacugcaccuucgaguacgugucccagccuuuccugauggaccuggaaggcaagcagggcaacuucaagaaccugcgcgaguucguguucaagaacaucgacggcuacuucaaaaucuacagcaagcacaccccuaucaaccucgugcgggaucugccucagggcuucucugcucuggaaccccugguggaucugcccaucggcaucaacaucacccgguuucagacacugcuggcccugcacagaagcuaccugacaccuggcgauagcagcagcggauggacagcuggugccgccgcuuacuaugugggcuaccugcagccuagaaccuuccugcugaaguacaacgagaacggcaccaucaccgacgccguggauugugcucuggauccucugagcgagacaaagugcacccugaaguccuucaccguggaaaagggcaucuaccagaccagcaacuuccgggugcagcccaccgaauccaucgugcgguuccccaauaucaccaaucugugccccuucggcgagguguucaaugccaccagauucgccucuguguacgccuggaaccggaagcggaucagcaauugcguggccgacuacuccgugcuguacaacuccgccagcuucagcaccuucaagugcuacggcguguccccuaccaagcugaacgaccugugcuucacaaacguguacgccgacagcuucgugauccggggagaugaagugcggcagauugccccuggacagacaggcaagaucgccgacuacaacuacaagcugcccgacgacuucaccggcugugugauugccuggaacagcaacaaccuggacuccaaagucggcggcaacuacaauuaccuguaccggcuguuccggaaguccaaucugaagcccuucgagcgggacaucagcaccgaaaucuaucaggccggcagcaccccuugcaacggcguggaaggcuucaacugcuacuucccacugcaguccuacggcuuucagcccacaaauggcgugggcuaucagcccuacagagugguggugcugagcuucgaacugcugcaugcuccugccacagugugcggcccuaagaaaagcaccaaucucgugaagaacaaaugcgugaacuucaacuucaacggccugaccggcaccggcgugcugacagagagcaacaagaaguuccugccauuccagcaguuuggccgggauaucgccgauaccacagacgccguuagagauccccagacacuggaaauccuggacaucaccccaugcagcuucggcggagugucugugaucaccccuggcaccaacaccagcaaucagguggcagugcuguaccagggcgugaacuguaccgaagugcccguggccauucacgccgaucagcugacaccuacauggcggguguacuccaccggcagcaauguguuucagaccagagccggcugucugaucggagccgagcacgugaacaauagcuacgagugcgacauccccaucggcgcuggcaucugugccagcuaccagacacagacaaacagccccagacgggcuagaagcguggccagccagagcaucauugccuacacaaugucucugggcgccgagaacagcguggccuacuccaacaacucuaucgcuauccccaccaacuucaccaucagcgugaccaccgagauccugccuguguccaugaccaagaccagcguggacugcaccauguacaucugcggcgauuccaccgagugcuccaaccugcugcugcaguacggcagcuucugcacccagcugaauagagcccugacagggaucgccguggaacaggacaagaacacccaagagguguucgcccaagugaagcaaaucuacaagaccccuccuaucaaggacuucggcggcuucaauuucagccagauucugcccgauccuagcaagcccagcaagcggagcuucaucgaggaccugcuguucaacaaagugacacuggccgacgccggcuucaucaagcaguauggcgauugucugggcgacauugccgccagggaucugauuugcgcccagaaguuuaacggacugacagugcugccuccucugcugaccgaugagaugaucgcccaguacacaucugcccugcuggccggcacaaucacaagcggcuggacauuuggagcuggcgccgcucugcagauccccuuugcuaugcagauggccuaccgguucaacggcaucggagugacccagaaugugcuguacgagaaccagaagcugaucgccaaccaguucaacagcgccaucggcaagauccaggacagccugagcagcacagcaagcgcccugggaaagcugcaggacguggucaaccagaaugcccaggcacugaacacccuggucaagcagcuguccuccaacuucggcgccaucagcucugugcugaacgauauccugagcagacuggacaaggucgaggccgaggugcagaucgacagacugaucacaggcagacugcagagccuccagacauacgugacccagcagcugaucagagccgccgagauuagagccucugccaaucuggccgccaccaagaugucugagugugugcugggccagagcaagagaguggacuuuugcggcaagggcuaccaccugaugagcuucccucagucugccccucacggcgugguguuucugcacgugacauaugugcccgcucaagagaagaauuucaccaccgcuccagccaucugccacgacggcaaagcccacuuuccuagagaaggcguguucguguccaacggcacccauugguucgugacacagcggaacuucuacgagccccagaucaucaccaccgacaacaccuucgugucuggcaacugcgacguugugaucggcauugugaacaauaccguguacgacccucugcagcccgagcuggacagcuucaaagaggaacuggacaaguacuuuaagaaccacacaagccccgacguggaccugggcgauaucagcggaaucaaugccagcgucgugaacauccagaaagagaucgaccggcugaacgagguggccaagaaucugaacgagagccugaucgaccugcaagaacuggggaaguacgagcaguacaucaaguggcccugguacaucuggcugggcuuuaucgccggacugauugccaucgugauggucacaaucaugcuguguugcaugaccagcugcuguagcugccugaagggcuguuguagcuguggcagcugcugcaaguucgacgaggacgauucugagcccgugcugaagggcgugaaacugcacuacaccugaggacuaguuauaagacugacuagcccgaugggccucccaacgggcccuccuccccuccuugcaccgagauuaauaaaaaaaaaaaaaaaaaaaaaaaaaaaaaaaaaaaaaaaaaaaaaaaaaaaaaaaaaaaaaaaaaaaaaaaaaaaaaaaaaaaaaaaaaaaaaaaaaaaa

SEQ ID NO: 25463 - RNA, 4011 nt, Artificial Sequence
  SARS-CoV-2/Wuhan/WIV05/2019__EPI_ISL_402128 spike protein mRNA gc mod (1-1273)(A222V_D614G)
aggagaaagcuuaccauguucguguuucuggugcugcugccccugguguccagccagugugugaaccugaccaccagaacacagcugccuccagccuacaccaacagcuucaccagaggcguguacuaccccgacaagguguucagauccagcgugcugcacucuacccaggaccuguuccugccuuucuucagcaacgugaccugguuccacgccauccacguguccggcaccaauggcaccaagagauucgacaaccccgugcugcccuucaacgacgggguguacuuugccagcaccgagaaguccaacaucaucagaggcuggaucuucggcaccacacuggacagcaagacccagagccugcugaucgugaacaacgccaccaacguggucaucaaagugugcgaguuccaguucugcaacgaccccuuccugggcgucuacuaccacaagaacaacaagagcuggauggaaagcgaguuccggguguacagcagcgccaacaacugcaccuucgaguacgugucccagccuuuccugauggaccuggaaggcaagcagggcaacuucaagaaccugcgcgaguucguguucaagaacaucgacggcuacuucaaaaucuacagcaagcacaccccuaucaaccucgugcgggaucugccucagggcuucucugugcuggaaccccugguggaucugcccaucggcaucaacaucacccgguuucagacacugcuggcccugcacagaagcuaccugacaccuggcgauagcagcagcggauggacagcuggugccgccgcuuacuaugugggcuaccugcagccuagaaccuuccugcugaaguacaacgagaacggcaccaucaccgacgccguggauugugcucuggauccucugagcgagacaaagugcacccugaaguccuucaccguggaaaagggcaucuaccagaccagcaacuuccgggugcagcccaccgaauccaucgugcgguuccccaauaucaccaaucugugccccuucggcgagguguucaaugccaccagauucgccucuguguacgccuggaaccggaagcggaucagcaauugcguggccgacuacuccgugcuguacaacuccgccagcuucagcaccuucaagugcuacggcguguccccuaccaagcugaacgaccugugcuucacaaacguguacgccgacagcuucgugauccggggagaugaagugcggcagauugccccuggacagacaggcaagaucgccgacuacaacuacaagcugcccgacgacuucaccggcugugugauugccuggaacagcaacaaccuggacuccaaagucggcggcaacuacaauuaccuguaccggcuguuccggaaguccaaucugaagcccuucgagcgggacaucagcaccgaaaucuaucaggccggcagcaccccuugcaacggcguggaaggcuucaacugcuacuucccacugcaguccuacggcuuucagcccacaaauggcgugggcuaucagcccuacagagugguggugcugagcuucgaacugcugcaugcuccugccacagugugcggcccuaagaaaagcaccaaucucgugaagaacaaaugcgugaacuucaacuucaacggccugaccggcaccggcgugcugacagagagcaacaagaaguuccugccauuccagcaguuuggccgggauaucgccgauaccacagacgccguuagagauccccagacacuggaaauccuggacaucaccccaugcagcuucggcggagugucugugaucaccccuggcaccaacaccagcaaucagguggcagugcuguaccagggcgugaacuguaccgaagugcccguggccauucacgccgaucagcugacaccuacauggcggguguacuccaccggcagcaauguguuucagaccagagccggcugucugaucggagccgagcacgugaacaauagcuacgagugcgacauccccaucggcgcuggcaucugugccagcuaccagacacagacaaacagccccagacgggcuagaagcguggccagccagagcaucauugccuacacaaugucucugggcgccgagaacagcguggccuacuccaacaacucuaucgcuauccccaccaacuucaccaucagcgugaccaccgagauccugccuguguccaugaccaagaccagcguggacugcaccauguacaucugcggcgauuccaccgagugcuccaaccugcugcugcaguacggcagcuucugcacccagcugaauagagcccugacagggaucgccguggaacaggacaagaacacccaagagguguucgcccaagugaagcaaaucuacaagaccccuccuaucaaggacuucggcggcuucaauuucagccagauucugcccgauccuagcaagcccagcaagcggagcuucaucgaggaccugcuguucaacaaagugacacuggccgacgccggcuucaucaagcaguauggcgauugucugggcgacauugccgccagggaucugauuugcgcccagaaguuuaacggacugacagugcugccuccucugcugaccgaugagaugaucgcccaguacacaucugcccugcuggccggcacaaucacaagcggcuggacauuuggagcuggcgccgcucugcagauccccuuugcuaugcagauggccuaccgguucaacggcaucggagugacccagaaugugcuguacgagaaccagaagcugaucgccaaccaguucaacagcgccaucggcaagauccaggacagccugagcagcacagcaagcgcccugggaaagcugcaggacguggucaaccagaaugcccaggcacugaacacccuggucaagcagcuguccuccaacuucggcgccaucagcucugugcugaacgauauccugagcagacuggacaaggucgaggccgaggugcagaucgacagacugaucacaggcagacugcagagccuccagacauacgugacccagcagcugaucagagccgccgagauuagagccucugccaaucuggccgccaccaagaugucugagugugugcugggccagagcaagagaguggacuuuugcggcaagggcuaccaccugaugagcuucccucagucugccccucacggcgugguguuucugcacgugacauaugugcccgcucaagagaagaauuucaccaccgcuccagccaucugccacgacggcaaagcccacuuuccuagagaaggcguguucguguccaacggcacccauugguucgugacacagcggaacuucuacgagccccagaucaucaccaccgacaacaccuucgugucuggcaacugcgacguugugaucggcauugugaacaauaccguguacgacccucugcagcccgagcuggacagcuucaaagaggaacuggacaaguacuuuaagaaccacacaagccccgacguggaccugggcgauaucagcggaaucaaugccagcgucgugaacauccagaaagagaucgaccggcugaacgagguggccaagaaucugaacgagagccugaucgaccugcaagaacuggggaaguacgagcaguacaucaaguggcccugguacaucuggcugggcuuuaucgccggacugauugccaucgugauggucacaaucaugcuguguugcaugaccagcugcuguagcugccugaagggcuguuguagcuguggcagcugcugcaaguucgacgaggacgauucugagcccgugcugaagggcgugaaacugcacuacaccugaggacuaguuauaagacugacuagcccgaugggccucccaacgggcccuccuccccuccuugcaccgagauuaauaaaaaaaaaaaaaaaaaaaaaaaaaaaaaaaaaaaaaaaaaaaaaaaaaaaaaaaaaaaaaaaaaaaaaaaaaaaaaaaaaaaaaaaaaaaaaaaaaaaa

SEQ ID NO: 25464 - RNA, 4011 nt, Artificial Sequence
  SARS-CoV-2/Wuhan/WIV05/2019__EPI_ISL_402128 spike protein mRNA gc mod (1-1273)(N439K_D614G)
aggagaaagcuuaccauguucguguuucuggugcugcugccccugguguccagccagugugugaaccugaccaccagaacacagcugccuccagccuacaccaacagcuucaccagaggcguguacuaccccgacaagguguucagauccagcgugcugcacucuacccaggaccuguuccugccuuucuucagcaacgugaccugguuccacgccauccacguguccggcaccaauggcaccaagagauucgacaaccccgugcugcccuucaacgacgggguguacuuugccagcaccgagaaguccaacaucaucagaggcuggaucuucggcaccacacuggacagcaagacccagagccugcugaucgugaacaacgccaccaacguggucaucaaagugugcgaguuccaguucugcaacgaccccuuccugggcgucuacuaccacaagaacaacaagagcuggauggaaagcgaguuccggguguacagcagcgccaacaacugcaccuucgaguacgugucccagccuuuccugauggaccuggaaggcaagcagggcaacuucaagaaccugcgcgaguucguguucaagaacaucgacggcuacuucaaaaucuacagcaagcacaccccuaucaaccucgugcgggaucugccucagggcuucucugcucuggaaccccugguggaucugcccaucggcaucaacaucacccgguuucagacacugcuggcccugcacagaagcuaccugacaccuggcgauagcagcagcggauggacagcuggugccgccgcuuacuaugugggcuaccugcagccuagaaccuuccugcugaaguacaacgagaacggcaccaucaccgacgccguggauugugcucuggauccucugagcgagacaaagugcacccugaaguccuucaccguggaaaagggcaucuaccagaccagcaacuuccgggugcagcccaccgaauccaucgugcgguuccccaauaucaccaaucugugccccuucggcgagguguucaaugccaccagauucgccucuguguacgccuggaaccggaagcggaucagcaauugcguggccgacuacuccgugcuguacaacuccgccagcuucagcaccuucaagugcuacggcguguccccuaccaagcugaacgaccugugcuucacaaacguguacgccgacagcuucgugauccggggagaugaagugcggcagauugccccuggacagacaggcaagaucgccgacuacaacuacaagcugcccgacgacuucaccggcugugugauugccuggaacagcaagaaccuggacuccaaagucggcggcaacuacaauuaccuguaccggcuguuccggaaguccaaucugaagcccuucgagcgggacaucagcaccgaaaucuaucaggccggcagcaccccuugcaacggcguggaaggcuucaacugcuacuucccacugcaguccuacggcuuucagcccacaaauggcgugggcuaucagcccuacagagugguggugcugagcuucgaacugcugcaugcuccugccacagugugcggcccuaagaaaagcaccaaucucgugaagaacaaaugcgugaacuucaacuucaacggccugaccggcaccggcgugcugacagagagcaacaagaaguuccugccauuccagcaguuuggccgggauaucgccgauaccacagacgccguuagagauccccagacacuggaaauccuggacaucaccccaugcagcuucggcggagugucugugaucaccccuggcaccaacaccagcaaucagguggcagugcuguaccagggcgugaacuguaccgaagugcccguggccauucacgccgaucagcugacaccuacauggcggguguacuccaccggcagcaauguguuucagaccagagccggcugucugaucggagccgagcacgugaacaauagcuacgagugcgacauccccaucggcgcuggcaucugugccagcuaccagacacagacaaacagccccagacgggcuagaagcguggccagccagagcaucauugccuacacaaugucucugggcgccgagaacagcguggccuacuccaacaacucuaucgcuauccccaccaacuucaccaucagcgugaccaccgagauccugccuguguccaugaccaagaccagcguggacugcaccauguacaucugcggcgauuccaccgagugcuccaaccugcugcugcaguacggcagcuucugcacccagcugaauagagcccugacagggaucgccguggaacaggacaagaacacccaagagguguucgcccaagugaagcaaaucuacaagaccccuccuaucaaggacuucggcggcuucaauuucagccagauucugcccgauccuagcaagcccagcaagcggagcuucaucgaggaccugcuguucaacaaagugacacuggccgacgccggcuucaucaagcaguauggcgauugucugggcgacauugccgccagggaucugauuugcgcccagaaguuuaacggacugacagugcugccuccucugcugaccgaugagaugaucgcccaguacacaucugcccugcuggccggcacaaucacaagcggcuggacauuuggagcuggcgccgcucugcagauccccuuugcuaugcagauggccuaccgguucaacggcaucggagugacccagaaugugcuguacgagaaccagaagcugaucgccaaccaguucaacagcgccaucggcaagauccaggacagccugagcagcacagcaagcgcccugggaaagcugcaggacguggucaaccagaaugcccaggcacugaacacccuggucaagcagcuguccuccaacuucggcgccaucagcucugugcugaacgauauccugagcagacuggacaaggucgaggccgaggugcagaucgacagacugaucacaggcagacugcagagccuccagacauacgugacccagcagcugaucagagccgccgagauuagagccucugccaaucuggccgccaccaagaugucugagugugugcugggccagagcaagagaguggacuuuugcggcaagggcuaccaccugaugagcuucccucagucugccccucacggcgugguguuucugcacgugacauaugugcccgcucaagagaagaauuucaccaccgcuccagccaucugccacgacggcaaagcccacuuuccuagagaaggcguguucguguccaacggcacccauugguucgugacacagcggaacuucuacgagccccagaucaucaccaccgacaacaccuucgugucuggcaacugcgacguugugaucggcauugugaacaauaccguguacgacccucugcagcccgagcuggacagcuucaaagaggaacuggacaaguacuuuaagaaccacacaagccccgacguggaccugggcgauaucagcggaaucaaugccagcgucgugaacauccagaaagagaucgaccggcugaacgagguggccaagaaucugaacgagagccugaucgaccugcaagaacuggggaaguacgagcaguacaucaaguggcccugguacaucuggcugggcuuuaucgccggacugauugccaucgugauggucacaaucaugcuguguugcaugaccagcugcuguagcugccugaagggcuguuguagcuguggcagcugcugcaaguucgacgaggacgauucugagcccgugcugaagggcgugaaacugcacuacaccugaggacuaguuauaagacugacuagcccgaugggccucccaacgggcccuccuccccuccuugcaccgagauuaauaaaaaaaaaaaaaaaaaaaaaaaaaaaaaaaaaaaaaaaaaaaaaaaaaaaaaaaaaaaaaaaaaaaaaaaaaaaaaaaaaaaaaaaaaaaaaaaaaaaa

SEQ ID NO: 25465 - RNA, 4011 nt, Artificial Sequence
  SARS-CoV-2/Wuhan/WIV05/2019__EPI_ISL_402128 spike protein mRNA gc mod (1-1273)(S477N_D614G)
aggagaaagcuuaccauguucguguuucuggugcugcugccccugguguccagccagugugugaaccugaccaccagaacacagcugccuccagccuacaccaacagcuucaccagaggcguguacuaccccgacaagguguucagauccagcgugcugcacucuacccaggaccuguuccugccuuucuucagcaacgugaccugguuccacgccauccacguguccggcaccaauggcaccaagagauucgacaaccccgugcugcccuucaacgacgggguguacuuugccagcaccgagaaguccaacaucaucagaggcuggaucuucggcaccacacuggacagcaagacccagagccugcugaucgugaacaacgccaccaacguggucaucaaagugugcgaguuccaguucugcaacgaccccuuccugggcgucuacuaccacaagaacaacaagagcuggauggaaagcgaguuccggguguacagcagcgccaacaacugcaccuucgaguacgugucccagccuuuccugauggaccuggaaggcaagcagggcaacuucaagaaccugcgcgaguucguguucaagaacaucgacggcuacuucaaaaucuacagcaagcacaccccuaucaaccucgugcgggaucugccucagggcuucucugcucuggaaccccugguggaucugcccaucggcaucaacaucacccgguuucagacacugcuggcccugcacagaagcuaccugacaccuggcgauagcagcagcggauggacagcuggugccgccgcuuacuaugugggcuaccugcagccuagaaccuuccugcugaaguacaacgagaacggcaccaucaccgacgccguggauugugcucuggauccucugagcgagacaaagugcacccugaaguccuucaccguggaaaagggcaucuaccagaccagcaacuuccgggugcagcccaccgaauccaucgugcgguuccccaauaucaccaaucugugccccuucggcgagguguucaaugccaccagauucgccucuguguacgccuggaaccggaagcggaucagcaauugcguggccgacuacuccgugcuguacaacuccgccagcuucagcaccuucaagugcuacggcguguccccuaccaagcugaacgaccugugcuucacaaacguguacgccgacagcuucgugauccggggagaugaagugcggcagauugccccuggacagacaggcaagaucgccgacuacaacuacaagcugcccgacgacuucaccggcugugugauugccuggaacagcaacaaccuggacuccaaagucggcggcaacuacaauuaccuguaccggcuguuccggaaguccaaucugaagcccuucgagcgggacaucagcaccgaaaucuaucaggccggcaacaccccuugcaacggcguggaaggcuucaacugcuacuucccacugcaguccuacggcuuucagcccacaaauggcgugggcuaucagcccuacagagugguggugcugagcuucgaacugcugcaugcuccugccacagugugcggcccuaagaaaagcaccaaucucgugaagaacaaaugcgugaacuucaacuucaacggccugaccggcaccggcgugcugacagagagcaacaagaaguuccugccauuccagcaguuuggccgggauaucgccgauaccacagacgccguuagagauccccagacacuggaaauccuggacaucaccccaugcagcuucggcggagugucugugaucaccccuggcaccaacaccagcaaucagguggcagugcuguaccagggcgugaacuguaccgaagugcccguggccauucacgccgaucagcugacaccuacauggcggguguacuccaccggcagcaauguguuucagaccagagccggcugucugaucggagccgagcacgugaacaauagcuacgagugcgacauccccaucggcgcuggcaucugugccagcuaccagacacagacaaacagccccagacgggcuagaagcguggccagccagagcaucauugccuacacaaugucucugggcgccgagaacagcguggccuacuccaacaacucuaucgcuauccccaccaacuucaccaucagcgugaccaccgagauccugccuguguccaugaccaagaccagcguggacugcaccauguacaucugcggcgauuccaccgagugcuccaaccugcugcugcaguacggcagcuucugcacccagcugaauagagcccugacagggaucgccguggaacaggacaagaacacccaagagguguucgcccaagugaagcaaaucuacaagaccccuccuaucaaggacuucggcggcuucaauuucagccagauucugcccgauccuagcaagcccagcaagcggagcuucaucgaggaccugcuguucaacaaagugacacuggccgacgccggcuucaucaagcaguauggcgauugucugggcgacauugccgccagggaucugauuugcgcccagaaguuuaacggacugacagugcugccuccucugcugaccgaugagaugaucgcccaguacacaucugcccugcuggccggcacaaucacaagcggcuggacauuuggagcuggcgccgcucugcagauccccuuugcuaugcagauggccuaccgguucaacggcaucggagugacccagaaugugcuguacgagaaccagaagcugaucgccaaccaguucaacagcgccaucggcaagauccaggacagccugagcagcacagcaagcgcccugggaaagcugcaggacguggucaaccagaaugcccaggcacugaacacccuggucaagcagcuguccuccaacuucggcgccaucagcucugugcugaacgauauccugagcagacuggacaaggucgaggccgaggugcagaucgacagacugaucacaggcagacugcagagccuccagacauacgugacccagcagcugaucagagccgccgagauuagagccucugccaaucuggccgccaccaagaugucugagugugugcugggccagagcaagagaguggacuuuugcggcaagggcuaccaccugaugagcuucccucagucugccccucacggcgugguguuucugcacgugacauaugugcccgcucaagagaagaauuucaccaccgcuccagccaucugccacgacggcaaagcccacuuuccuagagaaggcguguucguguccaacggcacccauugguucgugacacagcggaacuucuacgagccccagaucaucaccaccgacaacaccuucgugucuggcaacugcgacguugugaucggcauugugaacaauaccguguacgacccucugcagcccgagcuggacagcuucaaagaggaacuggacaaguacuuuaagaaccacacaagccccgacguggaccugggcgauaucagcggaaucaaugccagcgucgugaacauccagaaagagaucgaccggcugaacgagguggccaagaaucugaacgagagccugaucgaccugcaagaacuggggaaguacgagcaguacaucaaguggcccugguacaucuggcugggcuuuaucgccggacugauugccaucgugauggucacaaucaugcuguguugcaugaccagcugcuguagcugccugaagggcuguuguagcuguggcagcugcugcaaguucgacgaggacgauucugagcccgugcugaagggcgugaaacugcacuacaccugaggacuaguuauaagacugacuagcccgaugggccucccaacgggcccuccuccccuccuugcaccgagauuaauaaaaaaaaaaaaaaaaaaaaaaaaaaaaaaaaaaaaaaaaaaaaaaaaaaaaaaaaaaaaaaaaaaaaaaaaaaaaaaaaaaaaaaaaaaaaaaaaaaaa

SEQ ID NO: 25466 - RNA, 4011 nt, Artificial Sequence
  SARS-CoV-2/Wuhan/WIV05/2019__EPI_ISL_402128 spike protein mRNA gc mod (1-1273)(N501Y_D614G)
aggagaaagcuuaccauguucguguuucuggugcugcugccccugguguccagccagugugugaaccugaccaccagaacacagcugccuccagccuacaccaacagcuucaccagaggcguguacuaccccgacaagguguucagauccagcgugcugcacucuacccaggaccuguuccugccuuucuucagcaacgugaccugguuccacgccauccacguguccggcaccaauggcaccaagagauucgacaaccccgugcugcccuucaacgacgggguguacuuugccagcaccgagaaguccaacaucaucagaggcuggaucuucggcaccacacuggacagcaagacccagagccugcugaucgugaacaacgccaccaacguggucaucaaagugugcgaguuccaguucugcaacgaccccuuccugggcgucuacuaccacaagaacaacaagagcuggauggaaagcgaguuccggguguacagcagcgccaacaacugcaccuucgaguacgugucccagccuuuccugauggaccuggaaggcaagcagggcaacuucaagaaccugcgcgaguucguguucaagaacaucgacggcuacuucaaaaucuacagcaagcacaccccuaucaaccucgugcgggaucugccucagggcuucucugcucuggaaccccugguggaucugcccaucggcaucaacaucacccgguuucagacacugcuggcccugcacagaagcuaccugacaccuggcgauagcagcagcggauggacagcuggugccgccgcuuacuaugugggcuaccugcagccuagaaccuuccugcugaaguacaacgagaacggcaccaucaccgacgccguggauugugcucuggauccucugagcgagacaaagugcacccugaaguccuucaccguggaaaagggcaucuaccagaccagcaacuuccgggugcagcccaccgaauccaucgugcgguuccccaauaucaccaaucugugccccuucggcgagguguucaaugccaccagauucgccucuguguacgccuggaaccggaagcggaucagcaauugcguggccgacuacuccgugcuguacaacuccgccagcuucagcaccuucaagugcuacggcguguccccuaccaagcugaacgaccugugcuucacaaacguguacgccgacagcuucgugauccggggagaugaagugcggcagauugccccuggacagacaggcaagaucgccgacuacaacuacaagcugcccgacgacuucaccggcugugugauugccuggaacagcaacaaccuggacuccaaagucggcggcaacuacaauuaccuguaccggcuguuccggaaguccaaucugaagcccuucgagcgggacaucagcaccgaaaucuaucaggccggcagcaccccuugcaacggcguggaaggcuucaacugcuacuucccacugcaguccuacggcuuucagcccacauacggcgugggcuaucagcccuacagagugguggugcugagcuucgaacugcugcaugcuccugccacagugugcggcccuaagaaaagcaccaaucucgugaagaacaaaugcgugaacuucaacuucaacggccugaccggcaccggcgugcugacagagagcaacaagaaguuccugccauuccagcaguuuggccgggauaucgccgauaccacagacgccguuagagauccccagacacuggaaauccuggacaucaccccaugcagcuucggcggagugucugugaucaccccuggcaccaacaccagcaaucagguggcagugcuguaccagggcgugaacuguaccgaagugcccguggccauucacgccgaucagcugacaccuacauggcggguguacuccaccggcagcaauguguuucagaccagagccggcugucugaucggagccgagcacgugaacaauagcuacgagugcgacauccccaucggcgcuggcaucugugccagcuaccagacacagacaaacagccccagacgggcuagaagcguggccagccagagcaucauugccuacacaaugucucugggcgccgagaacagcguggccuacuccaacaacucuaucgcuauccccaccaacuucaccaucagcgugaccaccgagauccugccuguguccaugaccaagaccagcguggacugcaccauguacaucugcggcgauuccaccgagugcuccaaccugcugcugcaguacggcagcuucugcacccagcugaauagagcccugacagggaucgccguggaacaggacaagaacacccaagagguguucgcccaagugaagcaaaucuacaagaccccuccuaucaaggacuucggcggcuucaauuucagccagauucugcccgauccuagcaagcccagcaagcggagcuucaucgaggaccugcuguucaacaaagugacacuggccgacgccggcuucaucaagcaguauggcgauugucugggcgacauugccgccagggaucugauuugcgcccagaaguuuaacggacugacagugcugccuccucugcugaccgaugagaugaucgcccaguacacaucugcccugcuggccggcacaaucacaagcggcuggacauuuggagcuggcgccgcucugcagauccccuuugcuaugcagauggccuaccgguucaacggcaucggagugacccagaaugugcuguacgagaaccagaagcugaucgccaaccaguucaacagcgccaucggcaagauccaggacagccugagcagcacagcaagcgcccugggaaagcugcaggacguggucaaccagaaugcccaggcacugaacacccuggucaagcagcuguccuccaacuucggcgccaucagcucugugcugaacgauauccugagcagacuggacaaggucgaggccgaggugcagaucgacagacugaucacaggcagacugcagagccuccagacauacgugacccagcagcugaucagagccgccgagauuagagccucugccaaucuggccgccaccaagaugucugagugugugcugggccagagcaagagaguggacuuuugcggcaagggcuaccaccugaugagcuucccucagucugccccucacggcgugguguuucugcacgugacauaugugcccgcucaagagaagaauuucaccaccgcuccagccaucugccacgacggcaaagcccacuuuccuagagaaggcguguucguguccaacggcacccauugguucgugacacagcggaacuucuacgagccccagaucaucaccaccgacaacaccuucgugucuggcaacugcgacguugugaucggcauugugaacaauaccguguacgacccucugcagcccgagcuggacagcuucaaagaggaacuggacaaguacuuuaagaaccacacaagccccgacguggaccugggcgauaucagcggaaucaaugccagcgucgugaacauccagaaagagaucgaccggcugaacgagguggccaagaaucugaacgagagccugaucgaccugcaagaacuggggaaguacgagcaguacaucaaguggcccugguacaucuggcugggcuuuaucgccggacugauugccaucgugauggucacaaucaugcuguguugcaugaccagcugcuguagcugccugaagggcuguuguagcuguggcagcugcugcaaguucgacgaggacgauucugagcccgugcugaagggcgugaaacugcacuacaccugaggacuaguuauaagacugacuagcccgaugggccucccaacgggcccuccuccccuccuugcaccgagauuaauaaaaaaaaaaaaaaaaaaaaaaaaaaaaaaaaaaaaaaaaaaaaaaaaaaaaaaaaaaaaaaaaaaaaaaaaaaaaaaaaaaaaaaaaaaaaaaaaaaaa

SEQ ID NO: 25467 - RNA, 4005 nt, Artificial Sequence
  SARS-CoV-2/Wuhan/WIV05/2019__EPI_ISL_402128 spike protein mRNA gc mod (1-1273)(H69del_V70del_D614G)
aggagaaagcuuaccauguucguguuucuggugcugcugccccugguguccagccagugugugaaccugaccaccagaacacagcugccuccagccuacaccaacagcuucaccagaggcguguacuaccccgacaagguguucagauccagcgugcugcacucuacccaggaccuguuccugccuuucuucagcaacgugaccugguuccacgccaucuccggcaccaauggcaccaagagauucgacaaccccgugcugcccuucaacgacgggguguacuuugccagcaccgagaaguccaacaucaucagaggcuggaucuucggcaccacacuggacagcaagacccagagccugcugaucgugaacaacgccaccaacguggucaucaaagugugcgaguuccaguucugcaacgaccccuuccugggcgucuacuaccacaagaacaacaagagcuggauggaaagcgaguuccggguguacagcagcgccaacaacugcaccuucgaguacgugucccagccuuuccugauggaccuggaaggcaagcagggcaacuucaagaaccugcgcgaguucguguucaagaacaucgacggcuacuucaaaaucuacagcaagcacaccccuaucaaccucgugcgggaucugccucagggcuucucugcucuggaaccccugguggaucugcccaucggcaucaacaucacccgguuucagacacugcuggcccugcacagaagcuaccugacaccuggcgauagcagcagcggauggacagcuggugccgccgcuuacuaugugggcuaccugcagccuagaaccuuccugcugaaguacaacgagaacggcaccaucaccgacgccguggauugugcucuggauccucugagcgagacaaagugcacccugaaguccuucaccguggaaaagggcaucuaccagaccagcaacuuccgggugcagcccaccgaauccaucgugcgguuccccaauaucaccaaucugugccccuucggcgagguguucaaugccaccagauucgccucuguguacgccuggaaccggaagcggaucagcaauugcguggccgacuacuccgugcuguacaacuccgccagcuucagcaccuucaagugcuacggcguguccccuaccaagcugaacgaccugugcuucacaaacguguacgccgacagcuucgugauccggggagaugaagugcggcagauugccccuggacagacaggcaagaucgccgacuacaacuacaagcugcccgacgacuucaccggcugugugauugccuggaacagcaacaaccuggacuccaaagucggcggcaacuacaauuaccuguaccggcuguuccggaaguccaaucugaagcccuucgagcgggacaucagcaccgaaaucuaucaggccggcagcaccccuugcaacggcguggaaggcuucaacugcuacuucccacugcaguccuacggcuuucagcccacaaauggcgugggcuaucagcccuacagagugguggugcugagcuucgaacugcugcaugcuccugccacagugugcggcccuaagaaaagcaccaaucucgugaagaacaaaugcgugaacuucaacuucaacggccugaccggcaccggcgugcugacagagagcaacaagaaguuccugccauuccagcaguuuggccgggauaucgccgauaccacagacgccguuagagauccccagacacuggaaauccuggacaucaccccaugcagcuucggcggagugucugugaucaccccuggcaccaacaccagcaaucagguggcagugcuguaccagggcgugaacuguaccgaagugcccguggccauucacgccgaucagcugacaccuacauggcggguguacuccaccggcagcaauguguuucagaccagagccggcugucugaucggagccgagcacgugaacaauagcuacgagugcgacauccccaucggcgcuggcaucugugccagcuaccagacacagacaaacagccccagacgggcuagaagcguggccagccagagcaucauugccuacacaaugucucugggcgccgagaacagcguggccuacuccaacaacucuaucgcuauccccaccaacuucaccaucagcgugaccaccgagauccugccuguguccaugaccaagaccagcguggacugcaccauguacaucugcggcgauuccaccgagugcuccaaccugcugcugcaguacggcagcuucugcacccagcugaauagagcccugacagggaucgccguggaacaggacaagaacacccaagagguguucgcccaagugaagcaaaucuacaagaccccuccuaucaaggacuucggcggcuucaauuucagccagauucugcccgauccuagcaagcccagcaagcggagcuucaucgaggaccugcuguucaacaaagugacacuggccgacgccggcuucaucaagcaguauggcgauugucugggcgacauugccgccagggaucugauuugcgcccagaaguuuaacggacugacagugcugccuccucugcugaccgaugagaugaucgcccaguacacaucugcccugcuggccggcacaaucacaagcggcuggacauuuggagcuggcgccgcucugcagauccccuuugcuaugcagauggccuaccgguucaacggcaucggagugacccagaaugugcuguacgagaaccagaagcugaucgccaaccaguucaacagcgccaucggcaagauccaggacagccugagcagcacagcaagcgcccugggaaagcugcaggacguggucaaccagaaugcccaggcacugaacacccuggucaagcagcuguccuccaacuucggcgccaucagcucugugcugaacgauauccugagcagacuggacaaggucgaggccgaggugcagaucgacagacugaucacaggcagacugcagagccuccagacauacgugacccagcagcugaucagagccgccgagauuagagccucugccaaucuggccgccaccaagaugucugagugugugcugggccagagcaagagaguggacuuuugcggcaagggcuaccaccugaugagcuucccucagucugccccucacggcgugguguuucugcacgugacauaugugcccgcucaagagaagaauuucaccaccgcuccagccaucugccacgacggcaaagcccacuuuccuagagaaggcguguucguguccaacggcacccauugguucgugacacagcggaacuucuacgagccccagaucaucaccaccgacaacaccuucgugucuggcaacugcgacguugugaucggcauugugaacaauaccguguacgacccucugcagcccgagcuggacagcuucaaagaggaacuggacaaguacuuuaagaaccacacaagccccgacguggaccugggcgauaucagcggaaucaaugccagcgucgugaacauccagaaagagaucgaccggcugaacgagguggccaagaaucugaacgagagccugaucgaccugcaagaacuggggaaguacgagcaguacaucaaguggcccugguacaucuggcugggcuuuaucgccggacugauugccaucgugauggucacaaucaugcuguguugcaugaccagcugcuguagcugccugaagggcuguuguagcuguggcagcugcugcaaguucgacgaggacgauucugagcccgugcugaagggcgugaaacugcacuacaccugaggacuaguuauaagacugacuagcccgaugggccucccaacgggcccuccuccccuccuugcaccgagauuaauaaaaaaaaaaaaaaaaaaaaaaaaaaaaaaaaaaaaaaaaaaaaaaaaaaaaaaaaaaaaaaaaaaaaaaaaaaaaaaaaaaaaaaaaaaaaaaaaaaaa

SEQ ID NO: 25468 - RNA, 4011 nt, Artificial Sequence
  SARS-CoV-2/Wuhan/WIV05/2019__EPI_ISL_402128 spike protein mRNA gc mod (1-1273)(Y453F_D614G)
aggagaaagcuuaccauguucguguuucuggugcugcugccccugguguccagccagugugugaaccugaccaccagaacacagcugccuccagccuacaccaacagcuucaccagaggcguguacuaccccgacaagguguucagauccagcgugcugcacucuacccaggaccuguuccugccuuucuucagcaacgugaccugguuccacgccauccacguguccggcaccaauggcaccaagagauucgacaaccccgugcugcccuucaacgacgggguguacuuugccagcaccgagaaguccaacaucaucagaggcuggaucuucggcaccacacuggacagcaagacccagagccugcugaucgugaacaacgccaccaacguggucaucaaagugugcgaguuccaguucugcaacgaccccuuccugggcgucuacuaccacaagaacaacaagagcuggauggaaagcgaguuccggguguacagcagcgccaacaacugcaccuucgaguacgugucccagccuuuccugauggaccuggaaggcaagcagggcaacuucaagaaccugcgcgaguucguguucaagaacaucgacggcuacuucaaaaucuacagcaagcacaccccuaucaaccucgugcgggaucugccucagggcuucucugcucuggaaccccugguggaucugcccaucggcaucaacaucacccgguuucagacacugcuggcccugcacagaagcuaccugacaccuggcgauagcagcagcggauggacagcuggugccgccgcuuacuaugugggcuaccugcagccuagaaccuuccugcugaaguacaacgagaacggcaccaucaccgacgccguggauugugcucuggauccucugagcgagacaaagugcacccugaaguccuucaccguggaaaagggcaucuaccagaccagcaacuuccgggugcagcccaccgaauccaucgugcgguuccccaauaucaccaaucugugccccuucggcgagguguucaaugccaccagauucgccucuguguacgccuggaaccggaagcggaucagcaauugcguggccgacuacuccgugcuguacaacuccgccagcuucagcaccuucaagugcuacggcguguccccuaccaagcugaacgaccugugcuucacaaacguguacgccgacagcuucgugauccggggagaugaagugcggcagauugccccuggacagacaggcaagaucgccgacuacaacuacaagcugcccgacgacuucaccggcugugugauugccuggaacagcaacaaccuggacuccaaagucggcggcaacuacaauuaccuguuccggcuguuccggaaguccaaucugaagcccuucgagcgggacaucagcaccgaaaucuaucaggccggcagcaccccuugcaacggcguggaaggcuucaacugcuacuucccacugcaguccuacggcuuucagcccacaaauggcgugggcuaucagcccuacagagugguggugcugagcuucgaacugcugcaugcuccugccacagugugcggcccuaagaaaagcaccaaucucgugaagaacaaaugcgugaacuucaacuucaacggccugaccggcaccggcgugcugacagagagcaacaagaaguuccugccauuccagcaguuuggccgggauaucgccgauaccacagacgccguuagagauccccagacacuggaaauccuggacaucaccccaugcagcuucggcggagugucugugaucaccccuggcaccaacaccagcaaucagguggcagugcuguaccagggcgugaacuguaccgaagugcccguggccauucacgccgaucagcugacaccuacauggcggguguacuccaccggcagcaauguguuucagaccagagccggcugucugaucggagccgagcacgugaacaauagcuacgagugcgacauccccaucggcgcuggcaucugugccagcuaccagacacagacaaacagccccagacgggcuagaagcguggccagccagagcaucauugccuacacaaugucucugggcgccgagaacagcguggccuacuccaacaacucuaucgcuauccccaccaacuucaccaucagcgugaccaccgagauccugccuguguccaugaccaagaccagcguggacugcaccauguacaucugcggcgauuccaccgagugcuccaaccugcugcugcaguacggcagcuucugcacccagcugaauagagcccugacagggaucgccguggaacaggacaagaacacccaagagguguucgcccaagugaagcaaaucuacaagaccccuccuaucaaggacuucggcggcuucaauuucagccagauucugcccgauccuagcaagcccagcaagcggagcuucaucgaggaccugcuguucaacaaagugacacuggccgacgccggcuucaucaagcaguauggcgauugucugggcgacauugccgccagggaucugauuugcgcccagaaguuuaacggacugacagugcugccuccucugcugaccgaugagaugaucgcccaguacacaucugcccugcuggccggcacaaucacaagcggcuggacauuuggagcuggcgccgcucugcagauccccuuugcuaugcagauggccuaccgguucaacggcaucggagugacccagaaugugcuguacgagaaccagaagcugaucgccaaccaguucaacagcgccaucggcaagauccaggacagccugagcagcacagcaagcgcccugggaaagcugcaggacguggucaaccagaaugcccaggcacugaacacccuggucaagcagcuguccuccaacuucggcgccaucagcucugugcugaacgauauccugagcagacuggacaaggucgaggccgaggugcagaucgacagacugaucacaggcagacugcagagccuccagacauacgugacccagcagcugaucagagccgccgagauuagagccucugccaaucuggccgccaccaagaugucugagugugugcugggccagagcaagagaguggacuuuugcggcaagggcuaccaccugaugagcuucccucagucugccccucacggcgugguguuucugcacgugacauaugugcccgcucaagagaagaauuucaccaccgcuccagccaucugccacgacggcaaagcccacuuuccuagagaaggcguguucguguccaacggcacccauugguucgugacacagcggaacuucuacgagccccagaucaucaccaccgacaacaccuucgugucuggcaacugcgacguugugaucggcauugugaacaauaccguguacgacccucugcagcccgagcuggacagcuucaaagaggaacuggacaaguacuuuaagaaccacacaagccccgacguggaccugggcgauaucagcggaaucaaugccagcgucgugaacauccagaaagagaucgaccggcugaacgagguggccaagaaucugaacgagagccugaucgaccugcaagaacuggggaaguacgagcaguacaucaaguggcccugguacaucuggcugggcuuuaucgccggacugauugccaucgugauggucacaaucaugcuguguugcaugaccagcugcuguagcugccugaagggcuguuguagcuguggcagcugcugcaaguucgacgaggacgauucugagcccgugcugaagggcgugaaacugcacuacaccugaggacuaguuauaagacugacuagcccgaugggccucccaacgggcccuccuccccuccuugcaccgagauuaauaaaaaaaaaaaaaaaaaaaaaaaaaaaaaaaaaaaaaaaaaaaaaaaaaaaaaaaaaaaaaaaaaaaaaaaaaaaaaaaaaaaaaaaaaaaaaaaaaaaa

SEQ ID NO: 25469 - RNA, 4011 nt, Artificial Sequence
  SARS-CoV-2/Wuhan/WIV05/2019__EPI_ISL_402128 spike protein mRNA gc mod (1-1273)(D614G_I692V)
aggagaaagcuuaccauguucguguuucuggugcugcugccccugguguccagccagugugugaaccugaccaccagaacacagcugccuccagccuacaccaacagcuucaccagaggcguguacuaccccgacaagguguucagauccagcgugcugcacucuacccaggaccuguuccugccuuucuucagcaacgugaccugguuccacgccauccacguguccggcaccaauggcaccaagagauucgacaaccccgugcugcccuucaacgacgggguguacuuugccagcaccgagaaguccaacaucaucagaggcuggaucuucggcaccacacuggacagcaagacccagagccugcugaucgugaacaacgccaccaacguggucaucaaagugugcgaguuccaguucugcaacgaccccuuccugggcgucuacuaccacaagaacaacaagagcuggauggaaagcgaguuccggguguacagcagcgccaacaacugcaccuucgaguacgugucccagccuuuccugauggaccuggaaggcaagcagggcaacuucaagaaccugcgcgaguucguguucaagaacaucgacggcuacuucaaaaucuacagcaagcacaccccuaucaaccucgugcgggaucugccucagggcuucucugcucuggaaccccugguggaucugcccaucggcaucaacaucacccgguuucagacacugcuggcccugcacagaagcuaccugacaccuggcgauagcagcagcggauggacagcuggugccgccgcuuacuaugugggcuaccugcagccuagaaccuuccugcugaaguacaacgagaacggcaccaucaccgacgccguggauugugcucuggauccucugagcgagacaaagugcacccugaaguccuucaccguggaaaagggcaucuaccagaccagcaacuuccgggugcagcccaccgaauccaucgugcgguuccccaauaucaccaaucugugccccuucggcgagguguucaaugccaccagauucgccucuguguacgccuggaaccggaagcggaucagcaauugcguggccgacuacuccgugcuguacaacuccgccagcuucagcaccuucaagugcuacggcguguccccuaccaagcugaacgaccugugcuucacaaacguguacgccgacagcuucgugauccggggagaugaagugcggcagauugccccuggacagacaggcaagaucgccgacuacaacuacaagcugcccgacgacuucaccggcugugugauugccuggaacagcaacaaccuggacuccaaagucggcggcaacuacaauuaccuguaccggcuguuccggaaguccaaucugaagcccuucgagcgggacaucagcaccgaaaucuaucaggccggcagcaccccuugcaacggcguggaaggcuucaacugcuacuucccacugcaguccuacggcuuucagcccacaaauggcgugggcuaucagcccuacagagugguggugcugagcuucgaacugcugcaugcuccugccacagugugcggcccuaagaaaagcaccaaucucgugaagaacaaaugcgugaacuucaacuucaacggccugaccggcaccggcgugcugacagagagcaacaagaaguuccugccauuccagcaguuuggccgggauaucgccgauaccacagacgccguuagagauccccagacacuggaaauccuggacaucaccccaugcagcuucggcggagugucugugaucaccccuggcaccaacaccagcaaucagguggcagugcuguaccagggcgugaacuguaccgaagugcccguggccauucacgccgaucagcugacaccuacauggcggguguacuccaccggcagcaauguguuucagaccagagccggcugucugaucggagccgagcacgugaacaauagcuacgagugcgacauccccaucggcgcuggcaucugugccagcuaccagacacagacaaacagccccagacgggcuagaagcguggccagccagagcgugauugccuacacaaugucucugggcgccgagaacagcguggccuacuccaacaacucuaucgcuauccccaccaacuucaccaucagcgugaccaccgagauccugccuguguccaugaccaagaccagcguggacugcaccauguacaucugcggcgauuccaccgagugcuccaaccugcugcugcaguacggcagcuucugcacccagcugaauagagcccugacagggaucgccguggaacaggacaagaacacccaagagguguucgcccaagugaagcaaaucuacaagaccccuccuaucaaggacuucggcggcuucaauuucagccagauucugcccgauccuagcaagcccagcaagcggagcuucaucgaggaccugcuguucaacaaagugacacuggccgacgccggcuucaucaagcaguauggcgauugucugggcgacauugccgccagggaucugauuugcgcccagaaguuuaacggacugacagugcugccuccucugcugaccgaugagaugaucgcccaguacacaucugcccugcuggccggcacaaucacaagcggcuggacauuuggagcuggcgccgcucugcagauccccuuugcuaugcagauggccuaccgguucaacggcaucggagugacccagaaugugcuguacgagaaccagaagcugaucgccaaccaguucaacagcgccaucggcaagauccaggacagccugagcagcacagcaagcgcccugggaaagcugcaggacguggucaaccagaaugcccaggcacugaacacccuggucaagcagcuguccuccaacuucggcgccaucagcucugugcugaacgauauccugagcagacuggacaaggucgaggccgaggugcagaucgacagacugaucacaggcagacugcagagccuccagacauacgugacccagcagcugaucagagccgccgagauuagagccucugccaaucuggccgccaccaagaugucugagugugugcugggccagagcaagagaguggacuuuugcggcaagggcuaccaccugaugagcuucccucagucugccccucacggcgugguguuucugcacgugacauaugugcccgcucaagagaagaauuucaccaccgcuccagccaucugccacgacggcaaagcccacuuuccuagagaaggcguguucguguccaacggcacccauugguucgugacacagcggaacuucuacgagccccagaucaucaccaccgacaacaccuucgugucuggcaacugcgacguugugaucggcauugugaacaauaccguguacgacccucugcagcccgagcuggacagcuucaaagaggaacuggacaaguacuuuaagaaccacacaagccccgacguggaccugggcgauaucagcggaaucaaugccagcgucgugaacauccagaaagagaucgaccggcugaacgagguggccaagaaucugaacgagagccugaucgaccugcaagaacuggggaaguacgagcaguacaucaaguggcccugguacaucuggcugggcuuuaucgccggacugauugccaucgugauggucacaaucaugcuguguugcaugaccagcugcuguagcugccugaagggcuguuguagcuguggcagcugcugcaaguucgacgaggacgauucugagcccgugcugaagggcgugaaacugcacuacaccugaggacuaguuauaagacugacuagcccgaugggccucccaacgggcccuccuccccuccuugcaccgagauuaauaaaaaaaaaaaaaaaaaaaaaaaaaaaaaaaaaaaaaaaaaaaaaaaaaaaaaaaaaaaaaaaaaaaaaaaaaaaaaaaaaaaaaaaaaaaaaaaaaaaa

SEQ ID NO: 25470 - RNA, 4011 nt, Artificial Sequence
  SARS-CoV-2/Wuhan/WIV05/2019__EPI_ISL_402128 spike protein mRNA gc mod (1-1273)(D614G_M1229I)
aggagaaagcuuaccauguucguguuucuggugcugcugccccugguguccagccagugugugaaccugaccaccagaacacagcugccuccagccuacaccaacagcuucaccagaggcguguacuaccccgacaagguguucagauccagcgugcugcacucuacccaggaccuguuccugccuuucuucagcaacgugaccugguuccacgccauccacguguccggcaccaauggcaccaagagauucgacaaccccgugcugcccuucaacgacgggguguacuuugccagcaccgagaaguccaacaucaucagaggcuggaucuucggcaccacacuggacagcaagacccagagccugcugaucgugaacaacgccaccaacguggucaucaaagugugcgaguuccaguucugcaacgaccccuuccugggcgucuacuaccacaagaacaacaagagcuggauggaaagcgaguuccggguguacagcagcgccaacaacugcaccuucgaguacgugucccagccuuuccugauggaccuggaaggcaagcagggcaacuucaagaaccugcgcgaguucguguucaagaacaucgacggcuacuucaaaaucuacagcaagcacaccccuaucaaccucgugcgggaucugccucagggcuucucugcucuggaaccccugguggaucugcccaucggcaucaacaucacccgguuucagacacugcuggcccugcacagaagcuaccugacaccuggcgauagcagcagcggauggacagcuggugccgccgcuuacuaugugggcuaccugcagccuagaaccuuccugcugaaguacaacgagaacggcaccaucaccgacgccguggauugugcucuggauccucugagcgagacaaagugcacccugaaguccuucaccguggaaaagggcaucuaccagaccagcaacuuccgggugcagcccaccgaauccaucgugcgguuccccaauaucaccaaucugugccccuucggcgagguguucaaugccaccagauucgccucuguguacgccuggaaccggaagcggaucagcaauugcguggccgacuacuccgugcuguacaacuccgccagcuucagcaccuucaagugcuacggcguguccccuaccaagcugaacgaccugugcuucacaaacguguacgccgacagcuucgugauccggggagaugaagugcggcagauugccccuggacagacaggcaagaucgccgacuacaacuacaagcugcccgacgacuucaccggcugugugauugccuggaacagcaacaaccuggacuccaaagucggcggcaacuacaauuaccuguaccggcuguuccggaaguccaaucugaagcccuucgagcgggacaucagcaccgaaaucuaucaggccggcagcaccccuugcaacggcguggaaggcuucaacugcuacuucccacugcaguccuacggcuuucagcccacaaauggcgugggcuaucagcccuacagagugguggugcugagcuucgaacugcugcaugcuccugccacagugugcggcccuaagaaaagcaccaaucucgugaagaacaaaugcgugaacuucaacuucaacggccugaccggcaccggcgugcugacagagagcaacaagaaguuccugccauuccagcaguuuggccgggauaucgccgauaccacagacgccguuagagauccccagacacuggaaauccuggacaucaccccaugcagcuucggcggagugucugugaucaccccuggcaccaacaccagcaaucagguggcagugcuguaccagggcgugaacuguaccgaagugcccguggccauucacgccgaucagcugacaccuacauggcggguguacuccaccggcagcaauguguuucagaccagagccggcugucugaucggagccgagcacgugaacaauagcuacgagugcgacauccccaucggcgcuggcaucugugccagcuaccagacacagacaaacagccccagacgggcuagaagcguggccagccagagcaucauugccuacacaaugucucugggcgccgagaacagcguggccuacuccaacaacucuaucgcuauccccaccaacuucaccaucagcgugaccaccgagauccugccuguguccaugaccaagaccagcguggacugcaccauguacaucugcggcgauuccaccgagugcuccaaccugcugcugcaguacggcagcuucugcacccagcugaauagagcccugacagggaucgccguggaacaggacaagaacacccaagagguguucgcccaagugaagcaaaucuacaagaccccuccuaucaaggacuucggcggcuucaauuucagccagauucugcccgauccuagcaagcccagcaagcggagcuucaucgaggaccugcuguucaacaaagugacacuggccgacgccggcuucaucaagcaguauggcgauugucugggcgacauugccgccagggaucugauuugcgcccagaaguuuaacggacugacagugcugccuccucugcugaccgaugagaugaucgcccaguacacaucugcccugcuggccggcacaaucacaagcggcuggacauuuggagcuggcgccgcucugcagauccccuuugcuaugcagauggccuaccgguucaacggcaucggagugacccagaaugugcuguacgagaaccagaagcugaucgccaaccaguucaacagcgccaucggcaagauccaggacagccugagcagcacagcaagcgcccugggaaagcugcaggacguggucaaccagaaugcccaggcacugaacacccuggucaagcagcuguccuccaacuucggcgccaucagcucugugcugaacgauauccugagcagacuggacaaggucgaggccgaggugcagaucgacagacugaucacaggcagacugcagagccuccagacauacgugacccagcagcugaucagagccgccgagauuagagccucugccaaucuggccgccaccaagaugucugagugugugcugggccagagcaagagaguggacuuuugcggcaagggcuaccaccugaugagcuucccucagucugccccucacggcgugguguuucugcacgugacauaugugcccgcucaagagaagaauuucaccaccgcuccagccaucugccacgacggcaaagcccacuuuccuagagaaggcguguucguguccaacggcacccauugguucgugacacagcggaacuucuacgagccccagaucaucaccaccgacaacaccuucgugucuggcaacugcgacguugugaucggcauugugaacaauaccguguacgacccucugcagcccgagcuggacagcuucaaagaggaacuggacaaguacuuuaagaaccacacaagccccgacguggaccugggcgauaucagcggaaucaaugccagcgucgugaacauccagaaagagaucgaccggcugaacgagguggccaagaaucugaacgagagccugaucgaccugcaagaacuggggaaguacgagcaguacaucaaguggcccugguacaucuggcugggcuuuaucgccggacugauugccaucgugaucgucacaaucaugcuguguugcaugaccagcugcuguagcugccugaagggcuguuguagcuguggcagcugcugcaaguucgacgaggacgauucugagcccgugcugaagggcgugaaacugcacuacaccugaggacuaguuauaagacugacuagcccgaugggccucccaacgggcccuccuccccuccuugcaccgagauuaauaaaaaaaaaaaaaaaaaaaaaaaaaaaaaaaaaaaaaaaaaaaaaaaaaaaaaaaaaaaaaaaaaaaaaaaaaaaaaaaaaaaaaaaaaaaaaaaaaaaa

SEQ ID NO: 25471 - RNA, 4005 nt, Artificial Sequence
  SARS-CoV-2/Wuhan/WIV05/2019__EPI_ISL_402128 spike protein mRNA gc mod (1-1273)(H69del_V70del_A222V_Y453F_S477N_D614G_I692V)
aggagaaagcuuaccauguucguguuucuggugcugcugccccugguguccagccagugugugaaccugaccaccagaacacagcugccuccagccuacaccaacagcuucaccagaggcguguacuaccccgacaagguguucagauccagcgugcugcacucuacccaggaccuguuccugccuuucuucagcaacgugaccugguuccacgccaucuccggcaccaauggcaccaagagauucgacaaccccgugcugcccuucaacgacgggguguacuuugccagcaccgagaaguccaacaucaucagaggcuggaucuucggcaccacacuggacagcaagacccagagccugcugaucgugaacaacgccaccaacguggucaucaaagugugcgaguuccaguucugcaacgaccccuuccugggcgucuacuaccacaagaacaacaagagcuggauggaaagcgaguuccggguguacagcagcgccaacaacugcaccuucgaguacgugucccagccuuuccugauggaccuggaaggcaagcagggcaacuucaagaaccugcgcgaguucguguucaagaacaucgacggcuacuucaaaaucuacagcaagcacaccccuaucaaccucgugcgggaucugccucagggcuucucugugcuggaaccccugguggaucugcccaucggcaucaacaucacccgguuucagacacugcuggcccugcacagaagcuaccugacaccuggcgauagcagcagcggauggacagcuggugccgccgcuuacuaugugggcuaccugcagccuagaaccuuccugcugaaguacaacgagaacggcaccaucaccgacgccguggauugugcucuggauccucugagcgagacaaagugcacccugaaguccuucaccguggaaaagggcaucuaccagaccagcaacuuccgggugcagcccaccgaauccaucgugcgguuccccaauaucaccaaucugugccccuucggcgagguguucaaugccaccagauucgccucuguguacgccuggaaccggaagcggaucagcaauugcguggccgacuacuccgugcuguacaacuccgccagcuucagcaccuucaagugcuacggcguguccccuaccaagcugaacgaccugugcuucacaaacguguacgccgacagcuucgugauccggggagaugaagugcggcagauugccccuggacagacaggcaagaucgccgacuacaacuacaagcugcccgacgacuucaccggcugugugauugccuggaacagcaacaaccuggacuccaaagucggcggcaacuacaauuaccuguuccggcuguuccggaaguccaaucugaagcccuucgagcgggacaucagcaccgaaaucuaucaggccggcaacaccccuugcaacggcguggaaggcuucaacugcuacuucccacugcaguccuacggcuuucagcccacaaauggcgugggcuaucagcccuacagagugguggugcugagcuucgaacugcugcaugcuccugccacagugugcggcccuaagaaaagcaccaaucucgugaagaacaaaugcgugaacuucaacuucaacggccugaccggcaccggcgugcugacagagagcaacaagaaguuccugccauuccagcaguuuggccgggauaucgccgauaccacagacgccguuagagauccccagacacuggaaauccuggacaucaccccaugcagcuucggcggagugucugugaucaccccuggcaccaacaccagcaaucagguggcagugcuguaccagggcgugaacuguaccgaagugcccguggccauucacgccgaucagcugacaccuacauggcggguguacuccaccggcagcaauguguuucagaccagagccggcugucugaucggagccgagcacgugaacaauagcuacgagugcgacauccccaucggcgcuggcaucugugccagcuaccagacacagacaaacagccccagacgggcuagaagcguggccagccagagcgugauugccuacacaaugucucugggcgccgagaacagcguggccuacuccaacaacucuaucgcuauccccaccaacuucaccaucagcgugaccaccgagauccugccuguguccaugaccaagaccagcguggacugcaccauguacaucugcggcgauuccaccgagugcuccaaccugcugcugcaguacggcagcuucugcacccagcugaauagagcccugacagggaucgccguggaacaggacaagaacacccaagagguguucgcccaagugaagcaaaucuacaagaccccuccuaucaaggacuucggcggcuucaauuucagccagauucugcccgauccuagcaagcccagcaagcggagcuucaucgaggaccugcuguucaacaaagugacacuggccgacgccggcuucaucaagcaguauggcgauugucugggcgacauugccgccagggaucugauuugcgcccagaaguuuaacggacugacagugcugccuccucugcugaccgaugagaugaucgcccaguacacaucugcccugcuggccggcacaaucacaagcggcuggacauuuggagcuggcgccgcucugcagauccccuuugcuaugcagauggccuaccgguucaacggcaucggagugacccagaaugugcuguacgagaaccagaagcugaucgccaaccaguucaacagcgccaucggcaagauccaggacagccugagcagcacagcaagcgcccugggaaagcugcaggacguggucaaccagaaugcccaggcacugaacacccuggucaagcagcuguccuccaacuucggcgccaucagcucugugcugaacgauauccugagcagacuggacaaggucgaggccgaggugcagaucgacagacugaucacaggcagacugcagagccuccagacauacgugacccagcagcugaucagagccgccgagauuagagccucugccaaucuggccgccaccaagaugucugagugugugcugggccagagcaagagaguggacuuuugcggcaagggcuaccaccugaugagcuucccucagucugccccucacggcgugguguuucugcacgugacauaugugcccgcucaagagaagaauuucaccaccgcuccagccaucugccacgacggcaaagcccacuuuccuagagaaggcguguucguguccaacggcacccauugguucgugacacagcggaacuucuacgagccccagaucaucaccaccgacaacaccuucgugucuggcaacugcgacguugugaucggcauugugaacaauaccguguacgacccucugcagcccgagcuggacagcuucaaagaggaacuggacaaguacuuuaagaaccacacaagccccgacguggaccugggcgauaucagcggaaucaaugccagcgucgugaacauccagaaagagaucgaccggcugaacgagguggccaagaaucugaacgagagccugaucgaccugcaagaacuggggaaguacgagcaguacaucaaguggcccugguacaucuggcugggcuuuaucgccggacugauugccaucgugauggucacaaucaugcuguguugcaugaccagcugcuguagcugccugaagggcuguuguagcuguggcagcugcugcaaguucgacgaggacgauucugagcccgugcugaagggcgugaaacugcacuacaccugaggacuaguuauaagacugacuagcccgaugggccucccaacgggcccuccuccccuccuugcaccgagauuaauaaaaaaaaaaaaaaaaaaaaaaaaaaaaaaaaaaaaaaaaaaaaaaaaaaaaaaaaaaaaaaaaaaaaaaaaaaaaaaaaaaaaaaaaaaaaaaaaaaaa

SEQ ID NO: 25472 - RNA, 4005 nt, Artificial Sequence
  SARS-CoV-2/Wuhan/WIV05/2019__EPI_ISL_402128 spike protein mRNA gc mod (1-1273)(H69del_V70del_Y453F_D614G_I692V_M1229I)
aggagaaagcuuaccauguucguguuucuggugcugcugccccugguguccagccagugugugaaccugaccaccagaacacagcugccuccagccuacaccaacagcuucaccagaggcguguacuaccccgacaagguguucagauccagcgugcugcacucuacccaggaccuguuccugccuuucuucagcaacgugaccugguuccacgccaucuccggcaccaauggcaccaagagauucgacaaccccgugcugcccuucaacgacgggguguacuuugccagcaccgagaaguccaacaucaucagaggcuggaucuucggcaccacacuggacagcaagacccagagccugcugaucgugaacaacgccaccaacguggucaucaaagugugcgaguuccaguucugcaacgaccccuuccugggcgucuacuaccacaagaacaacaagagcuggauggaaagcgaguuccggguguacagcagcgccaacaacugcaccuucgaguacgugucccagccuuuccugauggaccuggaaggcaagcagggcaacuucaagaaccugcgcgaguucguguucaagaacaucgacggcuacuucaaaaucuacagcaagcacaccccuaucaaccucgugcgggaucugccucagggcuucucugcucuggaaccccugguggaucugcccaucggcaucaacaucacccgguuucagacacugcuggcccugcacagaagcuaccugacaccuggcgauagcagcagcggauggacagcuggugccgccgcuuacuaugugggcuaccugcagccuagaaccuuccugcugaaguacaacgagaacggcaccaucaccgacgccguggauugugcucuggauccucugagcgagacaaagugcacccugaaguccuucaccguggaaaagggcaucuaccagaccagcaacuuccgggugcagcccaccgaauccaucgugcgguuccccaauaucaccaaucugugccccuucggcgagguguucaaugccaccagauucgccucuguguacgccuggaaccggaagcggaucagcaauugcguggccgacuacuccgugcuguacaacuccgccagcuucagcaccuucaagugcuacggcguguccccuaccaagcugaacgaccugugcuucacaaacguguacgccgacagcuucgugauccggggagaugaagugcggcagauugccccuggacagacaggcaagaucgccgacuacaacuacaagcugcccgacgacuucaccggcugugugauugccuggaacagcaacaaccuggacuccaaagucggcggcaacuacaauuaccuguuccggcuguuccggaaguccaaucugaagcccuucgagcgggacaucagcaccgaaaucuaucaggccggcagcaccccuugcaacggcguggaaggcuucaacugcuacuucccacugcaguccuacggcuuucagcccacaaauggcgugggcuaucagcccuacagagugguggugcugagcuucgaacugcugcaugcuccugccacagugugcggcccuaagaaaagcaccaaucucgugaagaacaaaugcgugaacuucaacuucaacggccugaccggcaccggcgugcugacagagagcaacaagaaguuccugccauuccagcaguuuggccgggauaucgccgauaccacagacgccguuagagauccccagacacuggaaauccuggacaucaccccaugcagcuucggcggagugucugugaucaccccuggcaccaacaccagcaaucagguggcagugcuguaccagggcgugaacuguaccgaagugcccguggccauucacgccgaucagcugacaccuacauggcggguguacuccaccggcagcaauguguuucagaccagagccggcugucugaucggagccgagcacgugaacaauagcuacgagugcgacauccccaucggcgcuggcaucugugccagcuaccagacacagacaaacagccccagacgggcuagaagcguggccagccagagcgugauugccuacacaaugucucugggcgccgagaacagcguggccuacuccaacaacucuaucgcuauccccaccaacuucaccaucagcgugaccaccgagauccugccuguguccaugaccaagaccagcguggacugcaccauguacaucugcggcgauuccaccgagugcuccaaccugcugcugcaguacggcagcuucugcacccagcugaauagagcccugacagggaucgccguggaacaggacaagaacacccaagagguguucgcccaagugaagcaaaucuacaagaccccuccuaucaaggacuucggcggcuucaauuucagccagauucugcccgauccuagcaagcccagcaagcggagcuucaucgaggaccugcuguucaacaaagugacacuggccgacgccggcuucaucaagcaguauggcgauugucugggcgacauugccgccagggaucugauuugcgcccagaaguuuaacggacugacagugcugccuccucugcugaccgaugagaugaucgcccaguacacaucugcccugcuggccggcacaaucacaagcggcuggacauuuggagcuggcgccgcucugcagauccccuuugcuaugcagauggccuaccgguucaacggcaucggagugacccagaaugugcuguacgagaaccagaagcugaucgccaaccaguucaacagcgccaucggcaagauccaggacagccugagcagcacagcaagcgcccugggaaagcugcaggacguggucaaccagaaugcccaggcacugaacacccuggucaagcagcuguccuccaacuucggcgccaucagcucugugcugaacgauauccugagcagacuggacaaggucgaggccgaggugcagaucgacagacugaucacaggcagacugcagagccuccagacauacgugacccagcagcugaucagagccgccgagauuagagccucugccaaucuggccgccaccaagaugucugagugugugcugggccagagcaagagaguggacuuuugcggcaagggcuaccaccugaugagcuucccucagucugccccucacggcgugguguuucugcacgugacauaugugcccgcucaagagaagaauuucaccaccgcuccagccaucugccacgacggcaaagcccacuuuccuagagaaggcguguucguguccaacggcacccauugguucgugacacagcggaacuucuacgagccccagaucaucaccaccgacaacaccuucgugucuggcaacugcgacguugugaucggcauugugaacaauaccguguacgacccucugcagcccgagcuggacagcuucaaagaggaacuggacaaguacuuuaagaaccacacaagccccgacguggaccugggcgauaucagcggaaucaaugccagcgucgugaacauccagaaagagaucgaccggcugaacgagguggccaagaaucugaacgagagccugaucgaccugcaagaacuggggaaguacgagcaguacaucaaguggcccugguacaucuggcugggcuuuaucgccggacugauugccaucgugaucgucacaaucaugcuguguugcaugaccagcugcuguagcugccugaagggcuguuguagcuguggcagcugcugcaaguucgacgaggacgauucugagcccgugcugaagggcgugaaacugcacuacaccugaggacuaguuauaagacugacuagcccgaugggccucccaacgggcccuccuccccuccuugcaccgagauuaauaaaaaaaaaaaaaaaaaaaaaaaaaaaaaaaaaaaaaaaaaaaaaaaaaaaaaaaaaaaaaaaaaaaaaaaaaaaaaaaaaaaaaaaaaaaaaaaaaaaa

SEQ ID NO: 25473 - RNA, 4002 nt, Artificial Sequence
  SARS-CoV-2/Wuhan/WIV05/2019__EPI_ISL_402128 spike protein mRNA gc mod (1-1273)(H69del_V70del_Y144del_N501Y_A570D_D614G_P681H_T716I_S982 A_D1118H)
aggagaaagcuuaccauguucguguuucuggugcugcugccccugguguccagccagugugugaaccugaccaccagaacacagcugccuccagccuacaccaacagcuucaccagaggcguguacuaccccgacaagguguucagauccagcgugcugcacucuacccaggaccuguuccugccuuucuucagcaacgugaccugguuccacgccaucuccggcaccaauggcaccaagagauucgacaaccccgugcugcccuucaacgacgggguguacuuugccagcaccgagaaguccaacaucaucagaggcuggaucuucggcaccacacuggacagcaagacccagagccugcugaucgugaacaacgccaccaacguggucaucaaagugugcgaguuccaguucugcaacgaccccuuccugggcgucuaccacaagaacaacaagagcuggauggaaagcgaguuccggguguacagcagcgccaacaacugcaccuucgaguacgugucccagccuuuccugauggaccuggaaggcaagcagggcaacuucaagaaccugcgcgaguucguguucaagaacaucgacggcuacuucaaaaucuacagcaagcacaccccuaucaaccucgugcgggaucugccucagggcuucucugcucuggaaccccugguggaucugcccaucggcaucaacaucacccgguuucagacacugcuggcccugcacagaagcuaccugacaccuggcgauagcagcagcggauggacagcuggugccgccgcuuacuaugugggcuaccugcagccuagaaccuuccugcugaaguacaacgagaacggcaccaucaccgacgccguggauugugcucuggauccucugagcgagacaaagugcacccugaaguccuucaccguggaaaagggcaucuaccagaccagcaacuuccgggugcagcccaccgaauccaucgugcgguuccccaauaucaccaaucugugccccuucggcgagguguucaaugccaccagauucgccucuguguacgccuggaaccggaagcggaucagcaauugcguggccgacuacuccgugcuguacaacuccgccagcuucagcaccuucaagugcuacggcguguccccuaccaagcugaacgaccugugcuucacaaacguguacgccgacagcuucgugauccggggagaugaagugcggcagauugccccuggacagacaggcaagaucgccgacuacaacuacaagcugcccgacgacuucaccggcugugugauugccuggaacagcaacaaccuggacuccaaagucggcggcaacuacaauuaccuguaccggcuguuccggaaguccaaucugaagcccuucgagcgggacaucagcaccgaaaucuaucaggccggcagcaccccuugcaacggcguggaaggcuucaacugcuacuucccacugcaguccuacggcuuucagcccacauacggcgugggcuaucagcccuacagagugguggugcugagcuucgaacugcugcaugcuccugccacagugugcggcccuaagaaaagcaccaaucucgugaagaacaaaugcgugaacuucaacuucaacggccugaccggcaccggcgugcugacagagagcaacaagaaguuccugccauuccagcaguuuggccgggauaucgacgauaccacagacgccguuagagauccccagacacuggaaauccuggacaucaccccaugcagcuucggcggagugucugugaucaccccuggcaccaacaccagcaaucagguggcagugcuguaccagggcgugaacuguaccgaagugcccguggccauucacgccgaucagcugacaccuacauggcggguguacuccaccggcagcaauguguuucagaccagagccggcugucugaucggagccgagcacgugaacaauagcuacgagugcgacauccccaucggcgcuggcaucugugccagcuaccagacacagacaaacagccacagacgggcuagaagcguggccagccagagcaucauugccuacacaaugucucugggcgccgagaacagcguggccuacuccaacaacucuaucgcuauccccaucaacuucaccaucagcgugaccaccgagauccugccuguguccaugaccaagaccagcguggacugcaccauguacaucugcggcgauuccaccgagugcuccaaccugcugcugcaguacggcagcuucugcacccagcugaauagagcccugacagggaucgccguggaacaggacaagaacacccaagagguguucgcccaagugaagcaaaucuacaagaccccuccuaucaaggacuucggcggcuucaauuucagccagauucugcccgauccuagcaagcccagcaagcggagcuucaucgaggaccugcuguucaacaaagugacacuggccgacgccggcuucaucaagcaguauggcgauugucugggcgacauugccgccagggaucugauuugcgcccagaaguuuaacggacugacagugcugccuccucugcugaccgaugagaugaucgcccaguacacaucugcccugcuggccggcacaaucacaagcggcuggacauuuggagcuggcgccgcucugcagauccccuuugcuaugcagauggccuaccgguucaacggcaucggagugacccagaaugugcuguacgagaaccagaagcugaucgccaaccaguucaacagcgccaucggcaagauccaggacagccugagcagcacagcaagcgcccugggaaagcugcaggacguggucaaccagaaugcccaggcacugaacacccuggucaagcagcuguccuccaacuucggcgccaucagcucugugcugaacgauauccuggccagacuggacaaggucgaggccgaggugcagaucgacagacugaucacaggcagacugcagagccuccagacauacgugacccagcagcugaucagagccgccgagauuagagccucugccaaucuggccgccaccaagaugucugagugugugcugggccagagcaagagaguggacuuuugcggcaagggcuaccaccugaugagcuucccucagucugccccucacggcgugguguuucugcacgugacauaugugcccgcucaagagaagaauuucaccaccgcuccagccaucugccacgacggcaaagcccacuuuccuagagaaggcguguucguguccaacggcacccauugguucgugacacagcggaacuucuacgagccccagaucaucaccacccacaacaccuucgugucuggcaacugcgacguugugaucggcauugugaacaauaccguguacgacccucugcagcccgagcuggacagcuucaaagaggaacuggacaaguacuuuaagaaccacacaagccccgacguggaccugggcgauaucagcggaaucaaugccagcgucgugaacauccagaaagagaucgaccggcugaacgagguggccaagaaucugaacgagagccugaucgaccugcaagaacuggggaaguacgagcaguacaucaaguggcccugguacaucuggcugggcuuuaucgccggacugauugccaucgugauggucacaaucaugcuguguugcaugaccagcugcuguagcugccugaagggcuguuguagcuguggcagcugcugcaaguucgacgaggacgauucugagcccgugcugaagggcgugaaacugcacuacaccugaggacuaguuauaagacugacuagcccgaugggccucccaacgggcccuccuccccuccuugcaccgagauuaauaaaaaaaaaaaaaaaaaaaaaaaaaaaaaaaaaaaaaaaaaaaaaaaaaaaaaaaaaaaaaaaaaaaaaaaaaaaaaaaaaaaaaaaaaaaaaaaaaaaa

SEQ ID NO: 25474 - RNA, 4011 nt, Artificial Sequence
  SARS-CoV-2/Wuhan/WIV05/2019__EPI_ISL_402128 spike protein mRNA gc mod (1-1273)(K417N_E484K_N501Y_D614G)
aggagaaagcuuaccauguucguguuucuggugcugcugccccugguguccagccagugugugaaccugaccaccagaacacagcugccuccagccuacaccaacagcuucaccagaggcguguacuaccccgacaagguguucagauccagcgugcugcacucuacccaggaccuguuccugccuuucuucagcaacgugaccugguuccacgccauccacguguccggcaccaauggcaccaagagauucgacaaccccgugcugcccuucaacgacgggguguacuuugccagcaccgagaaguccaacaucaucagaggcuggaucuucggcaccacacuggacagcaagacccagagccugcugaucgugaacaacgccaccaacguggucaucaaagugugcgaguuccaguucugcaacgaccccuuccugggcgucuacuaccacaagaacaacaagagcuggauggaaagcgaguuccggguguacagcagcgccaacaacugcaccuucgaguacgugucccagccuuuccugauggaccuggaaggcaagcagggcaacuucaagaaccugcgcgaguucguguucaagaacaucgacggcuacuucaaaaucuacagcaagcacaccccuaucaaccucgugcgggaucugccucagggcuucucugcucuggaaccccugguggaucugcccaucggcaucaacaucacccgguuucagacacugcuggcccugcacagaagcuaccugacaccuggcgauagcagcagcggauggacagcuggugccgccgcuuacuaugugggcuaccugcagccuagaaccuuccugcugaaguacaacgagaacggcaccaucaccgacgccguggauugugcucuggauccucugagcgagacaaagugcacccugaaguccuucaccguggaaaagggcaucuaccagaccagcaacuuccgggugcagcccaccgaauccaucgugcgguuccccaauaucaccaaucugugccccuucggcgagguguucaaugccaccagauucgccucuguguacgccuggaaccggaagcggaucagcaauugcguggccgacuacuccgugcuguacaacuccgccagcuucagcaccuucaagugcuacggcguguccccuaccaagcugaacgaccugugcuucacaaacguguacgccgacagcuucgugauccggggagaugaagugcggcagauugccccuggacagacaggcaacaucgccgacuacaacuacaagcugcccgacgacuucaccggcugugugauugccuggaacagcaacaaccuggacuccaaagucggcggcaacuacaauuaccuguaccggcuguuccggaaguccaaucugaagcccuucgagcgggacaucagcaccgaaaucuaucaggccggcagcaccccuugcaacggcgugaagggcuucaacugcuacuucccacugcaguccuacggcuuucagcccacauacggcgugggcuaucagcccuacagagugguggugcugagcuucgaacugcugcaugcuccugccacagugugcggcccuaagaaaagcaccaaucucgugaagaacaaaugcgugaacuucaacuucaacggccugaccggcaccggcgugcugacagagagcaacaagaaguuccugccauuccagcaguuuggccgggauaucgccgauaccacagacgccguuagagauccccagacacuggaaauccuggacaucaccccaugcagcuucggcggagugucugugaucaccccuggcaccaacaccagcaaucagguggcagugcuguaccagggcgugaacuguaccgaagugcccguggccauucacgccgaucagcugacaccuacauggcggguguacuccaccggcagcaauguguuucagaccagagccggcugucugaucggagccgagcacgugaacaauagcuacgagugcgacauccccaucggcgcuggcaucugugccagcuaccagacacagacaaacagccccagacgggcuagaagcguggccagccagagcaucauugccuacacaaugucucugggcgccgagaacagcguggccuacuccaacaacucuaucgcuauccccaccaacuucaccaucagcgugaccaccgagauccugccuguguccaugaccaagaccagcguggacugcaccauguacaucugcggcgauuccaccgagugcuccaaccugcugcugcaguacggcagcuucugcacccagcugaauagagcccugacagggaucgccguggaacaggacaagaacacccaagagguguucgcccaagugaagcaaaucuacaagaccccuccuaucaaggacuucggcggcuucaauuucagccagauucugcccgauccuagcaagcccagcaagcggagcuucaucgaggaccugcuguucaacaaagugacacuggccgacgccggcuucaucaagcaguauggcgauugucugggcgacauugccgccagggaucugauuugcgcccagaaguuuaacggacugacagugcugccuccucugcugaccgaugagaugaucgcccaguacacaucugcccugcuggccggcacaaucacaagcggcuggacauuuggagcuggcgccgcucugcagauccccuuugcuaugcagauggccuaccgguucaacggcaucggagugacccagaaugugcuguacgagaaccagaagcugaucgccaaccaguucaacagcgccaucggcaagauccaggacagccugagcagcacagcaagcgcccugggaaagcugcaggacguggucaaccagaaugcccaggcacugaacacccuggucaagcagcuguccuccaacuucggcgccaucagcucugugcugaacgauauccugagcagacuggacaaggucgaggccgaggugcagaucgacagacugaucacaggcagacugcagagccuccagacauacgugacccagcagcugaucagagccgccgagauuagagccucugccaaucuggccgccaccaagaugucugagugugugcugggccagagcaagagaguggacuuuugcggcaagggcuaccaccugaugagcuucccucagucugccccucacggcgugguguuucugcacgugacauaugugcccgcucaagagaagaauuucaccaccgcuccagccaucugccacgacggcaaagcccacuuuccuagagaaggcguguucguguccaacggcacccauugguucgugacacagcggaacuucuacgagccccagaucaucaccaccgacaacaccuucgugucuggcaacugcgacguugugaucggcauugugaacaauaccguguacgacccucugcagcccgagcuggacagcuucaaagaggaacuggacaaguacuuuaagaaccacacaagccccgacguggaccugggcgauaucagcggaaucaaugccagcgucgugaacauccagaaagagaucgaccggcugaacgagguggccaagaaucugaacgagagccugaucgaccugcaagaacuggggaaguacgagcaguacaucaaguggcccugguacaucuggcugggcuuuaucgccggacugauugccaucgugauggucacaaucaugcuguguugcaugaccagcugcuguagcugccugaagggcuguuguagcuguggcagcugcugcaaguucgacgaggacgauucugagcccgugcugaagggcgugaaacugcacuacaccugaggacuaguuauaagacugacuagcccgaugggccucccaacgggcccuccuccccuccuugcaccgagauuaauaaaaaaaaaaaaaaaaaaaaaaaaaaaaaaaaaaaaaaaaaaaaaaaaaaaaaaaaaaaaaaaaaaaaaaaaaaaaaaaaaaaaaaaaaaaaaaaaaaaa

SEQ ID NO: 25475 - RNA, 4002 nt, Artificial Sequence
  SARS-CoV-2/Wuhan/WIV05/2019__EPI_ISL_402128 spike protein mRNA gc mod (1-1273)(L18F_D80A_D215G_L242del_A243del_L244del_R246I_K417N_E484 K_N501Y_D614G_A701V)
aggagaaagcuuaccauguucguguuucuggugcugcugccccugguguccagccagugugugaacuucaccaccagaacacagcugccuccagccuacaccaacagcuucaccagaggcguguacuaccccgacaagguguucagauccagcgugcugcacucuacccaggaccuguuccugccuuucuucagcaacgugaccugguuccacgccauccacguguccggcaccaauggcaccaagagauucgccaaccccgugcugcccuucaacgacgggguguacuuugccagcaccgagaaguccaacaucaucagaggcuggaucuucggcaccacacuggacagcaagacccagagccugcugaucgugaacaacgccaccaacguggucaucaaagugugcgaguuccaguucugcaacgaccccuuccugggcgucuacuaccacaagaacaacaagagcuggauggaaagcgaguuccggguguacagcagcgccaacaacugcaccuucgaguacgugucccagccuuuccugauggaccuggaaggcaagcagggcaacuucaagaaccugcgcgaguucguguucaagaacaucgacggcuacuucaaaaucuacagcaagcacaccccuaucaaccucgugcggggccugccucagggcuucucugcucuggaaccccugguggaucugcccaucggcaucaacaucacccgguuucagacacugcacaucagcuaccugacaccuggcgauagcagcagcggauggacagcuggugccgccgcuuacuaugugggcuaccugcagccuagaaccuuccugcugaaguacaacgagaacggcaccaucaccgacgccguggauugugcucuggauccucugagcgagacaaagugcacccugaaguccuucaccguggaaaagggcaucuaccagaccagcaacuuccgggugcagcccaccgaauccaucgugcgguuccccaauaucaccaaucugugccccuucggcgagguguucaaugccaccagauucgccucuguguacgccuggaaccggaagcggaucagcaauugcguggccgacuacuccgugcuguacaacuccgccagcuucagcaccuucaagugcuacggcguguccccuaccaagcugaacgaccugugcuucacaaacguguacgccgacagcuucgugauccggggagaugaagugcggcagauugccccuggacagacaggcaacaucgccgacuacaacuacaagcugcccgacgacuucaccggcugugugauugccuggaacagcaacaaccuggacuccaaagucggcggcaacuacaauuaccuguaccggcuguuccggaaguccaaucugaagcccuucgagcgggacaucagcaccgaaaucuaucaggccggcagcaccccuugcaacggcgugaagggcuucaacugcuacuucccacugcaguccuacggcuuucagcccacauacggcgugggcuaucagcccuacagagugguggugcugagcuucgaacugcugcaugcuccugccacagugugcggcccuaagaaaagcaccaaucucgugaagaacaaaugcgugaacuucaacuucaacggccugaccggcaccggcgugcugacagagagcaacaagaaguuccugccauuccagcaguuuggccgggauaucgccgauaccacagacgccguuagagauccccagacacuggaaauccuggacaucaccccaugcagcuucggcggagugucugugaucaccccuggcaccaacaccagcaaucagguggcagugcuguaccagggcgugaacuguaccgaagugcccguggccauucacgccgaucagcugacaccuacauggcggguguacuccaccggcagcaauguguuucagaccagagccggcugucugaucggagccgagcacgugaacaauagcuacgagugcgacauccccaucggcgcuggcaucugugccagcuaccagacacagacaaacagccccagacgggcuagaagcguggccagccagagcaucauugccuacacaaugucucugggcguggagaacagcguggccuacuccaacaacucuaucgcuauccccaccaacuucaccaucagcgugaccaccgagauccugccuguguccaugaccaagaccagcguggacugcaccauguacaucugcggcgauuccaccgagugcuccaaccugcugcugcaguacggcagcuucugcacccagcugaauagagcccugacagggaucgccguggaacaggacaagaacacccaagagguguucgcccaagugaagcaaaucuacaagaccccuccuaucaaggacuucggcggcuucaauuucagccagauucugcccgauccuagcaagcccagcaagcggagcuucaucgaggaccugcuguucaacaaagugacacuggccgacgccggcuucaucaagcaguauggcgauugucugggcgacauugccgccagggaucugauuugcgcccagaaguuuaacggacugacagugcugccuccucugcugaccgaugagaugaucgcccaguacacaucugcccugcuggccggcacaaucacaagcggcuggacauuuggagcuggcgccgcucugcagauccccuuugcuaugcagauggccuaccgguucaacggcaucggagugacccagaaugugcuguacgagaaccagaagcugaucgccaaccaguucaacagcgccaucggcaagauccaggacagccugagcagcacagcaagcgcccugggaaagcugcaggacguggucaaccagaaugcccaggcacugaacacccuggucaagcagcuguccuccaacuucggcgccaucagcucugugcugaacgauauccugagcagacuggacaaggucgaggccgaggugcagaucgacagacugaucacaggcagacugcagagccuccagacauacgugacccagcagcugaucagagccgccgagauuagagccucugccaaucuggccgccaccaagaugucugagugugugcugggccagagcaagagaguggacuuuugcggcaagggcuaccaccugaugagcuucccucagucugccccucacggcgugguguuucugcacgugacauaugugcccgcucaagagaagaauuucaccaccgcuccagccaucugccacgacggcaaagcccacuuuccuagagaaggcguguucguguccaacggcacccauugguucgugacacagcggaacuucuacgagccccagaucaucaccaccgacaacaccuucgugucuggcaacugcgacguugugaucggcauugugaacaauaccguguacgacccucugcagcccgagcuggacagcuucaaagaggaacuggacaaguacuuuaagaaccacacaagccccgacguggaccugggcgauaucagcggaaucaaugccagcgucgugaacauccagaaagagaucgaccggcugaacgagguggccaagaaucugaacgagagccugaucgaccugcaagaacuggggaaguacgagcaguacaucaaguggcccugguacaucuggcugggcuuuaucgccggacugauugccaucgugauggucacaaucaugcuguguugcaugaccagcugcuguagcugccugaagggcuguuguagcuguggcagcugcugcaaguucgacgaggacgauucugagcccgugcugaagggcgugaaacugcacuacaccugaggacuaguuauaagacugacuagcccgaugggccucccaacgggcccuccuccccuccuugcaccgagauuaauaaaaaaaaaaaaaaaaaaaaaaaaaaaaaaaaaaaaaaaaaaaaaaaaaaaaaaaaaaaaaaaaaaaaaaaaaaaaaaaaaaaaaaaaaaaaaaaaaaaa

SEQ ID NO: 25476 - RNA, 4011 nt, Artificial Sequence
  SARS-CoV-2/Wuhan/WIV05/2019__EPI_ISL_402128 spike protein mRNA gc mod (1-1273)(E484K_D614G)
aggagaaagcuuaccauguucguguuucuggugcugcugccccugguguccagccagugugugaaccugaccaccagaacacagcugccuccagccuacaccaacagcuucaccagaggcguguacuaccccgacaagguguucagauccagcgugcugcacucuacccaggaccuguuccugccuuucuucagcaacgugaccugguuccacgccauccacguguccggcaccaauggcaccaagagauucgacaaccccgugcugcccuucaacgacgggguguacuuugccagcaccgagaaguccaacaucaucagaggcuggaucuucggcaccacacuggacagcaagacccagagccugcugaucgugaacaacgccaccaacguggucaucaaagugugcgaguuccaguucugcaacgaccccuuccugggcgucuacuaccacaagaacaacaagagcuggauggaaagcgaguuccggguguacagcagcgccaacaacugcaccuucgaguacgugucccagccuuuccugauggaccuggaaggcaagcagggcaacuucaagaaccugcgcgaguucguguucaagaacaucgacggcuacuucaaaaucuacagcaagcacaccccuaucaaccucgugcgggaucugccucagggcuucucugcucuggaaccccugguggaucugcccaucggcaucaacaucacccgguuucagacacugcuggcccugcacagaagcuaccugacaccuggcgauagcagcagcggauggacagcuggugccgccgcuuacuaugugggcuaccugcagccuagaaccuuccugcugaaguacaacgagaacggcaccaucaccgacgccguggauugugcucuggauccucugagcgagacaaagugcacccugaaguccuucaccguggaaaagggcaucuaccagaccagcaacuuccgggugcagcccaccgaauccaucgugcgguuccccaauaucaccaaucugugccccuucggcgagguguucaaugccaccagauucgccucuguguacgccuggaaccggaagcggaucagcaauugcguggccgacuacuccgugcuguacaacuccgccagcuucagcaccuucaagugcuacggcguguccccuaccaagcugaacgaccugugcuucacaaacguguacgccgacagcuucgugauccggggagaugaagugcggcagauugccccuggacagacaggcaagaucgccgacuacaacuacaagcugcccgacgacuucaccggcugugugauugccuggaacagcaacaaccuggacuccaaagucggcggcaacuacaauuaccuguaccggcuguuccggaaguccaaucugaagcccuucgagcgggacaucagcaccgaaaucuaucaggccggcagcaccccuugcaacggcgugaagggcuucaacugcuacuucccacugcaguccuacggcuuucagcccacaaauggcgugggcuaucagcccuacagagugguggugcugagcuucgaacugcugcaugcuccugccacagugugcggcccuaagaaaagcaccaaucucgugaagaacaaaugcgugaacuucaacuucaacggccugaccggcaccggcgugcugacagagagcaacaagaaguuccugccauuccagcaguuuggccgggauaucgccgauaccacagacgccguuagagauccccagacacuggaaauccuggacaucaccccaugcagcuucggcggagugucugugaucaccccuggcaccaacaccagcaaucagguggcagugcuguaccagggcgugaacuguaccgaagugcccguggccauucacgccgaucagcugacaccuacauggcggguguacuccaccggcagcaauguguuucagaccagagccggcugucugaucggagccgagcacgugaacaauagcuacgagugcgacauccccaucggcgcuggcaucugugccagcuaccagacacagacaaacagccccagacgggcuagaagcguggccagccagagcaucauugccuacacaaugucucugggcgccgagaacagcguggccuacuccaacaacucuaucgcuauccccaccaacuucaccaucagcgugaccaccgagauccugccuguguccaugaccaagaccagcguggacugcaccauguacaucugcggcgauuccaccgagugcuccaaccugcugcugcaguacggcagcuucugcacccagcugaauagagcccugacagggaucgccguggaacaggacaagaacacccaagagguguucgcccaagugaagcaaaucuacaagaccccuccuaucaaggacuucggcggcuucaauuucagccagauucugcccgauccuagcaagcccagcaagcggagcuucaucgaggaccugcuguucaacaaagugacacuggccgacgccggcuucaucaagcaguauggcgauugucugggcgacauugccgccagggaucugauuugcgcccagaaguuuaacggacugacagugcugccuccucugcugaccgaugagaugaucgcccaguacacaucugcccugcuggccggcacaaucacaagcggcuggacauuuggagcuggcgccgcucugcagauccccuuugcuaugcagauggccuaccgguucaacggcaucggagugacccagaaugugcuguacgagaaccagaagcugaucgccaaccaguucaacagcgccaucggcaagauccaggacagccugagcagcacagcaagcgcccugggaaagcugcaggacguggucaaccagaaugcccaggcacugaacacccuggucaagcagcuguccuccaacuucggcgccaucagcucugugcugaacgauauccugagcagacuggacaaggucgaggccgaggugcagaucgacagacugaucacaggcagacugcagagccuccagacauacgugacccagcagcugaucagagccgccgagauuagagccucugccaaucuggccgccaccaagaugucugagugugugcugggccagagcaagagaguggacuuuugcggcaagggcuaccaccugaugagcuucccucagucugccccucacggcgugguguuucugcacgugacauaugugcccgcucaagagaagaauuucaccaccgcuccagccaucugccacgacggcaaagcccacuuuccuagagaaggcguguucguguccaacggcacccauugguucgugacacagcggaacuucuacgagccccagaucaucaccaccgacaacaccuucgugucuggcaacugcgacguugugaucggcauugugaacaauaccguguacgacccucugcagcccgagcuggacagcuucaaagaggaacuggacaaguacuuuaagaaccacacaagccccgacguggaccugggcgauaucagcggaaucaaugccagcgucgugaacauccagaaagagaucgaccggcugaacgagguggccaagaaucugaacgagagccugaucgaccugcaagaacuggggaaguacgagcaguacaucaaguggcccugguacaucuggcugggcuuuaucgccggacugauugccaucgugauggucacaaucaugcuguguugcaugaccagcugcuguagcugccugaagggcuguuguagcuguggcagcugcugcaaguucgacgaggacgauucugagcccgugcugaagggcgugaaacugcacuacaccugaggacuaguuauaagacugacuagcccgaugggccucccaacgggcccuccuccccuccuugcaccgagauuaauaaaaaaaaaaaaaaaaaaaaaaaaaaaaaaaaaaaaaaaaaaaaaaaaaaaaaaaaaaaaaaaaaaaaaaaaaaaaaaaaaaaaaaaaaaaaaaaaaaaa

SEQ ID NO: 25477 - RNA, 4011 nt, Artificial Sequence
  SARS-CoV-2/Wuhan/WIV05/2019__EPI_ISL_402128 spike protein mRNA gc mod (1-1273)(L18F_T20N_P26S_D138Y_R190S_K417T_E484K_N501Y_D614G_H655Y _T1027I)
aggagaaagcuuaccauguucguguuucuggugcugcugccccugguguccagccagugugugaacuucaccaacagaacacagcugccuagcgccuacaccaacagcuucaccagaggcguguacuaccccgacaagguguucagauccagcgugcugcacucuacccaggaccuguuccugccuuucuucagcaacgugaccugguuccacgccauccacguguccggcaccaauggcaccaagagauucgacaaccccgugcugcccuucaacgacgggguguacuuugccagcaccgagaaguccaacaucaucagaggcuggaucuucggcaccacacuggacagcaagacccagagccugcugaucgugaacaacgccaccaacguggucaucaaagugugcgaguuccaguucugcaacuaccccuuccugggcgucuacuaccacaagaacaacaagagcuggauggaaagcgaguuccggguguacagcagcgccaacaacugcaccuucgaguacgugucccagccuuuccugauggaccuggaaggcaagcagggcaacuucaagaaccugagcgaguucguguucaagaacaucgacggcuacuucaaaaucuacagcaagcacaccccuaucaaccucgugcgggaucugccucagggcuucucugcucuggaaccccugguggaucugcccaucggcaucaacaucacccgguuucagacacugcuggcccugcacagaagcuaccugacaccuggcgauagcagcagcggauggacagcuggugccgccgcuuacuaugugggcuaccugcagccuagaaccuuccugcugaaguacaacgagaacggcaccaucaccgacgccguggauugugcucuggauccucugagcgagacaaagugcacccugaaguccuucaccguggaaaagggcaucuaccagaccagcaacuuccgggugcagcccaccgaauccaucgugcgguuccccaauaucaccaaucugugccccuucggcgagguguucaaugccaccagauucgccucuguguacgccuggaaccggaagcggaucagcaauugcguggccgacuacuccgugcuguacaacuccgccagcuucagcaccuucaagugcuacggcguguccccuaccaagcugaacgaccugugcuucacaaacguguacgccgacagcuucgugauccggggagaugaagugcggcagauugccccuggacagacaggcaccaucgccgacuacaacuacaagcugcccgacgacuucaccggcugugugauugccuggaacagcaacaaccuggacuccaaagucggcggcaacuacaauuaccuguaccggcuguuccggaaguccaaucugaagcccuucgagcgggacaucagcaccgaaaucuaucaggccggcagcaccccuugcaacggcgugaagggcuucaacugcuacuucccacugcaguccuacggcuuucagcccacauacggcgugggcuaucagcccuacagagugguggugcugagcuucgaacugcugcaugcuccugccacagugugcggcccuaagaaaagcaccaaucucgugaagaacaaaugcgugaacuucaacuucaacggccugaccggcaccggcgugcugacagagagcaacaagaaguuccugccauuccagcaguuuggccgggauaucgccgauaccacagacgccguuagagauccccagacacuggaaauccuggacaucaccccaugcagcuucggcggagugucugugaucaccccuggcaccaacaccagcaaucagguggcagugcuguaccagggcgugaacuguaccgaagugcccguggccauucacgccgaucagcugacaccuacauggcggguguacuccaccggcagcaauguguuucagaccagagccggcugucugaucggagccgaguacgugaacaauagcuacgagugcgacauccccaucggcgcuggcaucugugccagcuaccagacacagacaaacagccccagacgggcuagaagcguggccagccagagcaucauugccuacacaaugucucugggcgccgagaacagcguggccuacuccaacaacucuaucgcuauccccaccaacuucaccaucagcgugaccaccgagauccugccuguguccaugaccaagaccagcguggacugcaccauguacaucugcggcgauuccaccgagugcuccaaccugcugcugcaguacggcagcuucugcacccagcugaauagagcccugacagggaucgccguggaacaggacaagaacacccaagagguguucgcccaagugaagcaaaucuacaagaccccuccuaucaaggacuucggcggcuucaauuucagccagauucugcccgauccuagcaagcccagcaagcggagcuucaucgaggaccugcuguucaacaaagugacacuggccgacgccggcuucaucaagcaguauggcgauugucugggcgacauugccgccagggaucugauuugcgcccagaaguuuaacggacugacagugcugccuccucugcugaccgaugagaugaucgcccaguacacaucugcccugcuggccggcacaaucacaagcggcuggacauuuggagcuggcgccgcucugcagauccccuuugcuaugcagauggccuaccgguucaacggcaucggagugacccagaaugugcuguacgagaaccagaagcugaucgccaaccaguucaacagcgccaucggcaagauccaggacagccugagcagcacagcaagcgcccugggaaagcugcaggacguggucaaccagaaugcccaggcacugaacacccuggucaagcagcuguccuccaacuucggcgccaucagcucugugcugaacgauauccugagcagacuggacaaggucgaggccgaggugcagaucgacagacugaucacaggcagacugcagagccuccagacauacgugacccagcagcugaucagagccgccgagauuagagccucugccaaucuggccgccaucaagaugucugagugugugcugggccagagcaagagaguggacuuuugcggcaagggcuaccaccugaugagcuucccucagucugccccucacggcgugguguuucugcacgugacauaugugcccgcucaagagaagaauuucaccaccgcuccagccaucugccacgacggcaaagcccacuuuccuagagaaggcguguucguguccaacggcacccauugguucgugacacagcggaacuucuacgagccccagaucaucaccaccgacaacaccuucgugucuggcaacugcgacguugugaucggcauugugaacaauaccguguacgacccucugcagcccgagcuggacagcuucaaagaggaacuggacaaguacuuuaagaaccacacaagccccgacguggaccugggcgauaucagcggaaucaaugccagcgucgugaacauccagaaagagaucgaccggcugaacgagguggccaagaaucugaacgagagccugaucgaccugcaagaacuggggaaguacgagcaguacaucaaguggcccugguacaucuggcugggcuuuaucgccggacugauugccaucgugauggucacaaucaugcuguguugcaugaccagcugcuguagcugccugaagggcuguuguagcuguggcagcugcugcaaguucgacgaggacgauucugagcccgugcugaagggcgugaaacugcacuacaccugaggacuaguuauaagacugacuagcccgaugggccucccaacgggcccuccuccccuccuugcaccgagauuaauaaaaaaaaaaaaaaaaaaaaaaaaaaaaaaaaaaaaaaaaaaaaaaaaaaaaaaaaaaaaaaaaaaaaaaaaaaaaaaaaaaaaaaaaaaaaaaaaaaaa

SEQ ID NO: 25478 - RNA, 4011 nt, Artificial Sequence
  SARS-CoV-2/Wuhan/WIV05/2019__EPI_ISL_402128 spike protein mRNA gc mod (1-1273)(S13I_W152C_L452R_D614G)
aggagaaagcuuaccauguucguguuucuggugcugcugccccugguguccauccagugugugaaccugaccaccagaacacagcugccuccagccuacaccaacagcuucaccagaggcguguacuaccccgacaagguguucagauccagcgugcugcacucuacccaggaccuguuccugccuuucuucagcaacgugaccugguuccacgccauccacguguccggcaccaauggcaccaagagauucgacaaccccgugcugcccuucaacgacgggguguacuuugccagcaccgagaaguccaacaucaucagaggcuggaucuucggcaccacacuggacagcaagacccagagccugcugaucgugaacaacgccaccaacguggucaucaaagugugcgaguuccaguucugcaacgaccccuuccugggcgucuacuaccacaagaacaacaagagcugcauggaaagcgaguuccggguguacagcagcgccaacaacugcaccuucgaguacgugucccagccuuuccugauggaccuggaaggcaagcagggcaacuucaagaaccugcgcgaguucguguucaagaacaucgacggcuacuucaaaaucuacagcaagcacaccccuaucaaccucgugcgggaucugccucagggcuucucugcucuggaaccccugguggaucugcccaucggcaucaacaucacccgguuucagacacugcuggcccugcacagaagcuaccugacaccuggcgauagcagcagcggauggacagcuggugccgccgcuuacuaugugggcuaccugcagccuagaaccuuccugcugaaguacaacgagaacggcaccaucaccgacgccguggauugugcucuggauccucugagcgagacaaagugcacccugaaguccuucaccguggaaaagggcaucuaccagaccagcaacuuccgggugcagcccaccgaauccaucgugcgguuccccaauaucaccaaucugugccccuucggcgagguguucaaugccaccagauucgccucuguguacgccuggaaccggaagcggaucagcaauugcguggccgacuacuccgugcuguacaacuccgccagcuucagcaccuucaagugcuacggcguguccccuaccaagcugaacgaccugugcuucacaaacguguacgccgacagcuucgugauccggggagaugaagugcggcagauugccccuggacagacaggcaagaucgccgacuacaacuacaagcugcccgacgacuucaccggcugugugauugccuggaacagcaacaaccuggacuccaaagucggcggcaacuacaauuaccgcuaccggcuguuccggaaguccaaucugaagcccuucgagcgggacaucagcaccgaaaucuaucaggccggcagcaccccuugcaacggcguggaaggcuucaacugcuacuucccacugcaguccuacggcuuucagcccacaaauggcgugggcuaucagcccuacagagugguggugcugagcuucgaacugcugcaugcuccugccacagugugcggcccuaagaaaagcaccaaucucgugaagaacaaaugcgugaacuucaacuucaacggccugaccggcaccggcgugcugacagagagcaacaagaaguuccugccauuccagcaguuuggccgggauaucgccgauaccacagacgccguuagagauccccagacacuggaaauccuggacaucaccccaugcagcuucggcggagugucugugaucaccccuggcaccaacaccagcaaucagguggcagugcuguaccagggcgugaacuguaccgaagugcccguggccauucacgccgaucagcugacaccuacauggcggguguacuccaccggcagcaauguguuucagaccagagccggcugucugaucggagccgagcacgugaacaauagcuacgagugcgacauccccaucggcgcuggcaucugugccagcuaccagacacagacaaacagccccagacgggcuagaagcguggccagccagagcaucauugccuacacaaugucucugggcgccgagaacagcguggccuacuccaacaacucuaucgcuauccccaccaacuucaccaucagcgugaccaccgagauccugccuguguccaugaccaagaccagcguggacugcaccauguacaucugcggcgauuccaccgagugcuccaaccugcugcugcaguacggcagcuucugcacccagcugaauagagcccugacagggaucgccguggaacaggacaagaacacccaagagguguucgcccaagugaagcaaaucuacaagaccccuccuaucaaggacuucggcggcuucaauuucagccagauucugcccgauccuagcaagcccagcaagcggagcuucaucgaggaccugcuguucaacaaagugacacuggccgacgccggcuucaucaagcaguauggcgauugucugggcgacauugccgccagggaucugauuugcgcccagaaguuuaacggacugacagugcugccuccucugcugaccgaugagaugaucgcccaguacacaucugcccugcuggccggcacaaucacaagcggcuggacauuuggagcuggcgccgcucugcagauccccuuugcuaugcagauggccuaccgguucaacggcaucggagugacccagaaugugcuguacgagaaccagaagcugaucgccaaccaguucaacagcgccaucggcaagauccaggacagccugagcagcacagcaagcgcccugggaaagcugcaggacguggucaaccagaaugcccaggcacugaacacccuggucaagcagcuguccuccaacuucggcgccaucagcucugugcugaacgauauccugagcagacuggacaaggucgaggccgaggugcagaucgacagacugaucacaggcagacugcagagccuccagacauacgugacccagcagcugaucagagccgccgagauuagagccucugccaaucuggccgccaccaagaugucugagugugugcugggccagagcaagagaguggacuuuugcggcaagggcuaccaccugaugagcuucccucagucugccccucacggcgugguguuucugcacgugacauaugugcccgcucaagagaagaauuucaccaccgcuccagccaucugccacgacggcaaagcccacuuuccuagagaaggcguguucguguccaacggcacccauugguucgugacacagcggaacuucuacgagccccagaucaucaccaccgacaacaccuucgugucuggcaacugcgacguugugaucggcauugugaacaauaccguguacgacccucugcagcccgagcuggacagcuucaaagaggaacuggacaaguacuuuaagaaccacacaagccccgacguggaccugggcgauaucagcggaaucaaugccagcgucgugaacauccagaaagagaucgaccggcugaacgagguggccaagaaucugaacgagagccugaucgaccugcaagaacuggggaaguacgagcaguacaucaaguggcccugguacaucuggcugggcuuuaucgccggacugauugccaucgugauggucacaaucaugcuguguugcaugaccagcugcuguagcugccugaagggcuguuguagcuguggcagcugcugcaaguucgacgaggacgauucugagcccgugcugaagggcgugaaacugcacuacaccugaggacuaguuauaagacugacuagcccgaugggccucccaacgggcccuccuccccuccuugcaccgagauuaauaaaaaaaaaaaaaaaaaaaaaaaaaaaaaaaaaaaaaaaaaaaaaaaaaaaaaaaaaaaaaaaaaaaaaaaaaaaaaaaaaaaaaaaaaaaaaaaaaaaa

SEQ ID NO: 25479 - RNA, 4011 nt, Artificial Sequence
  SARS-CoV-2/Wuhan/WIV05/2019__EPI_ISL_402128 spike protein mRNA gc mod (1-1273)
aggagaaagcuuaccauguucguguuccuggugcugcugccucugguguccagccagugugugaaccugaccaccagaacacagcugccuccagccuacaccaacagcuuuaccagaggcguguacuaccccgacaagguguucagauccagcgugcugcacucuacccaggaccuguuccugccuuucuucagcaacgugaccugguuccacgccauccacguguccggcaccaauggcaccaagagauucgacaaccccgugcugcccuucaacgacgggguguacuuugccagcaccgagaaguccaacaucaucagaggcuggaucuucggcaccacacuggacagcaagacccagagccugcugaucgugaacaacgccaccaacguggucaucaaagugugcgaguuccaguucugcaacgaccccuuccugggcgucuacuaccacaagaacaacaagagcuggauggaaagcgaguuccggguguacagcagcgccaacaacugcaccuucgaguacgugucccagccuuuccugauggaccuggaaggcaagcagggcaacuucaagaaccugcgcgaguucguguuuaagaacaucgacggcuacuucaagaucuacagcaagcacaccccuaucaaccucgugcgggaucugccucagggcuucucugcucuggaaccccugguggaucugcccaucggcaucaacaucacccgguuucagacacugcuggcccugcacagaagcuaccugacaccuggcgauagcagcagcggauggacagcuggugccgccgcuuacuaugugggcuaccugcagccuagaaccuuccugcugaaguacaacgagaacggcaccaucaccgacgccguggauugugcucuggauccucugagcgagacaaagugcacccugaaguccuucaccguggaaaagggcaucuaccagaccagcaacuuccgggugcagcccaccgaauccaucgugcgguuccccaauaucaccaaucugugccccuucggcgagguguucaaugccaccagauucgccucuguguacgccuggaaccggaagcggaucagcaauugcguggccgacuacuccgugcuguacaacuccgccagcuucagcaccuucaagugcuacggcguguccccuaccaagcugaacgaccugugcuucacaaacguguacgccgacagcuucgugauccggggagaugaagugcggcagauugccccuggacagacaggcaagaucgccgacuacaacuacaagcugcccgacgacuucaccggcugugugauugccuggaacagcaacaaccuggacuccaaagucggcggcaacuacaauuaccuguaccggcuguuccggaaguccaaucugaagcccuucgagcgggacaucuccaccgagaucuaucaggccggcagcaccccuuguaacggcguggaaggcuucaacugcuacuucccacugcaguccuacggcuuucagcccacaaauggcgugggcuaucagcccuacagagugguggugcugagcuucgaacugcugcaugccccugccacagugugcggcccuaagaaaagcaccaaucucgugaagaacaaaugcgugaacuucaacuucaacggccugaccggcaccggcgugcugacagagagcaacaagaaguuccugccauuccagcaguuuggccgggauaucgccgauaccacagacgccguuagagauccccagacacuggaaauccuggacaucaccccuugcagcuucggcggagugucugugaucaccccuggcaccaacaccagcaaucagguggcagugcuguaccaggacgugaacuguaccgaagugcccguggccauucacgccgaucagcugacaccuacauggcggguguacuccaccggcagcaauguguuucagaccagagccggcugucugaucggagccgagcacgugaacaauagcuacgagugcgacauccccaucggcgcuggaaucugcgccagcuaccagacacagacaaacagcccucggagagccagaagcguggccagccagagcaucauugccuacacaaugucucugggcgccgagaacagcguggccuacuccaacaacucuaucgcuauccccaccaacuucaccaucagcgugaccacagagauccugccuguguccaugaccaagaccagcguggacugcaccauguacaucugcggcgauuccaccgagugcuccaaccugcugcugcaguacggcagcuucugcacccagcugaauagagcccugacagggaucgccguggaacaggacaagaacacccaagagguguucgcccaagugaagcagaucuacaagaccccuccuaucaaggacuucggcggcuucaauuucagccagauucugcccgauccuagcaagcccagcaagcggagcuucaucgaggaccugcuguucaacaaagugacacuggccgacgccggcuucaucaagcaguauggcgauugucugggcgacauugccgccagggaucugauuugcgcccagaaguuuaacggacugacagugcugccuccucugcugaccgaugagaugaucgcccaguacacaucugcccugcuggccggcacaaucacaagcggcuggacauuuggagcaggcgccgcucugcagauccccuuugcuaugcagauggccuaccgguucaacggcaucggagugacccagaaugugcuguacgagaaccagaagcugaucgccaaccaguucaacagcgccaucggcaagauccaggacagccugagcagcacagcaagcgcccugggaaagcugcaggacguggucaaccagaaugcccaggcacugaacacccuggucaagcagcuguccuccaacuucggcgccaucagcucugugcugaacgauauccugagcagacuggacaaggucgaggccgaggugcagaucgacagacugaucacaggcagacugcagagccuccagacauacgugacccagcagcugaucagagccgccgagauuagagccucugccaaucuggccgccaccaagaugucugagugugugcugggccagagcaagagaguggacuuuugcggcaagggcuaccaccugaugagcuucccucagucugccccucacggcgugguguuucugcacgugacauaugugcccgcucaagagaagaauuucaccaccgcuccagccaucugccacgacggcaaagcccacuuuccuagagaaggcguguucguguccaacggcacccauugguucgugacacagcggaacuucuacgagccccagaucaucaccaccgacaacaccuucgugucuggcaacugcgacgucgugaucggcauugugaacaauaccguguacgacccucugcagcccgagcuggacagcuucaaagaggaacuggacaaguacuuuaagaaccacacaagccccgacguggaccugggcgauaucagcggaaucaaugccagcgucgugaacauccagaaagagaucgaccggcugaacgagguggccaagaaucugaacgagagccugaucgaccugcaagaacuggggaaguacgagcaguacaucaaguggcccugguacaucuggcugggcuuuaucgccggacugauugccaucgugauggucacaaucaugcuguguugcaugaccagcugcuguagcugccugaagggcuguuguagcuguggcagcugcugcaaguucgacgaggacgauucugagcccgugcugaagggcgugaaacugcacuacacaugaggacuaguuauaagacugacuagcccgaugggccucccaacgggcccuccuccccuccuugcaccgagauuaauaaaaaaaaaaaaaaaaaaaaaaaaaaaaaaaaaaaaaaaaaaaaaaaaaaaaaaaaaaaaaaaaaaaaaaaaaaaaaaaaaaaaaaaaaaaaaaaaaaaa

SEQ ID NO: 25480 - RNA, 4011 nt, Artificial Sequence
  SARS-CoV-2/Wuhan/WIV05/2019__EPI_ISL_402128 spike protein mRNA gc mod (1-1273)(D614G)
aggagaaagcuuaccauguucguguuccuggugcugcugccucugguguccagccagugugugaaccugaccaccagaacacagcugccuccagccuacaccaacagcuuuaccagaggcguguacuaccccgacaagguguucagauccagcgugcugcacucuacccaggaccuguuccugccuuucuucagcaacgugaccugguuccacgccauccacguguccggcaccaauggcaccaagagauucgacaaccccgugcugcccuucaacgacgggguguacuuugccagcaccgagaaguccaacaucaucagaggcuggaucuucggcaccacacuggacagcaagacccagagccugcugaucgugaacaacgccaccaacguggucaucaaagugugcgaguuccaguucugcaacgaccccuuccugggcgucuacuaccacaagaacaacaagagcuggauggaaagcgaguuccggguguacagcagcgccaacaacugcaccuucgaguacgugucccagccuuuccugauggaccuggaaggcaagcagggcaacuucaagaaccugcgcgaguucguguuuaagaacaucgacggcuacuucaagaucuacagcaagcacaccccuaucaaccucgugcgggaucugccucagggcuucucugcucuggaaccccugguggaucugcccaucggcaucaacaucacccgguuucagacacugcuggcccugcacagaagcuaccugacaccuggcgauagcagcagcggauggacagcuggugccgccgcuuacuaugugggcuaccugcagccuagaaccuuccugcugaaguacaacgagaacggcaccaucaccgacgccguggauugugcucuggauccucugagcgagacaaagugcacccugaaguccuucaccguggaaaagggcaucuaccagaccagcaacuuccgggugcagcccaccgaauccaucgugcgguuccccaauaucaccaaucugugccccuucggcgagguguucaaugccaccagauucgccucuguguacgccuggaaccggaagcggaucagcaauugcguggccgacuacuccgugcuguacaacuccgccagcuucagcaccuucaagugcuacggcguguccccuaccaagcugaacgaccugugcuucacaaacguguacgccgacagcuucgugauccggggagaugaagugcggcagauugccccuggacagacaggcaagaucgccgacuacaacuacaagcugcccgacgacuucaccggcugugugauugccuggaacagcaacaaccuggacuccaaagucggcggcaacuacaauuaccuguaccggcuguuccggaaguccaaucugaagcccuucgagcgggacaucuccaccgagaucuaucaggccggcagcaccccuuguaacggcguggaaggcuucaacugcuacuucccacugcaguccuacggcuuucagcccacaaauggcgugggcuaucagcccuacagagugguggugcugagcuucgaacugcugcaugccccugccacagugugcggcccuaagaaaagcaccaaucucgugaagaacaaaugcgugaacuucaacuucaacggccugaccggcaccggcgugcugacagagagcaacaagaaguuccugccauuccagcaguuuggccgggauaucgccgauaccacagacgccguuagagauccccagacacuggaaauccuggacaucaccccuugcagcuucggcggagugucugugaucaccccuggcaccaacaccagcaaucagguggcagugcuguaccagggcgugaacuguaccgaagugcccguggccauucacgccgaucagcugacaccuacauggcggguguacuccaccggcagcaauguguuucagaccagagccggcugucugaucggagccgagcacgugaacaauagcuacgagugcgacauccccaucggcgcuggaaucugcgccagcuaccagacacagacaaacagcccucggagagccagaagcguggccagccagagcaucauugccuacacaaugucucugggcgccgagaacagcguggccuacuccaacaacucuaucgcuauccccaccaacuucaccaucagcgugaccacagagauccugccuguguccaugaccaagaccagcguggacugcaccauguacaucugcggcgauuccaccgagugcuccaaccugcugcugcaguacggcagcuucugcacccagcugaauagagcccugacagggaucgccguggaacaggacaagaacacccaagagguguucgcccaagugaagcagaucuacaagaccccuccuaucaaggacuucggcggcuucaauuucagccagauucugcccgauccuagcaagcccagcaagcggagcuucaucgaggaccugcuguucaacaaagugacacuggccgacgccggcuucaucaagcaguauggcgauugucugggcgacauugccgccagggaucugauuugcgcccagaaguuuaacggacugacagugcugccuccucugcugaccgaugagaugaucgcccaguacacaucugcccugcuggccggcacaaucacaagcggcuggacauuuggagcaggcgccgcucugcagauccccuuugcuaugcagauggccuaccgguucaacggcaucggagugacccagaaugugcuguacgagaaccagaagcugaucgccaaccaguucaacagcgccaucggcaagauccaggacagccugagcagcacagcaagcgcccugggaaagcugcaggacguggucaaccagaaugcccaggcacugaacacccuggucaagcagcuguccuccaacuucggcgccaucagcucugugcugaacgauauccugagcagacuggacaaggucgaggccgaggugcagaucgacagacugaucacaggcagacugcagagccuccagacauacgugacccagcagcugaucagagccgccgagauuagagccucugccaaucuggccgccaccaagaugucugagugugugcugggccagagcaagagaguggacuuuugcggcaagggcuaccaccugaugagcuucccucagucugccccucacggcgugguguuucugcacgugacauaugugcccgcucaagagaagaauuucaccaccgcuccagccaucugccacgacggcaaagcccacuuuccuagagaaggcguguucguguccaacggcacccauugguucgugacacagcggaacuucuacgagccccagaucaucaccaccgacaacaccuucgugucuggcaacugcgacgucgugaucggcauugugaacaauaccguguacgacccucugcagcccgagcuggacagcuucaaagaggaacuggacaaguacuuuaagaaccacacaagccccgacguggaccugggcgauaucagcggaaucaaugccagcgucgugaacauccagaaagagaucgaccggcugaacgagguggccaagaaucugaacgagagccugaucgaccugcaagaacuggggaaguacgagcaguacaucaaguggcccugguacaucuggcugggcuuuaucgccggacugauugccaucgugauggucacaaucaugcuguguugcaugaccagcugcuguagcugccugaagggcuguuguagcuguggcagcugcugcaaguucgacgaggacgauucugagcccgugcugaagggcgugaaacugcacuacacaugaggacuaguuauaagacugacuagcccgaugggccucccaacgggcccuccuccccuccuugcaccgagauuaauaaaaaaaaaaaaaaaaaaaaaaaaaaaaaaaaaaaaaaaaaaaaaaaaaaaaaaaaaaaaaaaaaaaaaaaaaaaaaaaaaaaaaaaaaaaaaaaaaaaa

SEQ ID NO: 25481 - RNA, 4011 nt, Artificial Sequence
  SARS-CoV-2/Wuhan/WIV05/2019__EPI_ISL_402128 spike protein mRNA gc mod (1-1273)(A222V_D614G)
aggagaaagcuuaccauguucguguuccuggugcugcugccucugguguccagccagugugugaaccugaccaccagaacacagcugccuccagccuacaccaacagcuuuaccagaggcguguacuaccccgacaagguguucagauccagcgugcugcacucuacccaggaccuguuccugccuuucuucagcaacgugaccugguuccacgccauccacguguccggcaccaauggcaccaagagauucgacaaccccgugcugcccuucaacgacgggguguacuuugccagcaccgagaaguccaacaucaucagaggcuggaucuucggcaccacacuggacagcaagacccagagccugcugaucgugaacaacgccaccaacguggucaucaaagugugcgaguuccaguucugcaacgaccccuuccugggcgucuacuaccacaagaacaacaagagcuggauggaaagcgaguuccggguguacagcagcgccaacaacugcaccuucgaguacgugucccagccuuuccugauggaccuggaaggcaagcagggcaacuucaagaaccugcgcgaguucguguuuaagaacaucgacggcuacuucaagaucuacagcaagcacaccccuaucaaccucgugcgggaucugccucagggcuucucugugcuggaaccccugguggaucugcccaucggcaucaacaucacccgguuucagacacugcuggcccugcacagaagcuaccugacaccuggcgauagcagcagcggauggacagcuggugccgccgcuuacuaugugggcuaccugcagccuagaaccuuccugcugaaguacaacgagaacggcaccaucaccgacgccguggauugugcucuggauccucugagcgagacaaagugcacccugaaguccuucaccguggaaaagggcaucuaccagaccagcaacuuccgggugcagcccaccgaauccaucgugcgguuccccaauaucaccaaucugugccccuucggcgagguguucaaugccaccagauucgccucuguguacgccuggaaccggaagcggaucagcaauugcguggccgacuacuccgugcuguacaacuccgccagcuucagcaccuucaagugcuacggcguguccccuaccaagcugaacgaccugugcuucacaaacguguacgccgacagcuucgugauccggggagaugaagugcggcagauugccccuggacagacaggcaagaucgccgacuacaacuacaagcugcccgacgacuucaccggcugugugauugccuggaacagcaacaaccuggacuccaaagucggcggcaacuacaauuaccuguaccggcuguuccggaaguccaaucugaagcccuucgagcgggacaucuccaccgagaucuaucaggccggcagcaccccuuguaacggcguggaaggcuucaacugcuacuucccacugcaguccuacggcuuucagcccacaaauggcgugggcuaucagcccuacagagugguggugcugagcuucgaacugcugcaugccccugccacagugugcggcccuaagaaaagcaccaaucucgugaagaacaaaugcgugaacuucaacuucaacggccugaccggcaccggcgugcugacagagagcaacaagaaguuccugccauuccagcaguuuggccgggauaucgccgauaccacagacgccguuagagauccccagacacuggaaauccuggacaucaccccuugcagcuucggcggagugucugugaucaccccuggcaccaacaccagcaaucagguggcagugcuguaccagggcgugaacuguaccgaagugcccguggccauucacgccgaucagcugacaccuacauggcggguguacuccaccggcagcaauguguuucagaccagagccggcugucugaucggagccgagcacgugaacaauagcuacgagugcgacauccccaucggcgcuggaaucugcgccagcuaccagacacagacaaacagcccucggagagccagaagcguggccagccagagcaucauugccuacacaaugucucugggcgccgagaacagcguggccuacuccaacaacucuaucgcuauccccaccaacuucaccaucagcgugaccacagagauccugccuguguccaugaccaagaccagcguggacugcaccauguacaucugcggcgauuccaccgagugcuccaaccugcugcugcaguacggcagcuucugcacccagcugaauagagcccugacagggaucgccguggaacaggacaagaacacccaagagguguucgcccaagugaagcagaucuacaagaccccuccuaucaaggacuucggcggcuucaauuucagccagauucugcccgauccuagcaagcccagcaagcggagcuucaucgaggaccugcuguucaacaaagugacacuggccgacgccggcuucaucaagcaguauggcgauugucugggcgacauugccgccagggaucugauuugcgcccagaaguuuaacggacugacagugcugccuccucugcugaccgaugagaugaucgcccaguacacaucugcccugcuggccggcacaaucacaagcggcuggacauuuggagcaggcgccgcucugcagauccccuuugcuaugcagauggccuaccgguucaacggcaucggagugacccagaaugugcuguacgagaaccagaagcugaucgccaaccaguucaacagcgccaucggcaagauccaggacagccugagcagcacagcaagcgcccugggaaagcugcaggacguggucaaccagaaugcccaggcacugaacacccuggucaagcagcuguccuccaacuucggcgccaucagcucugugcugaacgauauccugagcagacuggacaaggucgaggccgaggugcagaucgacagacugaucacaggcagacugcagagccuccagacauacgugacccagcagcugaucagagccgccgagauuagagccucugccaaucuggccgccaccaagaugucugagugugugcugggccagagcaagagaguggacuuuugcggcaagggcuaccaccugaugagcuucccucagucugccccucacggcgugguguuucugcacgugacauaugugcccgcucaagagaagaauuucaccaccgcuccagccaucugccacgacggcaaagcccacuuuccuagagaaggcguguucguguccaacggcacccauugguucgugacacagcggaacuucuacgagccccagaucaucaccaccgacaacaccuucgugucuggcaacugcgacgucgugaucggcauugugaacaauaccguguacgacccucugcagcccgagcuggacagcuucaaagaggaacuggacaaguacuuuaagaaccacacaagccccgacguggaccugggcgauaucagcggaaucaaugccagcgucgugaacauccagaaagagaucgaccggcugaacgagguggccaagaaucugaacgagagccugaucgaccugcaagaacuggggaaguacgagcaguacaucaaguggcccugguacaucuggcugggcuuuaucgccggacugauugccaucgugauggucacaaucaugcuguguugcaugaccagcugcuguagcugccugaagggcuguuguagcuguggcagcugcugcaaguucgacgaggacgauucugagcccgugcugaagggcgugaaacugcacuacacaugaggacuaguuauaagacugacuagcccgaugggccucccaacgggcccuccuccccuccuugcaccgagauuaauaaaaaaaaaaaaaaaaaaaaaaaaaaaaaaaaaaaaaaaaaaaaaaaaaaaaaaaaaaaaaaaaaaaaaaaaaaaaaaaaaaaaaaaaaaaaaaaaaaaa

SEQ ID NO: 25482 - RNA, 4011 nt, Artificial Sequence
  SARS-CoV-2/Wuhan/WIV05/2019__EPI_ISL_402128 spike protein mRNA gc mod (1-1273)(N439K_D614G)
aggagaaagcuuaccauguucguguuccuggugcugcugccucugguguccagccagugugugaaccugaccaccagaacacagcugccuccagccuacaccaacagcuuuaccagaggcguguacuaccccgacaagguguucagauccagcgugcugcacucuacccaggaccuguuccugccuuucuucagcaacgugaccugguuccacgccauccacguguccggcaccaauggcaccaagagauucgacaaccccgugcugcccuucaacgacgggguguacuuugccagcaccgagaaguccaacaucaucagaggcuggaucuucggcaccacacuggacagcaagacccagagccugcugaucgugaacaacgccaccaacguggucaucaaagugugcgaguuccaguucugcaacgaccccuuccugggcgucuacuaccacaagaacaacaagagcuggauggaaagcgaguuccggguguacagcagcgccaacaacugcaccuucgaguacgugucccagccuuuccugauggaccuggaaggcaagcagggcaacuucaagaaccugcgcgaguucguguuuaagaacaucgacggcuacuucaagaucuacagcaagcacaccccuaucaaccucgugcgggaucugccucagggcuucucugcucuggaaccccugguggaucugcccaucggcaucaacaucacccgguuucagacacugcuggcccugcacagaagcuaccugacaccuggcgauagcagcagcggauggacagcuggugccgccgcuuacuaugugggcuaccugcagccuagaaccuuccugcugaaguacaacgagaacggcaccaucaccgacgccguggauugugcucuggauccucugagcgagacaaagugcacccugaaguccuucaccguggaaaagggcaucuaccagaccagcaacuuccgggugcagcccaccgaauccaucgugcgguuccccaauaucaccaaucugugccccuucggcgagguguucaaugccaccagauucgccucuguguacgccuggaaccggaagcggaucagcaauugcguggccgacuacuccgugcuguacaacuccgccagcuucagcaccuucaagugcuacggcguguccccuaccaagcugaacgaccugugcuucacaaacguguacgccgacagcuucgugauccggggagaugaagugcggcagauugccccuggacagacaggcaagaucgccgacuacaacuacaagcugcccgacgacuucaccggcugugugauugccuggaacagcaagaaccuggacuccaaagucggcggcaacuacaauuaccuguaccggcuguuccggaaguccaaucugaagcccuucgagcgggacaucuccaccgagaucuaucaggccggcagcaccccuuguaacggcguggaaggcuucaacugcuacuucccacugcaguccuacggcuuucagcccacaaauggcgugggcuaucagcccuacagagugguggugcugagcuucgaacugcugcaugccccugccacagugugcggcccuaagaaaagcaccaaucucgugaagaacaaaugcgugaacuucaacuucaacggccugaccggcaccggcgugcugacagagagcaacaagaaguuccugccauuccagcaguuuggccgggauaucgccgauaccacagacgccguuagagauccccagacacuggaaauccuggacaucaccccuugcagcuucggcggagugucugugaucaccccuggcaccaacaccagcaaucagguggcagugcuguaccagggcgugaacuguaccgaagugcccguggccauucacgccgaucagcugacaccuacauggcggguguacuccaccggcagcaauguguuucagaccagagccggcugucugaucggagccgagcacgugaacaauagcuacgagugcgacauccccaucggcgcuggaaucugcgccagcuaccagacacagacaaacagcccucggagagccagaagcguggccagccagagcaucauugccuacacaaugucucugggcgccgagaacagcguggccuacuccaacaacucuaucgcuauccccaccaacuucaccaucagcgugaccacagagauccugccuguguccaugaccaagaccagcguggacugcaccauguacaucugcggcgauuccaccgagugcuccaaccugcugcugcaguacggcagcuucugcacccagcugaauagagcccugacagggaucgccguggaacaggacaagaacacccaagagguguucgcccaagugaagcagaucuacaagaccccuccuaucaaggacuucggcggcuucaauuucagccagauucugcccgauccuagcaagcccagcaagcggagcuucaucgaggaccugcuguucaacaaagugacacuggccgacgccggcuucaucaagcaguauggcgauugucugggcgacauugccgccagggaucugauuugcgcccagaaguuuaacggacugacagugcugccuccucugcugaccgaugagaugaucgcccaguacacaucugcccugcuggccggcacaaucacaagcggcuggacauuuggagcaggcgccgcucugcagauccccuuugcuaugcagauggccuaccgguucaacggcaucggagugacccagaaugugcuguacgagaaccagaagcugaucgccaaccaguucaacagcgccaucggcaagauccaggacagccugagcagcacagcaagcgcccugggaaagcugcaggacguggucaaccagaaugcccaggcacugaacacccuggucaagcagcuguccuccaacuucggcgccaucagcucugugcugaacgauauccugagcagacuggacaaggucgaggccgaggugcagaucgacagacugaucacaggcagacugcagagccuccagacauacgugacccagcagcugaucagagccgccgagauuagagccucugccaaucuggccgccaccaagaugucugagugugugcugggccagagcaagagaguggacuuuugcggcaagggcuaccaccugaugagcuucccucagucugccccucacggcgugguguuucugcacgugacauaugugcccgcucaagagaagaauuucaccaccgcuccagccaucugccacgacggcaaagcccacuuuccuagagaaggcguguucguguccaacggcacccauugguucgugacacagcggaacuucuacgagccccagaucaucaccaccgacaacaccuucgugucuggcaacugcgacgucgugaucggcauugugaacaauaccguguacgacccucugcagcccgagcuggacagcuucaaagaggaacuggacaaguacuuuaagaaccacacaagccccgacguggaccugggcgauaucagcggaaucaaugccagcgucgugaacauccagaaagagaucgaccggcugaacgagguggccaagaaucugaacgagagccugaucgaccugcaagaacuggggaaguacgagcaguacaucaaguggcccugguacaucuggcugggcuuuaucgccggacugauugccaucgugauggucacaaucaugcuguguugcaugaccagcugcuguagcugccugaagggcuguuguagcuguggcagcugcugcaaguucgacgaggacgauucugagcccgugcugaagggcgugaaacugcacuacacaugaggacuaguuauaagacugacuagcccgaugggccucccaacgggcccuccuccccuccuugcaccgagauuaauaaaaaaaaaaaaaaaaaaaaaaaaaaaaaaaaaaaaaaaaaaaaaaaaaaaaaaaaaaaaaaaaaaaaaaaaaaaaaaaaaaaaaaaaaaaaaaaaaaaa

SEQ ID NO: 25483 - RNA, 4011 nt, Artificial Sequence
  SARS-CoV-2/Wuhan/WIV05/2019__EPI_ISL_402128 spike protein mRNA gc mod (1-1273)(S477N_D614G)
aggagaaagcuuaccauguucguguuccuggugcugcugccucugguguccagccagugugugaaccugaccaccagaacacagcugccuccagccuacaccaacagcuuuaccagaggcguguacuaccccgacaagguguucagauccagcgugcugcacucuacccaggaccuguuccugccuuucuucagcaacgugaccugguuccacgccauccacguguccggcaccaauggcaccaagagauucgacaaccccgugcugcccuucaacgacgggguguacuuugccagcaccgagaaguccaacaucaucagaggcuggaucuucggcaccacacuggacagcaagacccagagccugcugaucgugaacaacgccaccaacguggucaucaaagugugcgaguuccaguucugcaacgaccccuuccugggcgucuacuaccacaagaacaacaagagcuggauggaaagcgaguuccggguguacagcagcgccaacaacugcaccuucgaguacgugucccagccuuuccugauggaccuggaaggcaagcagggcaacuucaagaaccugcgcgaguucguguuuaagaacaucgacggcuacuucaagaucuacagcaagcacaccccuaucaaccucgugcgggaucugccucagggcuucucugcucuggaaccccugguggaucugcccaucggcaucaacaucacccgguuucagacacugcuggcccugcacagaagcuaccugacaccuggcgauagcagcagcggauggacagcuggugccgccgcuuacuaugugggcuaccugcagccuagaaccuuccugcugaaguacaacgagaacggcaccaucaccgacgccguggauugugcucuggauccucugagcgagacaaagugcacccugaaguccuucaccguggaaaagggcaucuaccagaccagcaacuuccgggugcagcccaccgaauccaucgugcgguuccccaauaucaccaaucugugccccuucggcgagguguucaaugccaccagauucgccucuguguacgccuggaaccggaagcggaucagcaauugcguggccgacuacuccgugcuguacaacuccgccagcuucagcaccuucaagugcuacggcguguccccuaccaagcugaacgaccugugcuucacaaacguguacgccgacagcuucgugauccggggagaugaagugcggcagauugccccuggacagacaggcaagaucgccgacuacaacuacaagcugcccgacgacuucaccggcugugugauugccuggaacagcaacaaccuggacuccaaagucggcggcaacuacaauuaccuguaccggcuguuccggaaguccaaucugaagcccuucgagcgggacaucuccaccgagaucuaucaggccggcaacaccccuuguaacggcguggaaggcuucaacugcuacuucccacugcaguccuacggcuuucagcccacaaauggcgugggcuaucagcccuacagagugguggugcugagcuucgaacugcugcaugccccugccacagugugcggcccuaagaaaagcaccaaucucgugaagaacaaaugcgugaacuucaacuucaacggccugaccggcaccggcgugcugacagagagcaacaagaaguuccugccauuccagcaguuuggccgggauaucgccgauaccacagacgccguuagagauccccagacacuggaaauccuggacaucaccccuugcagcuucggcggagugucugugaucaccccuggcaccaacaccagcaaucagguggcagugcuguaccagggcgugaacuguaccgaagugcccguggccauucacgccgaucagcugacaccuacauggcggguguacuccaccggcagcaauguguuucagaccagagccggcugucugaucggagccgagcacgugaacaauagcuacgagugcgacauccccaucggcgcuggaaucugcgccagcuaccagacacagacaaacagcccucggagagccagaagcguggccagccagagcaucauugccuacacaaugucucugggcgccgagaacagcguggccuacuccaacaacucuaucgcuauccccaccaacuucaccaucagcgugaccacagagauccugccuguguccaugaccaagaccagcguggacugcaccauguacaucugcggcgauuccaccgagugcuccaaccugcugcugcaguacggcagcuucugcacccagcugaauagagcccugacagggaucgccguggaacaggacaagaacacccaagagguguucgcccaagugaagcagaucuacaagaccccuccuaucaaggacuucggcggcuucaauuucagccagauucugcccgauccuagcaagcccagcaagcggagcuucaucgaggaccugcuguucaacaaagugacacuggccgacgccggcuucaucaagcaguauggcgauugucugggcgacauugccgccagggaucugauuugcgcccagaaguuuaacggacugacagugcugccuccucugcugaccgaugagaugaucgcccaguacacaucugcccugcuggccggcacaaucacaagcggcuggacauuuggagcaggcgccgcucugcagauccccuuugcuaugcagauggccuaccgguucaacggcaucggagugacccagaaugugcuguacgagaaccagaagcugaucgccaaccaguucaacagcgccaucggcaagauccaggacagccugagcagcacagcaagcgcccugggaaagcugcaggacguggucaaccagaaugcccaggcacugaacacccuggucaagcagcuguccuccaacuucggcgccaucagcucugugcugaacgauauccugagcagacuggacaaggucgaggccgaggugcagaucgacagacugaucacaggcagacugcagagccuccagacauacgugacccagcagcugaucagagccgccgagauuagagccucugccaaucuggccgccaccaagaugucugagugugugcugggccagagcaagagaguggacuuuugcggcaagggcuaccaccugaugagcuucccucagucugccccucacggcgugguguuucugcacgugacauaugugcccgcucaagagaagaauuucaccaccgcuccagccaucugccacgacggcaaagcccacuuuccuagagaaggcguguucguguccaacggcacccauugguucgugacacagcggaacuucuacgagccccagaucaucaccaccgacaacaccuucgugucuggcaacugcgacgucgugaucggcauugugaacaauaccguguacgacccucugcagcccgagcuggacagcuucaaagaggaacuggacaaguacuuuaagaaccacacaagccccgacguggaccugggcgauaucagcggaaucaaugccagcgucgugaacauccagaaagagaucgaccggcugaacgagguggccaagaaucugaacgagagccugaucgaccugcaagaacuggggaaguacgagcaguacaucaaguggcccugguacaucuggcugggcuuuaucgccggacugauugccaucgugauggucacaaucaugcuguguugcaugaccagcugcuguagcugccugaagggcuguuguagcuguggcagcugcugcaaguucgacgaggacgauucugagcccgugcugaagggcgugaaacugcacuacacaugaggacuaguuauaagacugacuagcccgaugggccucccaacgggcccuccuccccuccuugcaccgagauuaauaaaaaaaaaaaaaaaaaaaaaaaaaaaaaaaaaaaaaaaaaaaaaaaaaaaaaaaaaaaaaaaaaaaaaaaaaaaaaaaaaaaaaaaaaaaaaaaaaaaa

SEQ ID NO: 25484 - RNA, 4011 nt, Artificial Sequence
  SARS-CoV-2/Wuhan/WIV05/2019__EPI_ISL_402128 spike protein mRNA gc mod (1-1273)(N501Y_D614G)
aggagaaagcuuaccauguucguguuccuggugcugcugccucugguguccagccagugugugaaccugaccaccagaacacagcugccuccagccuacaccaacagcuuuaccagaggcguguacuaccccgacaagguguucagauccagcgugcugcacucuacccaggaccuguuccugccuuucuucagcaacgugaccugguuccacgccauccacguguccggcaccaauggcaccaagagauucgacaaccccgugcugcccuucaacgacgggguguacuuugccagcaccgagaaguccaacaucaucagaggcuggaucuucggcaccacacuggacagcaagacccagagccugcugaucgugaacaacgccaccaacguggucaucaaagugugcgaguuccaguucugcaacgaccccuuccugggcgucuacuaccacaagaacaacaagagcuggauggaaagcgaguuccggguguacagcagcgccaacaacugcaccuucgaguacgugucccagccuuuccugauggaccuggaaggcaagcagggcaacuucaagaaccugcgcgaguucguguuuaagaacaucgacggcuacuucaagaucuacagcaagcacaccccuaucaaccucgugcgggaucugccucagggcuucucugcucuggaaccccugguggaucugcccaucggcaucaacaucacccgguuucagacacugcuggcccugcacagaagcuaccugacaccuggcgauagcagcagcggauggacagcuggugccgccgcuuacuaugugggcuaccugcagccuagaaccuuccugcugaaguacaacgagaacggcaccaucaccgacgccguggauugugcucuggauccucugagcgagacaaagugcacccugaaguccuucaccguggaaaagggcaucuaccagaccagcaacuuccgggugcagcccaccgaauccaucgugcgguuccccaauaucaccaaucugugccccuucggcgagguguucaaugccaccagauucgccucuguguacgccuggaaccggaagcggaucagcaauugcguggccgacuacuccgugcuguacaacuccgccagcuucagcaccuucaagugcuacggcguguccccuaccaagcugaacgaccugugcuucacaaacguguacgccgacagcuucgugauccggggagaugaagugcggcagauugccccuggacagacaggcaagaucgccgacuacaacuacaagcugcccgacgacuucaccggcugugugauugccuggaacagcaacaaccuggacuccaaagucggcggcaacuacaauuaccuguaccggcuguuccggaaguccaaucugaagcccuucgagcgggacaucuccaccgagaucuaucaggccggcagcaccccuuguaacggcguggaaggcuucaacugcuacuucccacugcaguccuacggcuuucagcccacauacggcgugggcuaucagcccuacagagugguggugcugagcuucgaacugcugcaugccccugccacagugugcggcccuaagaaaagcaccaaucucgugaagaacaaaugcgugaacuucaacuucaacggccugaccggcaccggcgugcugacagagagcaacaagaaguuccugccauuccagcaguuuggccgggauaucgccgauaccacagacgccguuagagauccccagacacuggaaauccuggacaucaccccuugcagcuucggcggagugucugugaucaccccuggcaccaacaccagcaaucagguggcagugcuguaccagggcgugaacuguaccgaagugcccguggccauucacgccgaucagcugacaccuacauggcggguguacuccaccggcagcaauguguuucagaccagagccggcugucugaucggagccgagcacgugaacaauagcuacgagugcgacauccccaucggcgcuggaaucugcgccagcuaccagacacagacaaacagcccucggagagccagaagcguggccagccagagcaucauugccuacacaaugucucugggcgccgagaacagcguggccuacuccaacaacucuaucgcuauccccaccaacuucaccaucagcgugaccacagagauccugccuguguccaugaccaagaccagcguggacugcaccauguacaucugcggcgauuccaccgagugcuccaaccugcugcugcaguacggcagcuucugcacccagcugaauagagcccugacagggaucgccguggaacaggacaagaacacccaagagguguucgcccaagugaagcagaucuacaagaccccuccuaucaaggacuucggcggcuucaauuucagccagauucugcccgauccuagcaagcccagcaagcggagcuucaucgaggaccugcuguucaacaaagugacacuggccgacgccggcuucaucaagcaguauggcgauugucugggcgacauugccgccagggaucugauuugcgcccagaaguuuaacggacugacagugcugccuccucugcugaccgaugagaugaucgcccaguacacaucugcccugcuggccggcacaaucacaagcggcuggacauuuggagcaggcgccgcucugcagauccccuuugcuaugcagauggccuaccgguucaacggcaucggagugacccagaaugugcuguacgagaaccagaagcugaucgccaaccaguucaacagcgccaucggcaagauccaggacagccugagcagcacagcaagcgcccugggaaagcugcaggacguggucaaccagaaugcccaggcacugaacacccuggucaagcagcuguccuccaacuucggcgccaucagcucugugcugaacgauauccugagcagacuggacaaggucgaggccgaggugcagaucgacagacugaucacaggcagacugcagagccuccagacauacgugacccagcagcugaucagagccgccgagauuagagccucugccaaucuggccgccaccaagaugucugagugugugcugggccagagcaagagaguggacuuuugcggcaagggcuaccaccugaugagcuucccucagucugccccucacggcgugguguuucugcacgugacauaugugcccgcucaagagaagaauuucaccaccgcuccagccaucugccacgacggcaaagcccacuuuccuagagaaggcguguucguguccaacggcacccauugguucgugacacagcggaacuucuacgagccccagaucaucaccaccgacaacaccuucgugucuggcaacugcgacgucgugaucggcauugugaacaauaccguguacgacccucugcagcccgagcuggacagcuucaaagaggaacuggacaaguacuuuaagaaccacacaagccccgacguggaccugggcgauaucagcggaaucaaugccagcgucgugaacauccagaaagagaucgaccggcugaacgagguggccaagaaucugaacgagagccugaucgaccugcaagaacuggggaaguacgagcaguacaucaaguggcccugguacaucuggcugggcuuuaucgccggacugauugccaucgugauggucacaaucaugcuguguugcaugaccagcugcuguagcugccugaagggcuguuguagcuguggcagcugcugcaaguucgacgaggacgauucugagcccgugcugaagggcgugaaacugcacuacacaugaggacuaguuauaagacugacuagcccgaugggccucccaacgggcccuccuccccuccuugcaccgagauuaauaaaaaaaaaaaaaaaaaaaaaaaaaaaaaaaaaaaaaaaaaaaaaaaaaaaaaaaaaaaaaaaaaaaaaaaaaaaaaaaaaaaaaaaaaaaaaaaaaaaa

SEQ ID NO: 25485 - RNA, 4005 nt, Artificial Sequence
  SARS-CoV-2/Wuhan/WIV05/2019__EPI_ISL_402128 spike protein mRNA gc mod (1-1273)(H69del_V70del_D614G)
aggagaaagcuuaccauguucguguuccuggugcugcugccucugguguccagccagugugugaaccugaccaccagaacacagcugccuccagccuacaccaacagcuuuaccagaggcguguacuaccccgacaagguguucagauccagcgugcugcacucuacccaggaccuguuccugccuuucuucagcaacgugaccugguuccacgccaucuccggcaccaauggcaccaagagauucgacaaccccgugcugcccuucaacgacgggguguacuuugccagcaccgagaaguccaacaucaucagaggcuggaucuucggcaccacacuggacagcaagacccagagccugcugaucgugaacaacgccaccaacguggucaucaaagugugcgaguuccaguucugcaacgaccccuuccugggcgucuacuaccacaagaacaacaagagcuggauggaaagcgaguuccggguguacagcagcgccaacaacugcaccuucgaguacgugucccagccuuuccugauggaccuggaaggcaagcagggcaacuucaagaaccugcgcgaguucguguuuaagaacaucgacggcuacuucaagaucuacagcaagcacaccccuaucaaccucgugcgggaucugccucagggcuucucugcucuggaaccccugguggaucugcccaucggcaucaacaucacccgguuucagacacugcuggcccugcacagaagcuaccugacaccuggcgauagcagcagcggauggacagcuggugccgccgcuuacuaugugggcuaccugcagccuagaaccuuccugcugaaguacaacgagaacggcaccaucaccgacgccguggauugugcucuggauccucugagcgagacaaagugcacccugaaguccuucaccguggaaaagggcaucuaccagaccagcaacuuccgggugcagcccaccgaauccaucgugcgguuccccaauaucaccaaucugugccccuucggcgagguguucaaugccaccagauucgccucuguguacgccuggaaccggaagcggaucagcaauugcguggccgacuacuccgugcuguacaacuccgccagcuucagcaccuucaagugcuacggcguguccccuaccaagcugaacgaccugugcuucacaaacguguacgccgacagcuucgugauccggggagaugaagugcggcagauugccccuggacagacaggcaagaucgccgacuacaacuacaagcugcccgacgacuucaccggcugugugauugccuggaacagcaacaaccuggacuccaaagucggcggcaacuacaauuaccuguaccggcuguuccggaaguccaaucugaagcccuucgagcgggacaucuccaccgagaucuaucaggccggcagcaccccuuguaacggcguggaaggcuucaacugcuacuucccacugcaguccuacggcuuucagcccacaaauggcgugggcuaucagcccuacagagugguggugcugagcuucgaacugcugcaugccccugccacagugugcggcccuaagaaaagcaccaaucucgugaagaacaaaugcgugaacuucaacuucaacggccugaccggcaccggcgugcugacagagagcaacaagaaguuccugccauuccagcaguuuggccgggauaucgccgauaccacagacgccguuagagauccccagacacuggaaauccuggacaucaccccuugcagcuucggcggagugucugugaucaccccuggcaccaacaccagcaaucagguggcagugcuguaccagggcgugaacuguaccgaagugcccguggccauucacgccgaucagcugacaccuacauggcggguguacuccaccggcagcaauguguuucagaccagagccggcugucugaucggagccgagcacgugaacaauagcuacgagugcgacauccccaucggcgcuggaaucugcgccagcuaccagacacagacaaacagcccucggagagccagaagcguggccagccagagcaucauugccuacacaaugucucugggcgccgagaacagcguggccuacuccaacaacucuaucgcuauccccaccaacuucaccaucagcgugaccacagagauccugccuguguccaugaccaagaccagcguggacugcaccauguacaucugcggcgauuccaccgagugcuccaaccugcugcugcaguacggcagcuucugcacccagcugaauagagcccugacagggaucgccguggaacaggacaagaacacccaagagguguucgcccaagugaagcagaucuacaagaccccuccuaucaaggacuucggcggcuucaauuucagccagauucugcccgauccuagcaagcccagcaagcggagcuucaucgaggaccugcuguucaacaaagugacacuggccgacgccggcuucaucaagcaguauggcgauugucugggcgacauugccgccagggaucugauuugcgcccagaaguuuaacggacugacagugcugccuccucugcugaccgaugagaugaucgcccaguacacaucugcccugcuggccggcacaaucacaagcggcuggacauuuggagcaggcgccgcucugcagauccccuuugcuaugcagauggccuaccgguucaacggcaucggagugacccagaaugugcuguacgagaaccagaagcugaucgccaaccaguucaacagcgccaucggcaagauccaggacagccugagcagcacagcaagcgcccugggaaagcugcaggacguggucaaccagaaugcccaggcacugaacacccuggucaagcagcuguccuccaacuucggcgccaucagcucugugcugaacgauauccugagcagacuggacaaggucgaggccgaggugcagaucgacagacugaucacaggcagacugcagagccuccagacauacgugacccagcagcugaucagagccgccgagauuagagccucugccaaucuggccgccaccaagaugucugagugugugcugggccagagcaagagaguggacuuuugcggcaagggcuaccaccugaugagcuucccucagucugccccucacggcgugguguuucugcacgugacauaugugcccgcucaagagaagaauuucaccaccgcuccagccaucugccacgacggcaaagcccacuuuccuagagaaggcguguucguguccaacggcacccauugguucgugacacagcggaacuucuacgagccccagaucaucaccaccgacaacaccuucgugucuggcaacugcgacgucgugaucggcauugugaacaauaccguguacgacccucugcagcccgagcuggacagcuucaaagaggaacuggacaaguacuuuaagaaccacacaagccccgacguggaccugggcgauaucagcggaaucaaugccagcgucgugaacauccagaaagagaucgaccggcugaacgagguggccaagaaucugaacgagagccugaucgaccugcaagaacuggggaaguacgagcaguacaucaaguggcccugguacaucuggcugggcuuuaucgccggacugauugccaucgugauggucacaaucaugcuguguugcaugaccagcugcuguagcugccugaagggcuguuguagcuguggcagcugcugcaaguucgacgaggacgauucugagcccgugcugaagggcgugaaacugcacuacacaugaggacuaguuauaagacugacuagcccgaugggccucccaacgggcccuccuccccuccuugcaccgagauuaauaaaaaaaaaaaaaaaaaaaaaaaaaaaaaaaaaaaaaaaaaaaaaaaaaaaaaaaaaaaaaaaaaaaaaaaaaaaaaaaaaaaaaaaaaaaaaaaaaaaa

SEQ ID NO: 25486 - RNA, 4011 nt, Artificial Sequence
  SARS-CoV-2/Wuhan/WIV05/2019__EPI_ISL_402128 spike protein mRNA gc mod (1-1273)(Y453F_D614G)
aggagaaagcuuaccauguucguguuccuggugcugcugccucugguguccagccagugugugaaccugaccaccagaacacagcugccuccagccuacaccaacagcuuuaccagaggcguguacuaccccgacaagguguucagauccagcgugcugcacucuacccaggaccuguuccugccuuucuucagcaacgugaccugguuccacgccauccacguguccggcaccaauggcaccaagagauucgacaaccccgugcugcccuucaacgacgggguguacuuugccagcaccgagaaguccaacaucaucagaggcuggaucuucggcaccacacuggacagcaagacccagagccugcugaucgugaacaacgccaccaacguggucaucaaagugugcgaguuccaguucugcaacgaccccuuccugggcgucuacuaccacaagaacaacaagagcuggauggaaagcgaguuccggguguacagcagcgccaacaacugcaccuucgaguacgugucccagccuuuccugauggaccuggaaggcaagcagggcaacuucaagaaccugcgcgaguucguguuuaagaacaucgacggcuacuucaagaucuacagcaagcacaccccuaucaaccucgugcgggaucugccucagggcuucucugcucuggaaccccugguggaucugcccaucggcaucaacaucacccgguuucagacacugcuggcccugcacagaagcuaccugacaccuggcgauagcagcagcggauggacagcuggugccgccgcuuacuaugugggcuaccugcagccuagaaccuuccugcugaaguacaacgagaacggcaccaucaccgacgccguggauugugcucuggauccucugagcgagacaaagugcacccugaaguccuucaccguggaaaagggcaucuaccagaccagcaacuuccgggugcagcccaccgaauccaucgugcgguuccccaauaucaccaaucugugccccuucggcgagguguucaaugccaccagauucgccucuguguacgccuggaaccggaagcggaucagcaauugcguggccgacuacuccgugcuguacaacuccgccagcuucagcaccuucaagugcuacggcguguccccuaccaagcugaacgaccugugcuucacaaacguguacgccgacagcuucgugauccggggagaugaagugcggcagauugccccuggacagacaggcaagaucgccgacuacaacuacaagcugcccgacgacuucaccggcugugugauugccuggaacagcaacaaccuggacuccaaagucggcggcaacuacaauuaccuguuccggcuguuccggaaguccaaucugaagcccuucgagcgggacaucuccaccgagaucuaucaggccggcagcaccccuuguaacggcguggaaggcuucaacugcuacuucccacugcaguccuacggcuuucagcccacaaauggcgugggcuaucagcccuacagagugguggugcugagcuucgaacugcugcaugccccugccacagugugcggcccuaagaaaagcaccaaucucgugaagaacaaaugcgugaacuucaacuucaacggccugaccggcaccggcgugcugacagagagcaacaagaaguuccugccauuccagcaguuuggccgggauaucgccgauaccacagacgccguuagagauccccagacacuggaaauccuggacaucaccccuugcagcuucggcggagugucugugaucaccccuggcaccaacaccagcaaucagguggcagugcuguaccagggcgugaacuguaccgaagugcccguggccauucacgccgaucagcugacaccuacauggcggguguacuccaccggcagcaauguguuucagaccagagccggcugucugaucggagccgagcacgugaacaauagcuacgagugcgacauccccaucggcgcuggaaucugcgccagcuaccagacacagacaaacagcccucggagagccagaagcguggccagccagagcaucauugccuacacaaugucucugggcgccgagaacagcguggccuacuccaacaacucuaucgcuauccccaccaacuucaccaucagcgugaccacagagauccugccuguguccaugaccaagaccagcguggacugcaccauguacaucugcggcgauuccaccgagugcuccaaccugcugcugcaguacggcagcuucugcacccagcugaauagagcccugacagggaucgccguggaacaggacaagaacacccaagagguguucgcccaagugaagcagaucuacaagaccccuccuaucaaggacuucggcggcuucaauuucagccagauucugcccgauccuagcaagcccagcaagcggagcuucaucgaggaccugcuguucaacaaagugacacuggccgacgccggcuucaucaagcaguauggcgauugucugggcgacauugccgccagggaucugauuugcgcccagaaguuuaacggacugacagugcugccuccucugcugaccgaugagaugaucgcccaguacacaucugcccugcuggccggcacaaucacaagcggcuggacauuuggagcaggcgccgcucugcagauccccuuugcuaugcagauggccuaccgguucaacggcaucggagugacccagaaugugcuguacgagaaccagaagcugaucgccaaccaguucaacagcgccaucggcaagauccaggacagccugagcagcacagcaagcgcccugggaaagcugcaggacguggucaaccagaaugcccaggcacugaacacccuggucaagcagcuguccuccaacuucggcgccaucagcucugugcugaacgauauccugagcagacuggacaaggucgaggccgaggugcagaucgacagacugaucacaggcagacugcagagccuccagacauacgugacccagcagcugaucagagccgccgagauuagagccucugccaaucuggccgccaccaagaugucugagugugugcugggccagagcaagagaguggacuuuugcggcaagggcuaccaccugaugagcuucccucagucugccccucacggcgugguguuucugcacgugacauaugugcccgcucaagagaagaauuucaccaccgcuccagccaucugccacgacggcaaagcccacuuuccuagagaaggcguguucguguccaacggcacccauugguucgugacacagcggaacuucuacgagccccagaucaucaccaccgacaacaccuucgugucuggcaacugcgacgucgugaucggcauugugaacaauaccguguacgacccucugcagcccgagcuggacagcuucaaagaggaacuggacaaguacuuuaagaaccacacaagccccgacguggaccugggcgauaucagcggaaucaaugccagcgucgugaacauccagaaagagaucgaccggcugaacgagguggccaagaaucugaacgagagccugaucgaccugcaagaacuggggaaguacgagcaguacaucaaguggcccugguacaucuggcugggcuuuaucgccggacugauugccaucgugauggucacaaucaugcuguguugcaugaccagcugcuguagcugccugaagggcuguuguagcuguggcagcugcugcaaguucgacgaggacgauucugagcccgugcugaagggcgugaaacugcacuacacaugaggacuaguuauaagacugacuagcccgaugggccucccaacgggcccuccuccccuccuugcaccgagauuaauaaaaaaaaaaaaaaaaaaaaaaaaaaaaaaaaaaaaaaaaaaaaaaaaaaaaaaaaaaaaaaaaaaaaaaaaaaaaaaaaaaaaaaaaaaaaaaaaaaaa

SEQ ID NO: 25487 - RNA, 4011 nt, Artificial Sequence
  SARS-CoV-2/Wuhan/WIV05/2019__EPI_ISL_402128 spike protein mRNA gc mod (1-1273)(D614G_I692V)
aggagaaagcuuaccauguucguguuccuggugcugcugccucugguguccagccagugugugaaccugaccaccagaacacagcugccuccagccuacaccaacagcuuuaccagaggcguguacuaccccgacaagguguucagauccagcgugcugcacucuacccaggaccuguuccugccuuucuucagcaacgugaccugguuccacgccauccacguguccggcaccaauggcaccaagagauucgacaaccccgugcugcccuucaacgacgggguguacuuugccagcaccgagaaguccaacaucaucagaggcuggaucuucggcaccacacuggacagcaagacccagagccugcugaucgugaacaacgccaccaacguggucaucaaagugugcgaguuccaguucugcaacgaccccuuccugggcgucuacuaccacaagaacaacaagagcuggauggaaagcgaguuccggguguacagcagcgccaacaacugcaccuucgaguacgugucccagccuuuccugauggaccuggaaggcaagcagggcaacuucaagaaccugcgcgaguucguguuuaagaacaucgacggcuacuucaagaucuacagcaagcacaccccuaucaaccucgugcgggaucugccucagggcuucucugcucuggaaccccugguggaucugcccaucggcaucaacaucacccgguuucagacacugcuggcccugcacagaagcuaccugacaccuggcgauagcagcagcggauggacagcuggugccgccgcuuacuaugugggcuaccugcagccuagaaccuuccugcugaaguacaacgagaacggcaccaucaccgacgccguggauugugcucuggauccucugagcgagacaaagugcacccugaaguccuucaccguggaaaagggcaucuaccagaccagcaacuuccgggugcagcccaccgaauccaucgugcgguuccccaauaucaccaaucugugccccuucggcgagguguucaaugccaccagauucgccucuguguacgccuggaaccggaagcggaucagcaauugcguggccgacuacuccgugcuguacaacuccgccagcuucagcaccuucaagugcuacggcguguccccuaccaagcugaacgaccugugcuucacaaacguguacgccgacagcuucgugauccggggagaugaagugcggcagauugccccuggacagacaggcaagaucgccgacuacaacuacaagcugcccgacgacuucaccggcugugugauugccuggaacagcaacaaccuggacuccaaagucggcggcaacuacaauuaccuguaccggcuguuccggaaguccaaucugaagcccuucgagcgggacaucuccaccgagaucuaucaggccggcagcaccccuuguaacggcguggaaggcuucaacugcuacuucccacugcaguccuacggcuuucagcccacaaauggcgugggcuaucagcccuacagagugguggugcugagcuucgaacugcugcaugccccugccacagugugcggcccuaagaaaagcaccaaucucgugaagaacaaaugcgugaacuucaacuucaacggccugaccggcaccggcgugcugacagagagcaacaagaaguuccugccauuccagcaguuuggccgggauaucgccgauaccacagacgccguuagagauccccagacacuggaaauccuggacaucaccccuugcagcuucggcggagugucugugaucaccccuggcaccaacaccagcaaucagguggcagugcuguaccagggcgugaacuguaccgaagugcccguggccauucacgccgaucagcugacaccuacauggcggguguacuccaccggcagcaauguguuucagaccagagccggcugucugaucggagccgagcacgugaacaauagcuacgagugcgacauccccaucggcgcuggaaucugcgccagcuaccagacacagacaaacagcccucggagagccagaagcguggccagccagagcgugauugccuacacaaugucucugggcgccgagaacagcguggccuacuccaacaacucuaucgcuauccccaccaacuucaccaucagcgugaccacagagauccugccuguguccaugaccaagaccagcguggacugcaccauguacaucugcggcgauuccaccgagugcuccaaccugcugcugcaguacggcagcuucugcacccagcugaauagagcccugacagggaucgccguggaacaggacaagaacacccaagagguguucgcccaagugaagcagaucuacaagaccccuccuaucaaggacuucggcggcuucaauuucagccagauucugcccgauccuagcaagcccagcaagcggagcuucaucgaggaccugcuguucaacaaagugacacuggccgacgccggcuucaucaagcaguauggcgauugucugggcgacauugccgccagggaucugauuugcgcccagaaguuuaacggacugacagugcugccuccucugcugaccgaugagaugaucgcccaguacacaucugcccugcuggccggcacaaucacaagcggcuggacauuuggagcaggcgccgcucugcagauccccuuugcuaugcagauggccuaccgguucaacggcaucggagugacccagaaugugcuguacgagaaccagaagcugaucgccaaccaguucaacagcgccaucggcaagauccaggacagccugagcagcacagcaagcgcccugggaaagcugcaggacguggucaaccagaaugcccaggcacugaacacccuggucaagcagcuguccuccaacuucggcgccaucagcucugugcugaacgauauccugagcagacuggacaaggucgaggccgaggugcagaucgacagacugaucacaggcagacugcagagccuccagacauacgugacccagcagcugaucagagccgccgagauuagagccucugccaaucuggccgccaccaagaugucugagugugugcugggccagagcaagagaguggacuuuugcggcaagggcuaccaccugaugagcuucccucagucugccccucacggcgugguguuucugcacgugacauaugugcccgcucaagagaagaauuucaccaccgcuccagccaucugccacgacggcaaagcccacuuuccuagagaaggcguguucguguccaacggcacccauugguucgugacacagcggaacuucuacgagccccagaucaucaccaccgacaacaccuucgugucuggcaacugcgacgucgugaucggcauugugaacaauaccguguacgacccucugcagcccgagcuggacagcuucaaagaggaacuggacaaguacuuuaagaaccacacaagccccgacguggaccugggcgauaucagcggaaucaaugccagcgucgugaacauccagaaagagaucgaccggcugaacgagguggccaagaaucugaacgagagccugaucgaccugcaagaacuggggaaguacgagcaguacaucaaguggcccugguacaucuggcugggcuuuaucgccggacugauugccaucgugauggucacaaucaugcuguguugcaugaccagcugcuguagcugccugaagggcuguuguagcuguggcagcugcugcaaguucgacgaggacgauucugagcccgugcugaagggcgugaaacugcacuacacaugaggacuaguuauaagacugacuagcccgaugggccucccaacgggcccuccuccccuccuugcaccgagauuaauaaaaaaaaaaaaaaaaaaaaaaaaaaaaaaaaaaaaaaaaaaaaaaaaaaaaaaaaaaaaaaaaaaaaaaaaaaaaaaaaaaaaaaaaaaaaaaaaaaaa

SEQ ID NO: 25488 - RNA, 4011 nt, Artificial Sequence
  SARS-CoV-2/Wuhan/WIV05/2019__EPI_ISL_402128 spike protein mRNA gc mod (1-1273)(D614G_M1229I)
aggagaaagcuuaccauguucguguuccuggugcugcugccucugguguccagccagugugugaaccugaccaccagaacacagcugccuccagccuacaccaacagcuuuaccagaggcguguacuaccccgacaagguguucagauccagcgugcugcacucuacccaggaccuguuccugccuuucuucagcaacgugaccugguuccacgccauccacguguccggcaccaauggcaccaagagauucgacaaccccgugcugcccuucaacgacgggguguacuuugccagcaccgagaaguccaacaucaucagaggcuggaucuucggcaccacacuggacagcaagacccagagccugcugaucgugaacaacgccaccaacguggucaucaaagugugcgaguuccaguucugcaacgaccccuuccugggcgucuacuaccacaagaacaacaagagcuggauggaaagcgaguuccggguguacagcagcgccaacaacugcaccuucgaguacgugucccagccuuuccugauggaccuggaaggcaagcagggcaacuucaagaaccugcgcgaguucguguuuaagaacaucgacggcuacuucaagaucuacagcaagcacaccccuaucaaccucgugcgggaucugccucagggcuucucugcucuggaaccccugguggaucugcccaucggcaucaacaucacccgguuucagacacugcuggcccugcacagaagcuaccugacaccuggcgauagcagcagcggauggacagcuggugccgccgcuuacuaugugggcuaccugcagccuagaaccuuccugcugaaguacaacgagaacggcaccaucaccgacgccguggauugugcucuggauccucugagcgagacaaagugcacccugaaguccuucaccguggaaaagggcaucuaccagaccagcaacuuccgggugcagcccaccgaauccaucgugcgguuccccaauaucaccaaucugugccccuucggcgagguguucaaugccaccagauucgccucuguguacgccuggaaccggaagcggaucagcaauugcguggccgacuacuccgugcuguacaacuccgccagcuucagcaccuucaagugcuacggcguguccccuaccaagcugaacgaccugugcuucacaaacguguacgccgacagcuucgugauccggggagaugaagugcggcagauugccccuggacagacaggcaagaucgccgacuacaacuacaagcugcccgacgacuucaccggcugugugauugccuggaacagcaacaaccuggacuccaaagucggcggcaacuacaauuaccuguaccggcuguuccggaaguccaaucugaagcccuucgagcgggacaucuccaccgagaucuaucaggccggcagcaccccuuguaacggcguggaaggcuucaacugcuacuucccacugcaguccuacggcuuucagcccacaaauggcgugggcuaucagcccuacagagugguggugcugagcuucgaacugcugcaugccccugccacagugugcggcccuaagaaaagcaccaaucucgugaagaacaaaugcgugaacuucaacuucaacggccugaccggcaccggcgugcugacagagagcaacaagaaguuccugccauuccagcaguuuggccgggauaucgccgauaccacagacgccguuagagauccccagacacuggaaauccuggacaucaccccuugcagcuucggcggagugucugugaucaccccuggcaccaacaccagcaaucagguggcagugcuguaccagggcgugaacuguaccgaagugcccguggccauucacgccgaucagcugacaccuacauggcggguguacuccaccggcagcaauguguuucagaccagagccggcugucugaucggagccgagcacgugaacaauagcuacgagugcgacauccccaucggcgcuggaaucugcgccagcuaccagacacagacaaacagcccucggagagccagaagcguggccagccagagcaucauugccuacacaaugucucugggcgccgagaacagcguggccuacuccaacaacucuaucgcuauccccaccaacuucaccaucagcgugaccacagagauccugccuguguccaugaccaagaccagcguggacugcaccauguacaucugcggcgauuccaccgagugcuccaaccugcugcugcaguacggcagcuucugcacccagcugaauagagcccugacagggaucgccguggaacaggacaagaacacccaagagguguucgcccaagugaagcagaucuacaagaccccuccuaucaaggacuucggcggcuucaauuucagccagauucugcccgauccuagcaagcccagcaagcggagcuucaucgaggaccugcuguucaacaaagugacacuggccgacgccggcuucaucaagcaguauggcgauugucugggcgacauugccgccagggaucugauuugcgcccagaaguuuaacggacugacagugcugccuccucugcugaccgaugagaugaucgcccaguacacaucugcccugcuggccggcacaaucacaagcggcuggacauuuggagcaggcgccgcucugcagauccccuuugcuaugcagauggccuaccgguucaacggcaucggagugacccagaaugugcuguacgagaaccagaagcugaucgccaaccaguucaacagcgccaucggcaagauccaggacagccugagcagcacagcaagcgcccugggaaagcugcaggacguggucaaccagaaugcccaggcacugaacacccuggucaagcagcuguccuccaacuucggcgccaucagcucugugcugaacgauauccugagcagacuggacaaggucgaggccgaggugcagaucgacagacugaucacaggcagacugcagagccuccagacauacgugacccagcagcugaucagagccgccgagauuagagccucugccaaucuggccgccaccaagaugucugagugugugcugggccagagcaagagaguggacuuuugcggcaagggcuaccaccugaugagcuucccucagucugccccucacggcgugguguuucugcacgugacauaugugcccgcucaagagaagaauuucaccaccgcuccagccaucugccacgacggcaaagcccacuuuccuagagaaggcguguucguguccaacggcacccauugguucgugacacagcggaacuucuacgagccccagaucaucaccaccgacaacaccuucgugucuggcaacugcgacgucgugaucggcauugugaacaauaccguguacgacccucugcagcccgagcuggacagcuucaaagaggaacuggacaaguacuuuaagaaccacacaagccccgacguggaccugggcgauaucagcggaaucaaugccagcgucgugaacauccagaaagagaucgaccggcugaacgagguggccaagaaucugaacgagagccugaucgaccugcaagaacuggggaaguacgagcaguacaucaaguggcccugguacaucuggcugggcuuuaucgccggacugauugccaucgugaucgucacaaucaugcuguguugcaugaccagcugcuguagcugccugaagggcuguuguagcuguggcagcugcugcaaguucgacgaggacgauucugagcccgugcugaagggcgugaaacugcacuacacaugaggacuaguuauaagacugacuagcccgaugggccucccaacgggcccuccuccccuccuugcaccgagauuaauaaaaaaaaaaaaaaaaaaaaaaaaaaaaaaaaaaaaaaaaaaaaaaaaaaaaaaaaaaaaaaaaaaaaaaaaaaaaaaaaaaaaaaaaaaaaaaaaaaaa

SEQ ID NO: 25489 - RNA, 4005 nt, Artificial Sequence
  SARS-CoV-2/Wuhan/WIV05/2019__EPI_ISL_402128 spike protein mRNA gc mod (1-1273)(H69del_V70del_A222V_Y453F_S477N_D614G_I692V)
aggagaaagcuuaccauguucguguuccuggugcugcugccucugguguccagccagugugugaaccugaccaccagaacacagcugccuccagccuacaccaacagcuuuaccagaggcguguacuaccccgacaagguguucagauccagcgugcugcacucuacccaggaccuguuccugccuuucuucagcaacgugaccugguuccacgccaucuccggcaccaauggcaccaagagauucgacaaccccgugcugcccuucaacgacgggguguacuuugccagcaccgagaaguccaacaucaucagaggcuggaucuucggcaccacacuggacagcaagacccagagccugcugaucgugaacaacgccaccaacguggucaucaaagugugcgaguuccaguucugcaacgaccccuuccugggcgucuacuaccacaagaacaacaagagcuggauggaaagcgaguuccggguguacagcagcgccaacaacugcaccuucgaguacgugucccagccuuuccugauggaccuggaaggcaagcagggcaacuucaagaaccugcgcgaguucguguuuaagaacaucgacggcuacuucaagaucuacagcaagcacaccccuaucaaccucgugcgggaucugccucagggcuucucugugcuggaaccccugguggaucugcccaucggcaucaacaucacccgguuucagacacugcuggcccugcacagaagcuaccugacaccuggcgauagcagcagcggauggacagcuggugccgccgcuuacuaugugggcuaccugcagccuagaaccuuccugcugaaguacaacgagaacggcaccaucaccgacgccguggauugugcucuggauccucugagcgagacaaagugcacccugaaguccuucaccguggaaaagggcaucuaccagaccagcaacuuccgggugcagcccaccgaauccaucgugcgguuccccaauaucaccaaucugugccccuucggcgagguguucaaugccaccagauucgccucuguguacgccuggaaccggaagcggaucagcaauugcguggccgacuacuccgugcuguacaacuccgccagcuucagcaccuucaagugcuacggcguguccccuaccaagcugaacgaccugugcuucacaaacguguacgccgacagcuucgugauccggggagaugaagugcggcagauugccccuggacagacaggcaagaucgccgacuacaacuacaagcugcccgacgacuucaccggcugugugauugccuggaacagcaacaaccuggacuccaaagucggcggcaacuacaauuaccuguuccggcuguuccggaaguccaaucugaagcccuucgagcgggacaucuccaccgagaucuaucaggccggcaacaccccuuguaacggcguggaaggcuucaacugcuacuucccacugcaguccuacggcuuucagcccacaaauggcgugggcuaucagcccuacagagugguggugcugagcuucgaacugcugcaugccccugccacagugugcggcccuaagaaaagcaccaaucucgugaagaacaaaugcgugaacuucaacuucaacggccugaccggcaccggcgugcugacagagagcaacaagaaguuccugccauuccagcaguuuggccgggauaucgccgauaccacagacgccguuagagauccccagacacuggaaauccuggacaucaccccuugcagcuucggcggagugucugugaucaccccuggcaccaacaccagcaaucagguggcagugcuguaccagggcgugaacuguaccgaagugcccguggccauucacgccgaucagcugacaccuacauggcggguguacuccaccggcagcaauguguuucagaccagagccggcugucugaucggagccgagcacgugaacaauagcuacgagugcgacauccccaucggcgcuggaaucugcgccagcuaccagacacagacaaacagcccucggagagccagaagcguggccagccagagcgugauugccuacacaaugucucugggcgccgagaacagcguggccuacuccaacaacucuaucgcuauccccaccaacuucaccaucagcgugaccacagagauccugccuguguccaugaccaagaccagcguggacugcaccauguacaucugcggcgauuccaccgagugcuccaaccugcugcugcaguacggcagcuucugcacccagcugaauagagcccugacagggaucgccguggaacaggacaagaacacccaagagguguucgcccaagugaagcagaucuacaagaccccuccuaucaaggacuucggcggcuucaauuucagccagauucugcccgauccuagcaagcccagcaagcggagcuucaucgaggaccugcuguucaacaaagugacacuggccgacgccggcuucaucaagcaguauggcgauugucugggcgacauugccgccagggaucugauuugcgcccagaaguuuaacggacugacagugcugccuccucugcugaccgaugagaugaucgcccaguacacaucugcccugcuggccggcacaaucacaagcggcuggacauuuggagcaggcgccgcucugcagauccccuuugcuaugcagauggccuaccgguucaacggcaucggagugacccagaaugugcuguacgagaaccagaagcugaucgccaaccaguucaacagcgccaucggcaagauccaggacagccugagcagcacagcaagcgcccugggaaagcugcaggacguggucaaccagaaugcccaggcacugaacacccuggucaagcagcuguccuccaacuucggcgccaucagcucugugcugaacgauauccugagcagacuggacaaggucgaggccgaggugcagaucgacagacugaucacaggcagacugcagagccuccagacauacgugacccagcagcugaucagagccgccgagauuagagccucugccaaucuggccgccaccaagaugucugagugugugcugggccagagcaagagaguggacuuuugcggcaagggcuaccaccugaugagcuucccucagucugccccucacggcgugguguuucugcacgugacauaugugcccgcucaagagaagaauuucaccaccgcuccagccaucugccacgacggcaaagcccacuuuccuagagaaggcguguucguguccaacggcacccauugguucgugacacagcggaacuucuacgagccccagaucaucaccaccgacaacaccuucgugucuggcaacugcgacgucgugaucggcauugugaacaauaccguguacgacccucugcagcccgagcuggacagcuucaaagaggaacuggacaaguacuuuaagaaccacacaagccccgacguggaccugggcgauaucagcggaaucaaugccagcgucgugaacauccagaaagagaucgaccggcugaacgagguggccaagaaucugaacgagagccugaucgaccugcaagaacuggggaaguacgagcaguacaucaaguggcccugguacaucuggcugggcuuuaucgccggacugauugccaucgugauggucacaaucaugcuguguugcaugaccagcugcuguagcugccugaagggcuguuguagcuguggcagcugcugcaaguucgacgaggacgauucugagcccgugcugaagggcgugaaacugcacuacacaugaggacuaguuauaagacugacuagcccgaugggccucccaacgggcccuccuccccuccuugcaccgagauuaauaaaaaaaaaaaaaaaaaaaaaaaaaaaaaaaaaaaaaaaaaaaaaaaaaaaaaaaaaaaaaaaaaaaaaaaaaaaaaaaaaaaaaaaaaaaaaaaaaaaa

SEQ ID NO: 25490 - RNA, 4005 nt, Artificial Sequence
  SARS-CoV-2/Wuhan/WIV05/2019__EPI_ISL_402128 spike protein mRNA gc mod (1-1273)(H69del_V70del_Y453F_D614G_I692V_M1229I)
aggagaaagcuuaccauguucguguuccuggugcugcugccucugguguccagccagugugugaaccugaccaccagaacacagcugccuccagccuacaccaacagcuuuaccagaggcguguacuaccccgacaagguguucagauccagcgugcugcacucuacccaggaccuguuccugccuuucuucagcaacgugaccugguuccacgccaucuccggcaccaauggcaccaagagauucgacaaccccgugcugcccuucaacgacgggguguacuuugccagcaccgagaaguccaacaucaucagaggcuggaucuucggcaccacacuggacagcaagacccagagccugcugaucgugaacaacgccaccaacguggucaucaaagugugcgaguuccaguucugcaacgaccccuuccugggcgucuacuaccacaagaacaacaagagcuggauggaaagcgaguuccggguguacagcagcgccaacaacugcaccuucgaguacgugucccagccuuuccugauggaccuggaaggcaagcagggcaacuucaagaaccugcgcgaguucguguuuaagaacaucgacggcuacuucaagaucuacagcaagcacaccccuaucaaccucgugcgggaucugccucagggcuucucugcucuggaaccccugguggaucugcccaucggcaucaacaucacccgguuucagacacugcuggcccugcacagaagcuaccugacaccuggcgauagcagcagcggauggacagcuggugccgccgcuuacuaugugggcuaccugcagccuagaaccuuccugcugaaguacaacgagaacggcaccaucaccgacgccguggauugugcucuggauccucugagcgagacaaagugcacccugaaguccuucaccguggaaaagggcaucuaccagaccagcaacuuccgggugcagcccaccgaauccaucgugcgguuccccaauaucaccaaucugugccccuucggcgagguguucaaugccaccagauucgccucuguguacgccuggaaccggaagcggaucagcaauugcguggccgacuacuccgugcuguacaacuccgccagcuucagcaccuucaagugcuacggcguguccccuaccaagcugaacgaccugugcuucacaaacguguacgccgacagcuucgugauccggggagaugaagugcggcagauugccccuggacagacaggcaagaucgccgacuacaacuacaagcugcccgacgacuucaccggcugugugauugccuggaacagcaacaaccuggacuccaaagucggcggcaacuacaauuaccuguuccggcuguuccggaaguccaaucugaagcccuucgagcgggacaucuccaccgagaucuaucaggccggcagcaccccuuguaacggcguggaaggcuucaacugcuacuucccacugcaguccuacggcuuucagcccacaaauggcgugggcuaucagcccuacagagugguggugcugagcuucgaacugcugcaugccccugccacagugugcggcccuaagaaaagcaccaaucucgugaagaacaaaugcgugaacuucaacuucaacggccugaccggcaccggcgugcugacagagagcaacaagaaguuccugccauuccagcaguuuggccgggauaucgccgauaccacagacgccguuagagauccccagacacuggaaauccuggacaucaccccuugcagcuucggcggagugucugugaucaccccuggcaccaacaccagcaaucagguggcagugcuguaccagggcgugaacuguaccgaagugcccguggccauucacgccgaucagcugacaccuacauggcggguguacuccaccggcagcaauguguuucagaccagagccggcugucugaucggagccgagcacgugaacaauagcuacgagugcgacauccccaucggcgcuggaaucugcgccagcuaccagacacagacaaacagcccucggagagccagaagcguggccagccagagcgugauugccuacacaaugucucugggcgccgagaacagcguggccuacuccaacaacucuaucgcuauccccaccaacuucaccaucagcgugaccacagagauccugccuguguccaugaccaagaccagcguggacugcaccauguacaucugcggcgauuccaccgagugcuccaaccugcugcugcaguacggcagcuucugcacccagcugaauagagcccugacagggaucgccguggaacaggacaagaacacccaagagguguucgcccaagugaagcagaucuacaagaccccuccuaucaaggacuucggcggcuucaauuucagccagauucugcccgauccuagcaagcccagcaagcggagcuucaucgaggaccugcuguucaacaaagugacacuggccgacgccggcuucaucaagcaguauggcgauugucugggcgacauugccgccagggaucugauuugcgcccagaaguuuaacggacugacagugcugccuccucugcugaccgaugagaugaucgcccaguacacaucugcccugcuggccggcacaaucacaagcggcuggacauuuggagcaggcgccgcucugcagauccccuuugcuaugcagauggccuaccgguucaacggcaucggagugacccagaaugugcuguacgagaaccagaagcugaucgccaaccaguucaacagcgccaucggcaagauccaggacagccugagcagcacagcaagcgcccugggaaagcugcaggacguggucaaccagaaugcccaggcacugaacacccuggucaagcagcuguccuccaacuucggcgccaucagcucugugcugaacgauauccugagcagacuggacaaggucgaggccgaggugcagaucgacagacugaucacaggcagacugcagagccuccagacauacgugacccagcagcugaucagagccgccgagauuagagccucugccaaucuggccgccaccaagaugucugagugugugcugggccagagcaagagaguggacuuuugcggcaagggcuaccaccugaugagcuucccucagucugccccucacggcgugguguuucugcacgugacauaugugcccgcucaagagaagaauuucaccaccgcuccagccaucugccacgacggcaaagcccacuuuccuagagaaggcguguucguguccaacggcacccauugguucgugacacagcggaacuucuacgagccccagaucaucaccaccgacaacaccuucgugucuggcaacugcgacgucgugaucggcauugugaacaauaccguguacgacccucugcagcccgagcuggacagcuucaaagaggaacuggacaaguacuuuaagaaccacacaagccccgacguggaccugggcgauaucagcggaaucaaugccagcgucgugaacauccagaaagagaucgaccggcugaacgagguggccaagaaucugaacgagagccugaucgaccugcaagaacuggggaaguacgagcaguacaucaaguggcccugguacaucuggcugggcuuuaucgccggacugauugccaucgugaucgucacaaucaugcuguguugcaugaccagcugcuguagcugccugaagggcuguuguagcuguggcagcugcugcaaguucgacgaggacgauucugagcccgugcugaagggcgugaaacugcacuacacaugaggacuaguuauaagacugacuagcccgaugggccucccaacgggcccuccuccccuccuugcaccgagauuaauaaaaaaaaaaaaaaaaaaaaaaaaaaaaaaaaaaaaaaaaaaaaaaaaaaaaaaaaaaaaaaaaaaaaaaaaaaaaaaaaaaaaaaaaaaaaaaaaaaaa

SEQ ID NO: 25491 - RNA, 4002 nt, Artificial Sequence
  SARS-CoV-2/Wuhan/WIV05/2019__EPI_ISL_402128 spike protein mRNA gc mod (1-1273)(H69del_V70del_Y144del_N501Y_A570D_D614G_P681H_T716I_S982 A_D1118H)
aggagaaagcuuaccauguucguguuccuggugcugcugccucugguguccagccagugugugaaccugaccaccagaacacagcugccuccagccuacaccaacagcuuuaccagaggcguguacuaccccgacaagguguucagauccagcgugcugcacucuacccaggaccuguuccugccuuucuucagcaacgugaccugguuccacgccaucuccggcaccaauggcaccaagagauucgacaaccccgugcugcccuucaacgacgggguguacuuugccagcaccgagaaguccaacaucaucagaggcuggaucuucggcaccacacuggacagcaagacccagagccugcugaucgugaacaacgccaccaacguggucaucaaagugugcgaguuccaguucugcaacgaccccuuccugggcgucuaccacaagaacaacaagagcuggauggaaagcgaguuccggguguacagcagcgccaacaacugcaccuucgaguacgugucccagccuuuccugauggaccuggaaggcaagcagggcaacuucaagaaccugcgcgaguucguguuuaagaacaucgacggcuacuucaagaucuacagcaagcacaccccuaucaaccucgugcgggaucugccucagggcuucucugcucuggaaccccugguggaucugcccaucggcaucaacaucacccgguuucagacacugcuggcccugcacagaagcuaccugacaccuggcgauagcagcagcggauggacagcuggugccgccgcuuacuaugugggcuaccugcagccuagaaccuuccugcugaaguacaacgagaacggcaccaucaccgacgccguggauugugcucuggauccucugagcgagacaaagugcacccugaaguccuucaccguggaaaagggcaucuaccagaccagcaacuuccgggugcagcccaccgaauccaucgugcgguuccccaauaucaccaaucugugccccuucggcgagguguucaaugccaccagauucgccucuguguacgccuggaaccggaagcggaucagcaauugcguggccgacuacuccgugcuguacaacuccgccagcuucagcaccuucaagugcuacggcguguccccuaccaagcugaacgaccugugcuucacaaacguguacgccgacagcuucgugauccggggagaugaagugcggcagauugccccuggacagacaggcaagaucgccgacuacaacuacaagcugcccgacgacuucaccggcugugugauugccuggaacagcaacaaccuggacuccaaagucggcggcaacuacaauuaccuguaccggcuguuccggaaguccaaucugaagcccuucgagcgggacaucuccaccgagaucuaucaggccggcagcaccccuuguaacggcguggaaggcuucaacugcuacuucccacugcaguccuacggcuuucagcccacauacggcgugggcuaucagcccuacagagugguggugcugagcuucgaacugcugcaugccccugccacagugugcggcccuaagaaaagcaccaaucucgugaagaacaaaugcgugaacuucaacuucaacggccugaccggcaccggcgugcugacagagagcaacaagaaguuccugccauuccagcaguuuggccgggauaucgacgauaccacagacgccguuagagauccccagacacuggaaauccuggacaucaccccuugcagcuucggcggagugucugugaucaccccuggcaccaacaccagcaaucagguggcagugcuguaccagggcgugaacuguaccgaagugcccguggccauucacgccgaucagcugacaccuacauggcggguguacuccaccggcagcaauguguuucagaccagagccggcugucugaucggagccgagcacgugaacaauagcuacgagugcgacauccccaucggcgcuggaaucugcgccagcuaccagacacagacaaacagccaccggagagccagaagcguggccagccagagcaucauugccuacacaaugucucugggcgccgagaacagcguggccuacuccaacaacucuaucgcuauccccaucaacuucaccaucagcgugaccacagagauccugccuguguccaugaccaagaccagcguggacugcaccauguacaucugcggcgauuccaccgagugcuccaaccugcugcugcaguacggcagcuucugcacccagcugaauagagcccugacagggaucgccguggaacaggacaagaacacccaagagguguucgcccaagugaagcagaucuacaagaccccuccuaucaaggacuucggcggcuucaauuucagccagauucugcccgauccuagcaagcccagcaagcggagcuucaucgaggaccugcuguucaacaaagugacacuggccgacgccggcuucaucaagcaguauggcgauugucugggcgacauugccgccagggaucugauuugcgcccagaaguuuaacggacugacagugcugccuccucugcugaccgaugagaugaucgcccaguacacaucugcccugcuggccggcacaaucacaagcggcuggacauuuggagcaggcgccgcucugcagauccccuuugcuaugcagauggccuaccgguucaacggcaucggagugacccagaaugugcuguacgagaaccagaagcugaucgccaaccaguucaacagcgccaucggcaagauccaggacagccugagcagcacagcaagcgcccugggaaagcugcaggacguggucaaccagaaugcccaggcacugaacacccuggucaagcagcuguccuccaacuucggcgccaucagcucugugcugaacgauauccuggccagacuggacaaggucgaggccgaggugcagaucgacagacugaucacaggcagacugcagagccuccagacauacgugacccagcagcugaucagagccgccgagauuagagccucugccaaucuggccgccaccaagaugucugagugugugcugggccagagcaagagaguggacuuuugcggcaagggcuaccaccugaugagcuucccucagucugccccucacggcgugguguuucugcacgugacauaugugcccgcucaagagaagaauuucaccaccgcuccagccaucugccacgacggcaaagcccacuuuccuagagaaggcguguucguguccaacggcacccauugguucgugacacagcggaacuucuacgagccccagaucaucaccacccacaacaccuucgugucuggcaacugcgacgucgugaucggcauugugaacaauaccguguacgacccucugcagcccgagcuggacagcuucaaagaggaacuggacaaguacuuuaagaaccacacaagccccgacguggaccugggcgauaucagcggaaucaaugccagcgucgugaacauccagaaagagaucgaccggcugaacgagguggccaagaaucugaacgagagccugaucgaccugcaagaacuggggaaguacgagcaguacaucaaguggcccugguacaucuggcugggcuuuaucgccggacugauugccaucgugauggucacaaucaugcuguguugcaugaccagcugcuguagcugccugaagggcuguuguagcuguggcagcugcugcaaguucgacgaggacgauucugagcccgugcugaagggcgugaaacugcacuacacaugaggacuaguuauaagacugacuagcccgaugggccucccaacgggcccuccuccccuccuugcaccgagauuaauaaaaaaaaaaaaaaaaaaaaaaaaaaaaaaaaaaaaaaaaaaaaaaaaaaaaaaaaaaaaaaaaaaaaaaaaaaaaaaaaaaaaaaaaaaaaaaaaaaaa

SEQ ID NO: 25492 - RNA, 4011 nt, Artificial Sequence
  SARS-CoV-2/Wuhan/WIV05/2019__EPI_ISL_402128 spike protein mRNA gc mod (1-1273)(K417N_E484K_N501Y_D614G)
aggagaaagcuuaccauguucguguuccuggugcugcugccucugguguccagccagugugugaaccugaccaccagaacacagcugccuccagccuacaccaacagcuuuaccagaggcguguacuaccccgacaagguguucagauccagcgugcugcacucuacccaggaccuguuccugccuuucuucagcaacgugaccugguuccacgccauccacguguccggcaccaauggcaccaagagauucgacaaccccgugcugcccuucaacgacgggguguacuuugccagcaccgagaaguccaacaucaucagaggcuggaucuucggcaccacacuggacagcaagacccagagccugcugaucgugaacaacgccaccaacguggucaucaaagugugcgaguuccaguucugcaacgaccccuuccugggcgucuacuaccacaagaacaacaagagcuggauggaaagcgaguuccggguguacagcagcgccaacaacugcaccuucgaguacgugucccagccuuuccugauggaccuggaaggcaagcagggcaacuucaagaaccugcgcgaguucguguuuaagaacaucgacggcuacuucaagaucuacagcaagcacaccccuaucaaccucgugcgggaucugccucagggcuucucugcucuggaaccccugguggaucugcccaucggcaucaacaucacccgguuucagacacugcuggcccugcacagaagcuaccugacaccuggcgauagcagcagcggauggacagcuggugccgccgcuuacuaugugggcuaccugcagccuagaaccuuccugcugaaguacaacgagaacggcaccaucaccgacgccguggauugugcucuggauccucugagcgagacaaagugcacccugaaguccuucaccguggaaaagggcaucuaccagaccagcaacuuccgggugcagcccaccgaauccaucgugcgguuccccaauaucaccaaucugugccccuucggcgagguguucaaugccaccagauucgccucuguguacgccuggaaccggaagcggaucagcaauugcguggccgacuacuccgugcuguacaacuccgccagcuucagcaccuucaagugcuacggcguguccccuaccaagcugaacgaccugugcuucacaaacguguacgccgacagcuucgugauccggggagaugaagugcggcagauugccccuggacagacaggcaacaucgccgacuacaacuacaagcugcccgacgacuucaccggcugugugauugccuggaacagcaacaaccuggacuccaaagucggcggcaacuacaauuaccuguaccggcuguuccggaaguccaaucugaagcccuucgagcgggacaucuccaccgagaucuaucaggccggcagcaccccuuguaacggcgugaagggcuucaacugcuacuucccacugcaguccuacggcuuucagcccacauacggcgugggcuaucagcccuacagagugguggugcugagcuucgaacugcugcaugccccugccacagugugcggcccuaagaaaagcaccaaucucgugaagaacaaaugcgugaacuucaacuucaacggccugaccggcaccggcgugcugacagagagcaacaagaaguuccugccauuccagcaguuuggccgggauaucgccgauaccacagacgccguuagagauccccagacacuggaaauccuggacaucaccccuugcagcuucggcggagugucugugaucaccccuggcaccaacaccagcaaucagguggcagugcuguaccagggcgugaacuguaccgaagugcccguggccauucacgccgaucagcugacaccuacauggcggguguacuccaccggcagcaauguguuucagaccagagccggcugucugaucggagccgagcacgugaacaauagcuacgagugcgacauccccaucggcgcuggaaucugcgccagcuaccagacacagacaaacagcccucggagagccagaagcguggccagccagagcaucauugccuacacaaugucucugggcgccgagaacagcguggccuacuccaacaacucuaucgcuauccccaccaacuucaccaucagcgugaccacagagauccugccuguguccaugaccaagaccagcguggacugcaccauguacaucugcggcgauuccaccgagugcuccaaccugcugcugcaguacggcagcuucugcacccagcugaauagagcccugacagggaucgccguggaacaggacaagaacacccaagagguguucgcccaagugaagcagaucuacaagaccccuccuaucaaggacuucggcggcuucaauuucagccagauucugcccgauccuagcaagcccagcaagcggagcuucaucgaggaccugcuguucaacaaagugacacuggccgacgccggcuucaucaagcaguauggcgauugucugggcgacauugccgccagggaucugauuugcgcccagaaguuuaacggacugacagugcugccuccucugcugaccgaugagaugaucgcccaguacacaucugcccugcuggccggcacaaucacaagcggcuggacauuuggagcaggcgccgcucugcagauccccuuugcuaugcagauggccuaccgguucaacggcaucggagugacccagaaugugcuguacgagaaccagaagcugaucgccaaccaguucaacagcgccaucggcaagauccaggacagccugagcagcacagcaagcgcccugggaaagcugcaggacguggucaaccagaaugcccaggcacugaacacccuggucaagcagcuguccuccaacuucggcgccaucagcucugugcugaacgauauccugagcagacuggacaaggucgaggccgaggugcagaucgacagacugaucacaggcagacugcagagccuccagacauacgugacccagcagcugaucagagccgccgagauuagagccucugccaaucuggccgccaccaagaugucugagugugugcugggccagagcaagagaguggacuuuugcggcaagggcuaccaccugaugagcuucccucagucugccccucacggcgugguguuucugcacgugacauaugugcccgcucaagagaagaauuucaccaccgcuccagccaucugccacgacggcaaagcccacuuuccuagagaaggcguguucguguccaacggcacccauugguucgugacacagcggaacuucuacgagccccagaucaucaccaccgacaacaccuucgugucuggcaacugcgacgucgugaucggcauugugaacaauaccguguacgacccucugcagcccgagcuggacagcuucaaagaggaacuggacaaguacuuuaagaaccacacaagccccgacguggaccugggcgauaucagcggaaucaaugccagcgucgugaacauccagaaagagaucgaccggcugaacgagguggccaagaaucugaacgagagccugaucgaccugcaagaacuggggaaguacgagcaguacaucaaguggcccugguacaucuggcugggcuuuaucgccggacugauugccaucgugauggucacaaucaugcuguguugcaugaccagcugcuguagcugccugaagggcuguuguagcuguggcagcugcugcaaguucgacgaggacgauucugagcccgugcugaagggcgugaaacugcacuacacaugaggacuaguuauaagacugacuagcccgaugggccucccaacgggcccuccuccccuccuugcaccgagauuaauaaaaaaaaaaaaaaaaaaaaaaaaaaaaaaaaaaaaaaaaaaaaaaaaaaaaaaaaaaaaaaaaaaaaaaaaaaaaaaaaaaaaaaaaaaaaaaaaaaaa

SEQ ID NO: 25493 - RNA, 4002 nt, Artificial Sequence
  SARS-CoV-2/Wuhan/WIV05/2019__EPI_ISL_402128 spike protein mRNA gc mod (1-1273)(L18F_D80A_D215G_L242del_A243del_L244del_R246I_K417N_E484 K_N501Y_D614G_A701V)
aggagaaagcuuaccauguucguguuccuggugcugcugccucugguguccagccagugugugaacuucaccaccagaacacagcugccuccagccuacaccaacagcuuuaccagaggcguguacuaccccgacaagguguucagauccagcgugcugcacucuacccaggaccuguuccugccuuucuucagcaacgugaccugguuccacgccauccacguguccggcaccaauggcaccaagagauucgccaaccccgugcugcccuucaacgacgggguguacuuugccagcaccgagaaguccaacaucaucagaggcuggaucuucggcaccacacuggacagcaagacccagagccugcugaucgugaacaacgccaccaacguggucaucaaagugugcgaguuccaguucugcaacgaccccuuccugggcgucuacuaccacaagaacaacaagagcuggauggaaagcgaguuccggguguacagcagcgccaacaacugcaccuucgaguacgugucccagccuuuccugauggaccuggaaggcaagcagggcaacuucaagaaccugcgcgaguucguguuuaagaacaucgacggcuacuucaagaucuacagcaagcacaccccuaucaaccucgugcggggccugccucagggcuucucugcucuggaaccccugguggaucugcccaucggcaucaacaucacccgguuucagacacugcacaucagcuaccugacaccuggcgauagcagcagcggauggacagcuggugccgccgcuuacuaugugggcuaccugcagccuagaaccuuccugcugaaguacaacgagaacggcaccaucaccgacgccguggauugugcucuggauccucugagcgagacaaagugcacccugaaguccuucaccguggaaaagggcaucuaccagaccagcaacuuccgggugcagcccaccgaauccaucgugcgguuccccaauaucaccaaucugugccccuucggcgagguguucaaugccaccagauucgccucuguguacgccuggaaccggaagcggaucagcaauugcguggccgacuacuccgugcuguacaacuccgccagcuucagcaccuucaagugcuacggcguguccccuaccaagcugaacgaccugugcuucacaaacguguacgccgacagcuucgugauccggggagaugaagugcggcagauugccccuggacagacaggcaacaucgccgacuacaacuacaagcugcccgacgacuucaccggcugugugauugccuggaacagcaacaaccuggacuccaaagucggcggcaacuacaauuaccuguaccggcuguuccggaaguccaaucugaagcccuucgagcgggacaucuccaccgagaucuaucaggccggcagcaccccuuguaacggcgugaagggcuucaacugcuacuucccacugcaguccuacggcuuucagcccacauacggcgugggcuaucagcccuacagagugguggugcugagcuucgaacugcugcaugccccugccacagugugcggcccuaagaaaagcaccaaucucgugaagaacaaaugcgugaacuucaacuucaacggccugaccggcaccggcgugcugacagagagcaacaagaaguuccugccauuccagcaguuuggccgggauaucgccgauaccacagacgccguuagagauccccagacacuggaaauccuggacaucaccccuugcagcuucggcggagugucugugaucaccccuggcaccaacaccagcaaucagguggcagugcuguaccagggcgugaacuguaccgaagugcccguggccauucacgccgaucagcugacaccuacauggcggguguacuccaccggcagcaauguguuucagaccagagccggcugucugaucggagccgagcacgugaacaauagcuacgagugcgacauccccaucggcgcuggaaucugcgccagcuaccagacacagacaaacagcccucggagagccagaagcguggccagccagagcaucauugccuacacaaugucucugggcguggagaacagcguggccuacuccaacaacucuaucgcuauccccaccaacuucaccaucagcgugaccacagagauccugccuguguccaugaccaagaccagcguggacugcaccauguacaucugcggcgauuccaccgagugcuccaaccugcugcugcaguacggcagcuucugcacccagcugaauagagcccugacagggaucgccguggaacaggacaagaacacccaagagguguucgcccaagugaagcagaucuacaagaccccuccuaucaaggacuucggcggcuucaauuucagccagauucugcccgauccuagcaagcccagcaagcggagcuucaucgaggaccugcuguucaacaaagugacacuggccgacgccggcuucaucaagcaguauggcgauugucugggcgacauugccgccagggaucugauuugcgcccagaaguuuaacggacugacagugcugccuccucugcugaccgaugagaugaucgcccaguacacaucugcccugcuggccggcacaaucacaagcggcuggacauuuggagcaggcgccgcucugcagauccccuuugcuaugcagauggccuaccgguucaacggcaucggagugacccagaaugugcuguacgagaaccagaagcugaucgccaaccaguucaacagcgccaucggcaagauccaggacagccugagcagcacagcaagcgcccugggaaagcugcaggacguggucaaccagaaugcccaggcacugaacacccuggucaagcagcuguccuccaacuucggcgccaucagcucugugcugaacgauauccugagcagacuggacaaggucgaggccgaggugcagaucgacagacugaucacaggcagacugcagagccuccagacauacgugacccagcagcugaucagagccgccgagauuagagccucugccaaucuggccgccaccaagaugucugagugugugcugggccagagcaagagaguggacuuuugcggcaagggcuaccaccugaugagcuucccucagucugccccucacggcgugguguuucugcacgugacauaugugcccgcucaagagaagaauuucaccaccgcuccagccaucugccacgacggcaaagcccacuuuccuagagaaggcguguucguguccaacggcacccauugguucgugacacagcggaacuucuacgagccccagaucaucaccaccgacaacaccuucgugucuggcaacugcgacgucgugaucggcauugugaacaauaccguguacgacccucugcagcccgagcuggacagcuucaaagaggaacuggacaaguacuuuaagaaccacacaagccccgacguggaccugggcgauaucagcggaaucaaugccagcgucgugaacauccagaaagagaucgaccggcugaacgagguggccaagaaucugaacgagagccugaucgaccugcaagaacuggggaaguacgagcaguacaucaaguggcccugguacaucuggcugggcuuuaucgccggacugauugccaucgugauggucacaaucaugcuguguugcaugaccagcugcuguagcugccugaagggcuguuguagcuguggcagcugcugcaaguucgacgaggacgauucugagcccgugcugaagggcgugaaacugcacuacacaugaggacuaguuauaagacugacuagcccgaugggccucccaacgggcccuccuccccuccuugcaccgagauuaauaaaaaaaaaaaaaaaaaaaaaaaaaaaaaaaaaaaaaaaaaaaaaaaaaaaaaaaaaaaaaaaaaaaaaaaaaaaaaaaaaaaaaaaaaaaaaaaaaaaa

SEQ ID NO: 25494 - RNA, 4011 nt, Artificial Sequence
  SARS-CoV-2/Wuhan/WIV05/2019__EPI_ISL_402128 spike protein mRNA gc mod (1-1273)(E484K_D614G)
aggagaaagcuuaccauguucguguuccuggugcugcugccucugguguccagccagugugugaaccugaccaccagaacacagcugccuccagccuacaccaacagcuuuaccagaggcguguacuaccccgacaagguguucagauccagcgugcugcacucuacccaggaccuguuccugccuuucuucagcaacgugaccugguuccacgccauccacguguccggcaccaauggcaccaagagauucgacaaccccgugcugcccuucaacgacgggguguacuuugccagcaccgagaaguccaacaucaucagaggcuggaucuucggcaccacacuggacagcaagacccagagccugcugaucgugaacaacgccaccaacguggucaucaaagugugcgaguuccaguucugcaacgaccccuuccugggcgucuacuaccacaagaacaacaagagcuggauggaaagcgaguuccggguguacagcagcgccaacaacugcaccuucgaguacgugucccagccuuuccugauggaccuggaaggcaagcagggcaacuucaagaaccugcgcgaguucguguuuaagaacaucgacggcuacuucaagaucuacagcaagcacaccccuaucaaccucgugcgggaucugccucagggcuucucugcucuggaaccccugguggaucugcccaucggcaucaacaucacccgguuucagacacugcuggcccugcacagaagcuaccugacaccuggcgauagcagcagcggauggacagcuggugccgccgcuuacuaugugggcuaccugcagccuagaaccuuccugcugaaguacaacgagaacggcaccaucaccgacgccguggauugugcucuggauccucugagcgagacaaagugcacccugaaguccuucaccguggaaaagggcaucuaccagaccagcaacuuccgggugcagcccaccgaauccaucgugcgguuccccaauaucaccaaucugugccccuucggcgagguguucaaugccaccagauucgccucuguguacgccuggaaccggaagcggaucagcaauugcguggccgacuacuccgugcuguacaacuccgccagcuucagcaccuucaagugcuacggcguguccccuaccaagcugaacgaccugugcuucacaaacguguacgccgacagcuucgugauccggggagaugaagugcggcagauugccccuggacagacaggcaagaucgccgacuacaacuacaagcugcccgacgacuucaccggcugugugauugccuggaacagcaacaaccuggacuccaaagucggcggcaacuacaauuaccuguaccggcuguuccggaaguccaaucugaagcccuucgagcgggacaucuccaccgagaucuaucaggccggcagcaccccuuguaacggcgugaagggcuucaacugcuacuucccacugcaguccuacggcuuucagcccacaaauggcgugggcuaucagcccuacagagugguggugcugagcuucgaacugcugcaugccccugccacagugugcggcccuaagaaaagcaccaaucucgugaagaacaaaugcgugaacuucaacuucaacggccugaccggcaccggcgugcugacagagagcaacaagaaguuccugccauuccagcaguuuggccgggauaucgccgauaccacagacgccguuagagauccccagacacuggaaauccuggacaucaccccuugcagcuucggcggagugucugugaucaccccuggcaccaacaccagcaaucagguggcagugcuguaccagggcgugaacuguaccgaagugcccguggccauucacgccgaucagcugacaccuacauggcggguguacuccaccggcagcaauguguuucagaccagagccggcugucugaucggagccgagcacgugaacaauagcuacgagugcgacauccccaucggcgcuggaaucugcgccagcuaccagacacagacaaacagcccucggagagccagaagcguggccagccagagcaucauugccuacacaaugucucugggcgccgagaacagcguggccuacuccaacaacucuaucgcuauccccaccaacuucaccaucagcgugaccacagagauccugccuguguccaugaccaagaccagcguggacugcaccauguacaucugcggcgauuccaccgagugcuccaaccugcugcugcaguacggcagcuucugcacccagcugaauagagcccugacagggaucgccguggaacaggacaagaacacccaagagguguucgcccaagugaagcagaucuacaagaccccuccuaucaaggacuucggcggcuucaauuucagccagauucugcccgauccuagcaagcccagcaagcggagcuucaucgaggaccugcuguucaacaaagugacacuggccgacgccggcuucaucaagcaguauggcgauugucugggcgacauugccgccagggaucugauuugcgcccagaaguuuaacggacugacagugcugccuccucugcugaccgaugagaugaucgcccaguacacaucugcccugcuggccggcacaaucacaagcggcuggacauuuggagcaggcgccgcucugcagauccccuuugcuaugcagauggccuaccgguucaacggcaucggagugacccagaaugugcuguacgagaaccagaagcugaucgccaaccaguucaacagcgccaucggcaagauccaggacagccugagcagcacagcaagcgcccugggaaagcugcaggacguggucaaccagaaugcccaggcacugaacacccuggucaagcagcuguccuccaacuucggcgccaucagcucugugcugaacgauauccugagcagacuggacaaggucgaggccgaggugcagaucgacagacugaucacaggcagacugcagagccuccagacauacgugacccagcagcugaucagagccgccgagauuagagccucugccaaucuggccgccaccaagaugucugagugugugcugggccagagcaagagaguggacuuuugcggcaagggcuaccaccugaugagcuucccucagucugccccucacggcgugguguuucugcacgugacauaugugcccgcucaagagaagaauuucaccaccgcuccagccaucugccacgacggcaaagcccacuuuccuagagaaggcguguucguguccaacggcacccauugguucgugacacagcggaacuucuacgagccccagaucaucaccaccgacaacaccuucgugucuggcaacugcgacgucgugaucggcauugugaacaauaccguguacgacccucugcagcccgagcuggacagcuucaaagaggaacuggacaaguacuuuaagaaccacacaagccccgacguggaccugggcgauaucagcggaaucaaugccagcgucgugaacauccagaaagagaucgaccggcugaacgagguggccaagaaucugaacgagagccugaucgaccugcaagaacuggggaaguacgagcaguacaucaaguggcccugguacaucuggcugggcuuuaucgccggacugauugccaucgugauggucacaaucaugcuguguugcaugaccagcugcuguagcugccugaagggcuguuguagcuguggcagcugcugcaaguucgacgaggacgauucugagcccgugcugaagggcgugaaacugcacuacacaugaggacuaguuauaagacugacuagcccgaugggccucccaacgggcccuccuccccuccuugcaccgagauuaauaaaaaaaaaaaaaaaaaaaaaaaaaaaaaaaaaaaaaaaaaaaaaaaaaaaaaaaaaaaaaaaaaaaaaaaaaaaaaaaaaaaaaaaaaaaaaaaaaaaa

SEQ ID NO: 25495 - RNA, 4011 nt, Artificial Sequence
  SARS-CoV-2/Wuhan/WIV05/2019__EPI_ISL_402128 spike protein mRNA gc mod (1-1273)(L18F_T20N_P26S_D138Y_R190S_K417T_E484K_N501Y_D614G_H655Y _T1027I)
aggagaaagcuuaccauguucguguuccuggugcugcugccucugguguccagccagugugugaacuucaccaacagaacacagcugccuagcgccuacaccaacagcuuuaccagaggcguguacuaccccgacaagguguucagauccagcgugcugcacucuacccaggaccuguuccugccuuucuucagcaacgugaccugguuccacgccauccacguguccggcaccaauggcaccaagagauucgacaaccccgugcugcccuucaacgacgggguguacuuugccagcaccgagaaguccaacaucaucagaggcuggaucuucggcaccacacuggacagcaagacccagagccugcugaucgugaacaacgccaccaacguggucaucaaagugugcgaguuccaguucugcaacuaccccuuccugggcgucuacuaccacaagaacaacaagagcuggauggaaagcgaguuccggguguacagcagcgccaacaacugcaccuucgaguacgugucccagccuuuccugauggaccuggaaggcaagcagggcaacuucaagaaccugagcgaguucguguuuaagaacaucgacggcuacuucaagaucuacagcaagcacaccccuaucaaccucgugcgggaucugccucagggcuucucugcucuggaaccccugguggaucugcccaucggcaucaacaucacccgguuucagacacugcuggcccugcacagaagcuaccugacaccuggcgauagcagcagcggauggacagcuggugccgccgcuuacuaugugggcuaccugcagccuagaaccuuccugcugaaguacaacgagaacggcaccaucaccgacgccguggauugugcucuggauccucugagcgagacaaagugcacccugaaguccuucaccguggaaaagggcaucuaccagaccagcaacuuccgggugcagcccaccgaauccaucgugcgguuccccaauaucaccaaucugugccccuucggcgagguguucaaugccaccagauucgccucuguguacgccuggaaccggaagcggaucagcaauugcguggccgacuacuccgugcuguacaacuccgccagcuucagcaccuucaagugcuacggcguguccccuaccaagcugaacgaccugugcuucacaaacguguacgccgacagcuucgugauccggggagaugaagugcggcagauugccccuggacagacaggcaccaucgccgacuacaacuacaagcugcccgacgacuucaccggcugugugauugccuggaacagcaacaaccuggacuccaaagucggcggcaacuacaauuaccuguaccggcuguuccggaaguccaaucugaagcccuucgagcgggacaucuccaccgagaucuaucaggccggcagcaccccuuguaacggcgugaagggcuucaacugcuacuucccacugcaguccuacggcuuucagcccacauacggcgugggcuaucagcccuacagagugguggugcugagcuucgaacugcugcaugccccugccacagugugcggcccuaagaaaagcaccaaucucgugaagaacaaaugcgugaacuucaacuucaacggccugaccggcaccggcgugcugacagagagcaacaagaaguuccugccauuccagcaguuuggccgggauaucgccgauaccacagacgccguuagagauccccagacacuggaaauccuggacaucaccccuugcagcuucggcggagugucugugaucaccccuggcaccaacaccagcaaucagguggcagugcuguaccagggcgugaacuguaccgaagugcccguggccauucacgccgaucagcugacaccuacauggcggguguacuccaccggcagcaauguguuucagaccagagccggcugucugaucggagccgaguacgugaacaauagcuacgagugcgacauccccaucggcgcuggaaucugcgccagcuaccagacacagacaaacagcccucggagagccagaagcguggccagccagagcaucauugccuacacaaugucucugggcgccgagaacagcguggccuacuccaacaacucuaucgcuauccccaccaacuucaccaucagcgugaccacagagauccugccuguguccaugaccaagaccagcguggacugcaccauguacaucugcggcgauuccaccgagugcuccaaccugcugcugcaguacggcagcuucugcacccagcugaauagagcccugacagggaucgccguggaacaggacaagaacacccaagagguguucgcccaagugaagcagaucuacaagaccccuccuaucaaggacuucggcggcuucaauuucagccagauucugcccgauccuagcaagcccagcaagcggagcuucaucgaggaccugcuguucaacaaagugacacuggccgacgccggcuucaucaagcaguauggcgauugucugggcgacauugccgccagggaucugauuugcgcccagaaguuuaacggacugacagugcugccuccucugcugaccgaugagaugaucgcccaguacacaucugcccugcuggccggcacaaucacaagcggcuggacauuuggagcaggcgccgcucugcagauccccuuugcuaugcagauggccuaccgguucaacggcaucggagugacccagaaugugcuguacgagaaccagaagcugaucgccaaccaguucaacagcgccaucggcaagauccaggacagccugagcagcacagcaagcgcccugggaaagcugcaggacguggucaaccagaaugcccaggcacugaacacccuggucaagcagcuguccuccaacuucggcgccaucagcucugugcugaacgauauccugagcagacuggacaaggucgaggccgaggugcagaucgacagacugaucacaggcagacugcagagccuccagacauacgugacccagcagcugaucagagccgccgagauuagagccucugccaaucuggccgccaucaagaugucugagugugugcugggccagagcaagagaguggacuuuugcggcaagggcuaccaccugaugagcuucccucagucugccccucacggcgugguguuucugcacgugacauaugugcccgcucaagagaagaauuucaccaccgcuccagccaucugccacgacggcaaagcccacuuuccuagagaaggcguguucguguccaacggcacccauugguucgugacacagcggaacuucuacgagccccagaucaucaccaccgacaacaccuucgugucuggcaacugcgacgucgugaucggcauugugaacaauaccguguacgacccucugcagcccgagcuggacagcuucaaagaggaacuggacaaguacuuuaagaaccacacaagccccgacguggaccugggcgauaucagcggaaucaaugccagcgucgugaacauccagaaagagaucgaccggcugaacgagguggccaagaaucugaacgagagccugaucgaccugcaagaacuggggaaguacgagcaguacaucaaguggcccugguacaucuggcugggcuuuaucgccggacugauugccaucgugauggucacaaucaugcuguguugcaugaccagcugcuguagcugccugaagggcuguuguagcuguggcagcugcugcaaguucgacgaggacgauucugagcccgugcugaagggcgugaaacugcacuacacaugaggacuaguuauaagacugacuagcccgaugggccucccaacgggcccuccuccccuccuugcaccgagauuaauaaaaaaaaaaaaaaaaaaaaaaaaaaaaaaaaaaaaaaaaaaaaaaaaaaaaaaaaaaaaaaaaaaaaaaaaaaaaaaaaaaaaaaaaaaaaaaaaaaaa

SEQ ID NO: 25496 - RNA, 4011 nt, Artificial Sequence
  SARS-CoV-2/Wuhan/WIV05/2019__EPI_ISL_402128 spike protein mRNA gc mod (1-1273)(S13I_W152C_L452R_D614G)
aggagaaagcuuaccauguucguguuccuggugcugcugccucugguguccauccagugugugaaccugaccaccagaacacagcugccuccagccuacaccaacagcuuuaccagaggcguguacuaccccgacaagguguucagauccagcgugcugcacucuacccaggaccuguuccugccuuucuucagcaacgugaccugguuccacgccauccacguguccggcaccaauggcaccaagagauucgacaaccccgugcugcccuucaacgacgggguguacuuugccagcaccgagaaguccaacaucaucagaggcuggaucuucggcaccacacuggacagcaagacccagagccugcugaucgugaacaacgccaccaacguggucaucaaagugugcgaguuccaguucugcaacgaccccuuccugggcgucuacuaccacaagaacaacaagagcugcauggaaagcgaguuccggguguacagcagcgccaacaacugcaccuucgaguacgugucccagccuuuccugauggaccuggaaggcaagcagggcaacuucaagaaccugcgcgaguucguguuuaagaacaucgacggcuacuucaagaucuacagcaagcacaccccuaucaaccucgugcgggaucugccucagggcuucucugcucuggaaccccugguggaucugcccaucggcaucaacaucacccgguuucagacacugcuggcccugcacagaagcuaccugacaccuggcgauagcagcagcggauggacagcuggugccgccgcuuacuaugugggcuaccugcagccuagaaccuuccugcugaaguacaacgagaacggcaccaucaccgacgccguggauugugcucuggauccucugagcgagacaaagugcacccugaaguccuucaccguggaaaagggcaucuaccagaccagcaacuuccgggugcagcccaccgaauccaucgugcgguuccccaauaucaccaaucugugccccuucggcgagguguucaaugccaccagauucgccucuguguacgccuggaaccggaagcggaucagcaauugcguggccgacuacuccgugcuguacaacuccgccagcuucagcaccuucaagugcuacggcguguccccuaccaagcugaacgaccugugcuucacaaacguguacgccgacagcuucgugauccggggagaugaagugcggcagauugccccuggacagacaggcaagaucgccgacuacaacuacaagcugcccgacgacuucaccggcugugugauugccuggaacagcaacaaccuggacuccaaagucggcggcaacuacaauuaccgcuaccggcuguuccggaaguccaaucugaagcccuucgagcgggacaucuccaccgagaucuaucaggccggcagcaccccuuguaacggcguggaaggcuucaacugcuacuucccacugcaguccuacggcuuucagcccacaaauggcgugggcuaucagcccuacagagugguggugcugagcuucgaacugcugcaugccccugccacagugugcggcccuaagaaaagcaccaaucucgugaagaacaaaugcgugaacuucaacuucaacggccugaccggcaccggcgugcugacagagagcaacaagaaguuccugccauuccagcaguuuggccgggauaucgccgauaccacagacgccguuagagauccccagacacuggaaauccuggacaucaccccuugcagcuucggcggagugucugugaucaccccuggcaccaacaccagcaaucagguggcagugcuguaccagggcgugaacuguaccgaagugcccguggccauucacgccgaucagcugacaccuacauggcggguguacuccaccggcagcaauguguuucagaccagagccggcugucugaucggagccgagcacgugaacaauagcuacgagugcgacauccccaucggcgcuggaaucugcgccagcuaccagacacagacaaacagcccucggagagccagaagcguggccagccagagcaucauugccuacacaaugucucugggcgccgagaacagcguggccuacuccaacaacucuaucgcuauccccaccaacuucaccaucagcgugaccacagagauccugccuguguccaugaccaagaccagcguggacugcaccauguacaucugcggcgauuccaccgagugcuccaaccugcugcugcaguacggcagcuucugcacccagcugaauagagcccugacagggaucgccguggaacaggacaagaacacccaagagguguucgcccaagugaagcagaucuacaagaccccuccuaucaaggacuucggcggcuucaauuucagccagauucugcccgauccuagcaagcccagcaagcggagcuucaucgaggaccugcuguucaacaaagugacacuggccgacgccggcuucaucaagcaguauggcgauugucugggcgacauugccgccagggaucugauuugcgcccagaaguuuaacggacugacagugcugccuccucugcugaccgaugagaugaucgcccaguacacaucugcccugcuggccggcacaaucacaagcggcuggacauuuggagcaggcgccgcucugcagauccccuuugcuaugcagauggccuaccgguucaacggcaucggagugacccagaaugugcuguacgagaaccagaagcugaucgccaaccaguucaacagcgccaucggcaagauccaggacagccugagcagcacagcaagcgcccugggaaagcugcaggacguggucaaccagaaugcccaggcacugaacacccuggucaagcagcuguccuccaacuucggcgccaucagcucugugcugaacgauauccugagcagacuggacaaggucgaggccgaggugcagaucgacagacugaucacaggcagacugcagagccuccagacauacgugacccagcagcugaucagagccgccgagauuagagccucugccaaucuggccgccaccaagaugucugagugugugcugggccagagcaagagaguggacuuuugcggcaagggcuaccaccugaugagcuucccucagucugccccucacggcgugguguuucugcacgugacauaugugcccgcucaagagaagaauuucaccaccgcuccagccaucugccacgacggcaaagcccacuuuccuagagaaggcguguucguguccaacggcacccauugguucgugacacagcggaacuucuacgagccccagaucaucaccaccgacaacaccuucgugucuggcaacugcgacgucgugaucggcauugugaacaauaccguguacgacccucugcagcccgagcuggacagcuucaaagaggaacuggacaaguacuuuaagaaccacacaagccccgacguggaccugggcgauaucagcggaaucaaugccagcgucgugaacauccagaaagagaucgaccggcugaacgagguggccaagaaucugaacgagagccugaucgaccugcaagaacuggggaaguacgagcaguacaucaaguggcccugguacaucuggcugggcuuuaucgccggacugauugccaucgugauggucacaaucaugcuguguugcaugaccagcugcuguagcugccugaagggcuguuguagcuguggcagcugcugcaaguucgacgaggacgauucugagcccgugcugaagggcgugaaacugcacuacacaugaggacuaguuauaagacugacuagcccgaugggccucccaacgggcccuccuccccuccuugcaccgagauuaauaaaaaaaaaaaaaaaaaaaaaaaaaaaaaaaaaaaaaaaaaaaaaaaaaaaaaaaaaaaaaaaaaaaaaaaaaaaaaaaaaaaaaaaaaaaaaaaaaaaa

SEQ ID NO: 25497 - RNA, 4011 nt, Artificial Sequence
  SARS-CoV-2/Wuhan/WIV05/2019__EPI_ISL_402128 spike protein mRNA gc (1-1273)(K986P_V987P)
aggagaaagcuuaccauguucguguuccugguccuccugccccuggugagcucccagugcgugaaccucaccacccgcacgcagcugccgcccgccuacaccaacagcuucacccggggcgucuacuaccccgacaagguguuccgcuccagcgugcugcacuccacccaggaccucuuccugcccuucuucagcaacgucacgugguuccacgccauccacguguccgggaccaacggcaccaagcgguucgacaacccggugcugcccuucaacgacggggucuacuucgcgagcaccgagaaguccaacaucauccgcggcuggaucuucgggacgacccucgacagcaagacccagucccugcugaucgugaacaacgccaccaacguggucaucaaggugugcgaguuccaguucugcaacgaccccuuccucggcguguacuaccacaagaacaacaagagcuggauggaguccgaguuccgggucuacagcuccgccaacaacugcacguucgaguacgugagccagcccuuccugauggaccuggagggcaagcaggggaacuucaagaaccuccgcgaguucguguucaagaacaucgacggcuacuucaagaucuacuccaagcacaccccgaucaaccugguccgggaccugccccagggguucagcgcccucgagccccugguggaccugcccaucggcaucaacaucacccgcuuccagacccuccuggcccugcaccgguccuaccucacgccgggggacagcagcuccggcuggaccgcgggcgccgccgccuacuacgugggguaccugcagccccgcaccuuccugcucaaguacaacgagaacggcaccaucacggacgcggucgacugcgcccuggacccccugagcgagaccaagugcacccucaaguccuucaccguggagaaggggaucuaccagacgagcaacuuccgggugcagcccaccgaguccaucguccgcuucccgaacaucaccaaccugugccccuucggcgagguguucaacgccacccgguucgccagcgucuacgccuggaaccgcaagcggaucuccaacugcguggcggacuacagcgugcuguacaacuccgccagcuucuccacguucaagugcuacggcgucagccccaccaagcucaacgaccugugcuucaccaacguguacgccgacuccuucgugauccgcggggacgagguccggcagaucgcccccggccagaccgggaagaucgccgacuacaacuacaagcugccggacgacuucacgggcugcgugaucgcguggaacagcaacaaccucgacuccaaggucgggggcaacuacaacuaccuguaccgccuguuccgcaagagcaaccucaagcccuucgagcgggacaucuccaccgagaucuaccaggccggcagcacccccugcaacgggguggagggcuucaacugcuacuucccccugcaguccuacggguuccagccgaccaacggcgugggguaccagcccuaccggguggucgugcugagcuucgagcuccugcacgcccccgccacggugugcggccccaagaaguccaccaaccuggucaagaacaagugcgugaacuucaacuucaacggccucaccgggaccggcgugcugaccgagagcaacaagaaguuccugccguuccagcaguucgggcgcgacaucgccgacacgaccgacgcgguccgcgacccccagacccuggagauccucgacaucacccccugcagcuucggcgggguguccgugaucacgccgggcaccaacaccagcaaccaggucgccgugcuguaccaggacgugaacugcaccgagguccccguggccauccacgccgaccagcugacgcccaccuggcggguguacuccaccggcagcaacgucuuccagacccgcgccgggugccucaucggcgcggagcacgugaacaacuccuacgagugcgacauccccaucggggccggcaucugcgccagcuaccagacgcagaccaacuccccgcggcgcgcccggagcguggcgucccagagcaucaucgccuacaccaugucccugggcgccgagaacagcgucgccuacuccaacaacagcaucgccauccccaccaacuucacgaucuccgugaccaccgagauccugcccgugagcaugaccaagacgagcgucgacugcaccauguacaucugcggggacuccaccgagugcagcaaccuccugcugcaguacggcuccuucugcacccagcucaaccgcgcgcugacggggaucgccguggagcaggacaagaacacccaggagguguucgcccaggucaagcagaucuacaagacgcccccgaucaaggacuucggcggguucaacuucagccagauccugcccgaccccuccaagcccagcaagcgguccuucaucgaggaccuccuguucaacaaggugacccuggccgacgccggcuucaucaagcaguacggcgacugccucggggacaucgcggcccgcgaccugaucugcgcccagaaguucaacggccugaccgugcucccgccccugcugaccgacgagaugaucgcccaguacaccagcgcccuccuggcggggaccaucacguccggcuggaccuucggggccggcgccgcccugcagauccccuucgcgaugcagauggccuaccgguucaacggcaucggggucacccagaacgugcucuacgagaaccagaagcugaucgccaaccaguucaacagcgccaucggcaagauccaggacucccugagcuccaccgccagcgcgcucgggaagcugcaggacguggucaaccagaacgcccaggcccugaacacgcucgugaagcagcuguccagcaacuucggcgccaucuccagcgugcugaacgacauccucucccgccuggacccgcccgaggccgaggugcagaucgaccggcugaucaccgggcgccuccagagccugcagaccuacgugacccagcagcugauccgggcggccgagauccgcgccagcgccaaccucgccgcgaccaagauguccgagugcguccugggccagagcaagcggguggacuucugcggcaagggguaccaccugauguccuucccccagagcgccccgcacggcguggucuuccuccacgugacguacguccccgcccaggagaagaacuucaccaccgcccccgcgaucugccacgacgggaaggcccacuucccccgcgagggcguguucguguccaacgggacccacugguucgucacgcagcggaacuucuacgagccgcagaucaucaccaccgacaacaccuucgugagcggcaacugcgacguggucaucggcaucgugaacaacacgguguacgacccccugcagcccgagcuggacuccuucaaggaggagcucgacaaguacuucaagaaccacaccagccccgacgucgaccugggggacaucuccggcaucaacgccagcguggugaacauccagaaggagaucgaccgccugaacgaggucgccaagaaccucaacgagucccugaucgaccugcaggagcucgggaaguacgagcaguacaucaaguggccgugguacaucuggcugggcuucaucgccggccugaucgcgaucgugauggugaccaucaugcucugcugcaugaccagcugcugcuccugccugaaggggugcugcagcugcggcuccugcugcaaguucgacgaggacgacagcgagcccguccugaagggggugaagcuccacuacacgugaggacuaguuauaagacugacuagcccgaugggccucccaacgggcccuccuccccuccuugcaccgagauuaauaaaaaaaaaaaaaaaaaaaaaaaaaaaaaaaaaaaaaaaaaaaaaaaaaaaaaaaaaaaaaaaaaaaaaaaaaaaaaaaaaaaaaaaaaaaaaaaaaaaa

SEQ ID NO: 25498 - RNA, 4011 nt, Artificial Sequence
  SARS-CoV-2/Wuhan/WIV05/2019__EPI_ISL_402128 spike protein mRNA gc (1-1273)(K986P_V987P_ D614G)
aggagaaagcuuaccauguucguguuccugguccuccugccccuggugagcucccagugcgugaaccucaccacccgcacgcagcugccgcccgccuacaccaacagcuucacccggggcgucuacuaccccgacaagguguuccgcuccagcgugcugcacuccacccaggaccucuuccugcccuucuucagcaacgucacgugguuccacgccauccacguguccgggaccaacggcaccaagcgguucgacaacccggugcugcccuucaacgacggggucuacuucgcgagcaccgagaaguccaacaucauccgcggcuggaucuucgggacgacccucgacagcaagacccagucccugcugaucgugaacaacgccaccaacguggucaucaaggugugcgaguuccaguucugcaacgaccccuuccucggcguguacuaccacaagaacaacaagagcuggauggaguccgaguuccgggucuacagcuccgccaacaacugcacguucgaguacgugagccagcccuuccugauggaccuggagggcaagcaggggaacuucaagaaccuccgcgaguucguguucaagaacaucgacggcuacuucaagaucuacuccaagcacaccccgaucaaccugguccgggaccugccccagggguucagcgcccucgagccccugguggaccugcccaucggcaucaacaucacccgcuuccagacccuccuggcccugcaccgguccuaccucacgccgggggacagcagcuccggcuggaccgcgggcgccgccgccuacuacgugggguaccugcagccccgcaccuuccugcucaaguacaacgagaacggcaccaucacggacgcggucgacugcgcccuggacccccugagcgagaccaagugcacccucaaguccuucaccguggagaaggggaucuaccagacgagcaacuuccgggugcagcccaccgaguccaucguccgcuucccgaacaucaccaaccugugccccuucggcgagguguucaacgccacccgguucgccagcgucuacgccuggaaccgcaagcggaucuccaacugcguggcggacuacagcgugcuguacaacuccgccagcuucuccacguucaagugcuacggcgucagccccaccaagcucaacgaccugugcuucaccaacguguacgccgacuccuucgugauccgcggggacgagguccggcagaucgcccccggccagaccgggaagaucgccgacuacaacuacaagcugccggacgacuucacgggcugcgugaucgcguggaacagcaacaaccucgacuccaaggucgggggcaacuacaacuaccuguaccgccuguuccgcaagagcaaccucaagcccuucgagcgggacaucuccaccgagaucuaccaggccggcagcacccccugcaacgggguggagggcuucaacugcuacuucccccugcaguccuacggguuccagccgaccaacggcgugggguaccagcccuaccggguggucgugcugagcuucgagcuccugcacgcccccgccacggugugcggccccaagaaguccaccaaccuggucaagaacaagugcgugaacuucaacuucaacggccucaccgggaccggcgugcugaccgagagcaacaagaaguuccugccguuccagcaguucgggcgcgacaucgccgacacgaccgacgcgguccgcgacccccagacccuggagauccucgacaucacccccugcagcuucggcgggguguccgugaucacgccgggcaccaacaccagcaaccaggucgccgugcuguaccagggcgugaacugcaccgagguccccguggccauccacgccgaccagcugacgcccaccuggcggguguacuccaccggcagcaacgucuuccagacccgcgccgggugccucaucggcgcggagcacgugaacaacuccuacgagugcgacauccccaucggggccggcaucugcgccagcuaccagacgcagaccaacuccccgcggcgcgcccggagcguggcgucccagagcaucaucgccuacaccaugucccugggcgccgagaacagcgucgccuacuccaacaacagcaucgccauccccaccaacuucacgaucuccgugaccaccgagauccugcccgugagcaugaccaagacgagcgucgacugcaccauguacaucugcggggacuccaccgagugcagcaaccuccugcugcaguacggcuccuucugcacccagcucaaccgcgcgcugacggggaucgccguggagcaggacaagaacacccaggagguguucgcccaggucaagcagaucuacaagacgcccccgaucaaggacuucggcggguucaacuucagccagauccugcccgaccccuccaagcccagcaagcgguccuucaucgaggaccuccuguucaacaaggugacccuggccgacgccggcuucaucaagcaguacggcgacugccucggggacaucgcggcccgcgaccugaucugcgcccagaaguucaacggccugaccgugcucccgccccugcugaccgacgagaugaucgcccaguacaccagcgcccuccuggcggggaccaucacguccggcuggaccuucggggccggcgccgcccugcagauccccuucgcgaugcagauggccuaccgguucaacggcaucggggucacccagaacgugcucuacgagaaccagaagcugaucgccaaccaguucaacagcgccaucggcaagauccaggacucccugagcuccaccgccagcgcgcucgggaagcugcaggacguggucaaccagaacgcccaggcccugaacacgcucgugaagcagcuguccagcaacuucggcgccaucuccagcgugcugaacgacauccucucccgccuggacccgcccgaggccgaggugcagaucgaccggcugaucaccgggcgccuccagagccugcagaccuacgugacccagcagcugauccgggcggccgagauccgcgccagcgccaaccucgccgcgaccaagauguccgagugcguccugggccagagcaagcggguggacuucugcggcaagggguaccaccugauguccuucccccagagcgccccgcacggcguggucuuccuccacgugacguacguccccgcccaggagaagaacuucaccaccgcccccgcgaucugccacgacgggaaggcccacuucccccgcgagggcguguucguguccaacgggacccacugguucgucacgcagcggaacuucuacgagccgcagaucaucaccaccgacaacaccuucgugagcggcaacugcgacguggucaucggcaucgugaacaacacgguguacgacccccugcagcccgagcuggacuccuucaaggaggagcucgacaaguacuucaagaaccacaccagccccgacgucgaccugggggacaucuccggcaucaacgccagcguggugaacauccagaaggagaucgaccgccugaacgaggucgccaagaaccucaacgagucccugaucgaccugcaggagcucgggaaguacgagcaguacaucaaguggccgugguacaucuggcugggcuucaucgccggccugaucgcgaucgugauggugaccaucaugcucugcugcaugaccagcugcugcuccugccugaaggggugcugcagcugcggcuccugcugcaaguucgacgaggacgacagcgagcccguccugaagggggugaagcuccacuacacgugaggacuaguuauaagacugacuagcccgaugggccucccaacgggcccuccuccccuccuugcaccgagauuaauaaaaaaaaaaaaaaaaaaaaaaaaaaaaaaaaaaaaaaaaaaaaaaaaaaaaaaaaaaaaaaaaaaaaaaaaaaaaaaaaaaaaaaaaaaaaaaaaaaaa

SEQ ID NO: 25499 - RNA, 4011 nt, Artificial Sequence
  SARS-CoV-2/Wuhan/WIV05/2019__EPI_ISL_402128 spike protein mRNA gc (1-1273)(K986P_V987P_A222V_D614G)
aggagaaagcuuaccauguucguguuccugguccuccugccccuggugagcucccagugcgugaaccucaccacccgcacgcagcugccgcccgccuacaccaacagcuucacccggggcgucuacuaccccgacaagguguuccgcuccagcgugcugcacuccacccaggaccucuuccugcccuucuucagcaacgucacgugguuccacgccauccacguguccgggaccaacggcaccaagcgguucgacaacccggugcugcccuucaacgacggggucuacuucgcgagcaccgagaaguccaacaucauccgcggcuggaucuucgggacgacccucgacagcaagacccagucccugcugaucgugaacaacgccaccaacguggucaucaaggugugcgaguuccaguucugcaacgaccccuuccucggcguguacuaccacaagaacaacaagagcuggauggaguccgaguuccgggucuacagcuccgccaacaacugcacguucgaguacgugagccagcccuuccugauggaccuggagggcaagcaggggaacuucaagaaccuccgcgaguucguguucaagaacaucgacggcuacuucaagaucuacuccaagcacaccccgaucaaccugguccgggaccugccccagggguucagcguccucgagccccugguggaccugcccaucggcaucaacaucacccgcuuccagacccuccuggcccugcaccgguccuaccucacgccgggggacagcagcuccggcuggaccgcgggcgccgccgccuacuacgugggguaccugcagccccgcaccuuccugcucaaguacaacgagaacggcaccaucacggacgcggucgacugcgcccuggacccccugagcgagaccaagugcacccucaaguccuucaccguggagaaggggaucuaccagacgagcaacuuccgggugcagcccaccgaguccaucguccgcuucccgaacaucaccaaccugugccccuucggcgagguguucaacgccacccgguucgccagcgucuacgccuggaaccgcaagcggaucuccaacugcguggcggacuacagcgugcuguacaacuccgccagcuucuccacguucaagugcuacggcgucagccccaccaagcucaacgaccugugcuucaccaacguguacgccgacuccuucgugauccgcggggacgagguccggcagaucgcccccggccagaccgggaagaucgccgacuacaacuacaagcugccggacgacuucacgggcugcgugaucgcguggaacagcaacaaccucgacuccaaggucgggggcaacuacaacuaccuguaccgccuguuccgcaagagcaaccucaagcccuucgagcgggacaucuccaccgagaucuaccaggccggcagcacccccugcaacgggguggagggcuucaacugcuacuucccccugcaguccuacggguuccagccgaccaacggcgugggguaccagcccuaccggguggucgugcugagcuucgagcuccugcacgcccccgccacggugugcggccccaagaaguccaccaaccuggucaagaacaagugcgugaacuucaacuucaacggccucaccgggaccggcgugcugaccgagagcaacaagaaguuccugccguuccagcaguucgggcgcgacaucgccgacacgaccgacgcgguccgcgacccccagacccuggagauccucgacaucacccccugcagcuucggcgggguguccgugaucacgccgggcaccaacaccagcaaccaggucgccgugcuguaccagggcgugaacugcaccgagguccccguggccauccacgccgaccagcugacgcccaccuggcggguguacuccaccggcagcaacgucuuccagacccgcgccgggugccucaucggcgcggagcacgugaacaacuccuacgagugcgacauccccaucggggccggcaucugcgccagcuaccagacgcagaccaacuccccgcggcgcgcccggagcguggcgucccagagcaucaucgccuacaccaugucccugggcgccgagaacagcgucgccuacuccaacaacagcaucgccauccccaccaacuucacgaucuccgugaccaccgagauccugcccgugagcaugaccaagacgagcgucgacugcaccauguacaucugcggggacuccaccgagugcagcaaccuccugcugcaguacggcuccuucugcacccagcucaaccgcgcgcugacggggaucgccguggagcaggacaagaacacccaggagguguucgcccaggucaagcagaucuacaagacgcccccgaucaaggacuucggcggguucaacuucagccagauccugcccgaccccuccaagcccagcaagcgguccuucaucgaggaccuccuguucaacaaggugacccuggccgacgccggcuucaucaagcaguacggcgacugccucggggacaucgcggcccgcgaccugaucugcgcccagaaguucaacggccugaccgugcucccgccccugcugaccgacgagaugaucgcccaguacaccagcgcccuccuggcggggaccaucacguccggcuggaccuucggggccggcgccgcccugcagauccccuucgcgaugcagauggccuaccgguucaacggcaucggggucacccagaacgugcucuacgagaaccagaagcugaucgccaaccaguucaacagcgccaucggcaagauccaggacucccugagcuccaccgccagcgcgcucgggaagcugcaggacguggucaaccagaacgcccaggcccugaacacgcucgugaagcagcuguccagcaacuucggcgccaucuccagcgugcugaacgacauccucucccgccuggacccgcccgaggccgaggugcagaucgaccggcugaucaccgggcgccuccagagccugcagaccuacgugacccagcagcugauccgggcggccgagauccgcgccagcgccaaccucgccgcgaccaagauguccgagugcguccugggccagagcaagcggguggacuucugcggcaagggguaccaccugauguccuucccccagagcgccccgcacggcguggucuuccuccacgugacguacguccccgcccaggagaagaacuucaccaccgcccccgcgaucugccacgacgggaaggcccacuucccccgcgagggcguguucguguccaacgggacccacugguucgucacgcagcggaacuucuacgagccgcagaucaucaccaccgacaacaccuucgugagcggcaacugcgacguggucaucggcaucgugaacaacacgguguacgacccccugcagcccgagcuggacuccuucaaggaggagcucgacaaguacuucaagaaccacaccagccccgacgucgaccugggggacaucuccggcaucaacgccagcguggugaacauccagaaggagaucgaccgccugaacgaggucgccaagaaccucaacgagucccugaucgaccugcaggagcucgggaaguacgagcaguacaucaaguggccgugguacaucuggcugggcuucaucgccggccugaucgcgaucgugauggugaccaucaugcucugcugcaugaccagcugcugcuccugccugaaggggugcugcagcugcggcuccugcugcaaguucgacgaggacgacagcgagcccguccugaagggggugaagcuccacuacacgugaggacuaguuauaagacugacuagcccgaugggccucccaacgggcccuccuccccuccuugcaccgagauuaauaaaaaaaaaaaaaaaaaaaaaaaaaaaaaaaaaaaaaaaaaaaaaaaaaaaaaaaaaaaaaaaaaaaaaaaaaaaaaaaaaaaaaaaaaaaaaaaaaaaa

SEQ ID NO: 25500 - RNA, 4011 nt, Artificial Sequence
  SARS-CoV-2/Wuhan/WIV05/2019__EPI_ISL_402128 spike protein mRNA gc (1-1273)(K986P_V987P_N439K_D614G)
aggagaaagcuuaccauguucguguuccugguccuccugccccuggugagcucccagugcgugaaccucaccacccgcacgcagcugccgcccgccuacaccaacagcuucacccggggcgucuacuaccccgacaagguguuccgcuccagcgugcugcacuccacccaggaccucuuccugcccuucuucagcaacgucacgugguuccacgccauccacguguccgggaccaacggcaccaagcgguucgacaacccggugcugcccuucaacgacggggucuacuucgcgagcaccgagaaguccaacaucauccgcggcuggaucuucgggacgacccucgacagcaagacccagucccugcugaucgugaacaacgccaccaacguggucaucaaggugugcgaguuccaguucugcaacgaccccuuccucggcguguacuaccacaagaacaacaagagcuggauggaguccgaguuccgggucuacagcuccgccaacaacugcacguucgaguacgugagccagcccuuccugauggaccuggagggcaagcaggggaacuucaagaaccuccgcgaguucguguucaagaacaucgacggcuacuucaagaucuacuccaagcacaccccgaucaaccugguccgggaccugccccagggguucagcgcccucgagccccugguggaccugcccaucggcaucaacaucacccgcuuccagacccuccuggcccugcaccgguccuaccucacgccgggggacagcagcuccggcuggaccgcgggcgccgccgccuacuacgugggguaccugcagccccgcaccuuccugcucaaguacaacgagaacggcaccaucacggacgcggucgacugcgcccuggacccccugagcgagaccaagugcacccucaaguccuucaccguggagaaggggaucuaccagacgagcaacuuccgggugcagcccaccgaguccaucguccgcuucccgaacaucaccaaccugugccccuucggcgagguguucaacgccacccgguucgccagcgucuacgccuggaaccgcaagcggaucuccaacugcguggcggacuacagcgugcuguacaacuccgccagcuucuccacguucaagugcuacggcgucagccccaccaagcucaacgaccugugcuucaccaacguguacgccgacuccuucgugauccgcggggacgagguccggcagaucgcccccggccagaccgggaagaucgccgacuacaacuacaagcugccggacgacuucacgggcugcgugaucgcguggaacagcaagaaccucgacuccaaggucgggggcaacuacaacuaccuguaccgccuguuccgcaagagcaaccucaagcccuucgagcgggacaucuccaccgagaucuaccaggccggcagcacccccugcaacgggguggagggcuucaacugcuacuucccccugcaguccuacggguuccagccgaccaacggcgugggguaccagcccuaccggguggucgugcugagcuucgagcuccugcacgcccccgccacggugugcggccccaagaaguccaccaaccuggucaagaacaagugcgugaacuucaacuucaacggccucaccgggaccggcgugcugaccgagagcaacaagaaguuccugccguuccagcaguucgggcgcgacaucgccgacacgaccgacgcgguccgcgacccccagacccuggagauccucgacaucacccccugcagcuucggcgggguguccgugaucacgccgggcaccaacaccagcaaccaggucgccgugcuguaccagggcgugaacugcaccgagguccccguggccauccacgccgaccagcugacgcccaccuggcggguguacuccaccggcagcaacgucuuccagacccgcgccgggugccucaucggcgcggagcacgugaacaacuccuacgagugcgacauccccaucggggccggcaucugcgccagcuaccagacgcagaccaacuccccgcggcgcgcccggagcguggcgucccagagcaucaucgccuacaccaugucccugggcgccgagaacagcgucgccuacuccaacaacagcaucgccauccccaccaacuucacgaucuccgugaccaccgagauccugcccgugagcaugaccaagacgagcgucgacugcaccauguacaucugcggggacuccaccgagugcagcaaccuccugcugcaguacggcuccuucugcacccagcucaaccgcgcgcugacggggaucgccguggagcaggacaagaacacccaggagguguucgcccaggucaagcagaucuacaagacgcccccgaucaaggacuucggcggguucaacuucagccagauccugcccgaccccuccaagcccagcaagcgguccuucaucgaggaccuccuguucaacaaggugacccuggccgacgccggcuucaucaagcaguacggcgacugccucggggacaucgcggcccgcgaccugaucugcgcccagaaguucaacggccugaccgugcucccgccccugcugaccgacgagaugaucgcccaguacaccagcgcccuccuggcggggaccaucacguccggcuggaccuucggggccggcgccgcccugcagauccccuucgcgaugcagauggccuaccgguucaacggcaucggggucacccagaacgugcucuacgagaaccagaagcugaucgccaaccaguucaacagcgccaucggcaagauccaggacucccugagcuccaccgccagcgcgcucgggaagcugcaggacguggucaaccagaacgcccaggcccugaacacgcucgugaagcagcuguccagcaacuucggcgccaucuccagcgugcugaacgacauccucucccgccuggacccgcccgaggccgaggugcagaucgaccggcugaucaccgggcgccuccagagccugcagaccuacgugacccagcagcugauccgggcggccgagauccgcgccagcgccaaccucgccgcgaccaagauguccgagugcguccugggccagagcaagcggguggacuucugcggcaagggguaccaccugauguccuucccccagagcgccccgcacggcguggucuuccuccacgugacguacguccccgcccaggagaagaacuucaccaccgcccccgcgaucugccacgacgggaaggcccacuucccccgcgagggcguguucguguccaacgggacccacugguucgucacgcagcggaacuucuacgagccgcagaucaucaccaccgacaacaccuucgugagcggcaacugcgacguggucaucggcaucgugaacaacacgguguacgacccccugcagcccgagcuggacuccuucaaggaggagcucgacaaguacuucaagaaccacaccagccccgacgucgaccugggggacaucuccggcaucaacgccagcguggugaacauccagaaggagaucgaccgccugaacgaggucgccaagaaccucaacgagucccugaucgaccugcaggagcucgggaaguacgagcaguacaucaaguggccgugguacaucuggcugggcuucaucgccggccugaucgcgaucgugauggugaccaucaugcucugcugcaugaccagcugcugcuccugccugaaggggugcugcagcugcggcuccugcugcaaguucgacgaggacgacagcgagcccguccugaagggggugaagcuccacuacacgugaggacuaguuauaagacugacuagcccgaugggccucccaacgggcccuccuccccuccuugcaccgagauuaauaaaaaaaaaaaaaaaaaaaaaaaaaaaaaaaaaaaaaaaaaaaaaaaaaaaaaaaaaaaaaaaaaaaaaaaaaaaaaaaaaaaaaaaaaaaaaaaaaaaa

SEQ ID NO: 25501 - RNA, 4011 nt, Artificial Sequence
  SARS-CoV-2/Wuhan/WIV05/2019__EPI_ISL_402128 spike protein mRNA gc (1-1273)(K986P_V987P_S477N_D614G)
aggagaaagcuuaccauguucguguuccugguccuccugccccuggugagcucccagugcgugaaccucaccacccgcacgcagcugccgcccgccuacaccaacagcuucacccggggcgucuacuaccccgacaagguguuccgcuccagcgugcugcacuccacccaggaccucuuccugcccuucuucagcaacgucacgugguuccacgccauccacguguccgggaccaacggcaccaagcgguucgacaacccggugcugcccuucaacgacggggucuacuucgcgagcaccgagaaguccaacaucauccgcggcuggaucuucgggacgacccucgacagcaagacccagucccugcugaucgugaacaacgccaccaacguggucaucaaggugugcgaguuccaguucugcaacgaccccuuccucggcguguacuaccacaagaacaacaagagcuggauggaguccgaguuccgggucuacagcuccgccaacaacugcacguucgaguacgugagccagcccuuccugauggaccuggagggcaagcaggggaacuucaagaaccuccgcgaguucguguucaagaacaucgacggcuacuucaagaucuacuccaagcacaccccgaucaaccugguccgggaccugccccagggguucagcgcccucgagccccugguggaccugcccaucggcaucaacaucacccgcuuccagacccuccuggcccugcaccgguccuaccucacgccgggggacagcagcuccggcuggaccgcgggcgccgccgccuacuacgugggguaccugcagccccgcaccuuccugcucaaguacaacgagaacggcaccaucacggacgcggucgacugcgcccuggacccccugagcgagaccaagugcacccucaaguccuucaccguggagaaggggaucuaccagacgagcaacuuccgggugcagcccaccgaguccaucguccgcuucccgaacaucaccaaccugugccccuucggcgagguguucaacgccacccgguucgccagcgucuacgccuggaaccgcaagcggaucuccaacugcguggcggacuacagcgugcuguacaacuccgccagcuucuccacguucaagugcuacggcgucagccccaccaagcucaacgaccugugcuucaccaacguguacgccgacuccuucgugauccgcggggacgagguccggcagaucgcccccggccagaccgggaagaucgccgacuacaacuacaagcugccggacgacuucacgggcugcgugaucgcguggaacagcaacaaccucgacuccaaggucgggggcaacuacaacuaccuguaccgccuguuccgcaagagcaaccucaagcccuucgagcgggacaucuccaccgagaucuaccaggccggcaacacccccugcaacgggguggagggcuucaacugcuacuucccccugcaguccuacggguuccagccgaccaacggcgugggguaccagcccuaccggguggucgugcugagcuucgagcuccugcacgcccccgccacggugugcggccccaagaaguccaccaaccuggucaagaacaagugcgugaacuucaacuucaacggccucaccgggaccggcgugcugaccgagagcaacaagaaguuccugccguuccagcaguucgggcgcgacaucgccgacacgaccgacgcgguccgcgacccccagacccuggagauccucgacaucacccccugcagcuucggcgggguguccgugaucacgccgggcaccaacaccagcaaccaggucgccgugcuguaccagggcgugaacugcaccgagguccccguggccauccacgccgaccagcugacgcccaccuggcggguguacuccaccggcagcaacgucuuccagacccgcgccgggugccucaucggcgcggagcacgugaacaacuccuacgagugcgacauccccaucggggccggcaucugcgccagcuaccagacgcagaccaacuccccgcggcgcgcccggagcguggcgucccagagcaucaucgccuacaccaugucccugggcgccgagaacagcgucgccuacuccaacaacagcaucgccauccccaccaacuucacgaucuccgugaccaccgagauccugcccgugagcaugaccaagacgagcgucgacugcaccauguacaucugcggggacuccaccgagugcagcaaccuccugcugcaguacggcuccuucugcacccagcucaaccgcgcgcugacggggaucgccguggagcaggacaagaacacccaggagguguucgcccaggucaagcagaucuacaagacgcccccgaucaaggacuucggcggguucaacuucagccagauccugcccgaccccuccaagcccagcaagcgguccuucaucgaggaccuccuguucaacaaggugacccuggccgacgccggcuucaucaagcaguacggcgacugccucggggacaucgcggcccgcgaccugaucugcgcccagaaguucaacggccugaccgugcucccgccccugcugaccgacgagaugaucgcccaguacaccagcgcccuccuggcggggaccaucacguccggcuggaccuucggggccggcgccgcccugcagauccccuucgcgaugcagauggccuaccgguucaacggcaucggggucacccagaacgugcucuacgagaaccagaagcugaucgccaaccaguucaacagcgccaucggcaagauccaggacucccugagcuccaccgccagcgcgcucgggaagcugcaggacguggucaaccagaacgcccaggcccugaacacgcucgugaagcagcuguccagcaacuucggcgccaucuccagcgugcugaacgacauccucucccgccuggacccgcccgaggccgaggugcagaucgaccggcugaucaccgggcgccuccagagccugcagaccuacgugacccagcagcugauccgggcggccgagauccgcgccagcgccaaccucgccgcgaccaagauguccgagugcguccugggccagagcaagcggguggacuucugcggcaagggguaccaccugauguccuucccccagagcgccccgcacggcguggucuuccuccacgugacguacguccccgcccaggagaagaacuucaccaccgcccccgcgaucugccacgacgggaaggcccacuucccccgcgagggcguguucguguccaacgggacccacugguucgucacgcagcggaacuucuacgagccgcagaucaucaccaccgacaacaccuucgugagcggcaacugcgacguggucaucggcaucgugaacaacacgguguacgacccccugcagcccgagcuggacuccuucaaggaggagcucgacaaguacuucaagaaccacaccagccccgacgucgaccugggggacaucuccggcaucaacgccagcguggugaacauccagaaggagaucgaccgccugaacgaggucgccaagaaccucaacgagucccugaucgaccugcaggagcucgggaaguacgagcaguacaucaaguggccgugguacaucuggcugggcuucaucgccggccugaucgcgaucgugauggugaccaucaugcucugcugcaugaccagcugcugcuccugccugaaggggugcugcagcugcggcuccugcugcaaguucgacgaggacgacagcgagcccguccugaagggggugaagcuccacuacacgugaggacuaguuauaagacugacuagcccgaugggccucccaacgggcccuccuccccuccuugcaccgagauuaauaaaaaaaaaaaaaaaaaaaaaaaaaaaaaaaaaaaaaaaaaaaaaaaaaaaaaaaaaaaaaaaaaaaaaaaaaaaaaaaaaaaaaaaaaaaaaaaaaaaa

SEQ ID NO: 25502 - RNA, 4011 nt, Artificial Sequence
  SARS-CoV-2/Wuhan/WIV05/2019__EPI_ISL_402128 spike protein mRNA gc (1-1273)(K986P_V987P_N501Y_D614G)
aggagaaagcuuaccauguucguguuccugguccuccugccccuggugagcucccagugcgugaaccucaccacccgcacgcagcugccgcccgccuacaccaacagcuucacccggggcgucuacuaccccgacaagguguuccgcuccagcgugcugcacuccacccaggaccucuuccugcccuucuucagcaacgucacgugguuccacgccauccacguguccgggaccaacggcaccaagcgguucgacaacccggugcugcccuucaacgacggggucuacuucgcgagcaccgagaaguccaacaucauccgcggcuggaucuucgggacgacccucgacagcaagacccagucccugcugaucgugaacaacgccaccaacguggucaucaaggugugcgaguuccaguucugcaacgaccccuuccucggcguguacuaccacaagaacaacaagagcuggauggaguccgaguuccgggucuacagcuccgccaacaacugcacguucgaguacgugagccagcccuuccugauggaccuggagggcaagcaggggaacuucaagaaccuccgcgaguucguguucaagaacaucgacggcuacuucaagaucuacuccaagcacaccccgaucaaccugguccgggaccugccccagggguucagcgcccucgagccccugguggaccugcccaucggcaucaacaucacccgcuuccagacccuccuggcccugcaccgguccuaccucacgccgggggacagcagcuccggcuggaccgcgggcgccgccgccuacuacgugggguaccugcagccccgcaccuuccugcucaaguacaacgagaacggcaccaucacggacgcggucgacugcgcccuggacccccugagcgagaccaagugcacccucaaguccuucaccguggagaaggggaucuaccagacgagcaacuuccgggugcagcccaccgaguccaucguccgcuucccgaacaucaccaaccugugccccuucggcgagguguucaacgccacccgguucgccagcgucuacgccuggaaccgcaagcggaucuccaacugcguggcggacuacagcgugcuguacaacuccgccagcuucuccacguucaagugcuacggcgucagccccaccaagcucaacgaccugugcuucaccaacguguacgccgacuccuucgugauccgcggggacgagguccggcagaucgcccccggccagaccgggaagaucgccgacuacaacuacaagcugccggacgacuucacgggcugcgugaucgcguggaacagcaacaaccucgacuccaaggucgggggcaacuacaacuaccuguaccgccuguuccgcaagagcaaccucaagcccuucgagcgggacaucuccaccgagaucuaccaggccggcagcacccccugcaacgggguggagggcuucaacugcuacuucccccugcaguccuacggguuccagccgaccuacggcgugggguaccagcccuaccggguggucgugcugagcuucgagcuccugcacgcccccgccacggugugcggccccaagaaguccaccaaccuggucaagaacaagugcgugaacuucaacuucaacggccucaccgggaccggcgugcugaccgagagcaacaagaaguuccugccguuccagcaguucgggcgcgacaucgccgacacgaccgacgcgguccgcgacccccagacccuggagauccucgacaucacccccugcagcuucggcgggguguccgugaucacgccgggcaccaacaccagcaaccaggucgccgugcuguaccagggcgugaacugcaccgagguccccguggccauccacgccgaccagcugacgcccaccuggcggguguacuccaccggcagcaacgucuuccagacccgcgccgggugccucaucggcgcggagcacgugaacaacuccuacgagugcgacauccccaucggggccggcaucugcgccagcuaccagacgcagaccaacuccccgcggcgcgcccggagcguggcgucccagagcaucaucgccuacaccaugucccugggcgccgagaacagcgucgccuacuccaacaacagcaucgccauccccaccaacuucacgaucuccgugaccaccgagauccugcccgugagcaugaccaagacgagcgucgacugcaccauguacaucugcggggacuccaccgagugcagcaaccuccugcugcaguacggcuccuucugcacccagcucaaccgcgcgcugacggggaucgccguggagcaggacaagaacacccaggagguguucgcccaggucaagcagaucuacaagacgcccccgaucaaggacuucggcggguucaacuucagccagauccugcccgaccccuccaagcccagcaagcgguccuucaucgaggaccuccuguucaacaaggugacccuggccgacgccggcuucaucaagcaguacggcgacugccucggggacaucgcggcccgcgaccugaucugcgcccagaaguucaacggccugaccgugcucccgccccugcugaccgacgagaugaucgcccaguacaccagcgcccuccuggcggggaccaucacguccggcuggaccuucggggccggcgccgcccugcagauccccuucgcgaugcagauggccuaccgguucaacggcaucggggucacccagaacgugcucuacgagaaccagaagcugaucgccaaccaguucaacagcgccaucggcaagauccaggacucccugagcuccaccgccagcgcgcucgggaagcugcaggacguggucaaccagaacgcccaggcccugaacacgcucgugaagcagcuguccagcaacuucggcgccaucuccagcgugcugaacgacauccucucccgccuggacccgcccgaggccgaggugcagaucgaccggcugaucaccgggcgccuccagagccugcagaccuacgugacccagcagcugauccgggcggccgagauccgcgccagcgccaaccucgccgcgaccaagauguccgagugcguccugggccagagcaagcggguggacuucugcggcaagggguaccaccugauguccuucccccagagcgccccgcacggcguggucuuccuccacgugacguacguccccgcccaggagaagaacuucaccaccgcccccgcgaucugccacgacgggaaggcccacuucccccgcgagggcguguucguguccaacgggacccacugguucgucacgcagcggaacuucuacgagccgcagaucaucaccaccgacaacaccuucgugagcggcaacugcgacguggucaucggcaucgugaacaacacgguguacgacccccugcagcccgagcuggacuccuucaaggaggagcucgacaaguacuucaagaaccacaccagccccgacgucgaccugggggacaucuccggcaucaacgccagcguggugaacauccagaaggagaucgaccgccugaacgaggucgccaagaaccucaacgagucccugaucgaccugcaggagcucgggaaguacgagcaguacaucaaguggccgugguacaucuggcugggcuucaucgccggccugaucgcgaucgugauggugaccaucaugcucugcugcaugaccagcugcugcuccugccugaaggggugcugcagcugcggcuccugcugcaaguucgacgaggacgacagcgagcccguccugaagggggugaagcuccacuacacgugaggacuaguuauaagacugacuagcccgaugggccucccaacgggcccuccuccccuccuugcaccgagauuaauaaaaaaaaaaaaaaaaaaaaaaaaaaaaaaaaaaaaaaaaaaaaaaaaaaaaaaaaaaaaaaaaaaaaaaaaaaaaaaaaaaaaaaaaaaaaaaaaaaaa

SEQ ID NO: 25503 - RNA, 4005 nt, Artificial Sequence
  SARS-CoV-2/Wuhan/WIV05/2019__EPI_ISL_402128 spike protein mRNA gc (1-1273)(K986P_V987P_H69del_V70del_D614G)
aggagaaagcuuaccauguucguguuccugguccuccugccccuggugagcucccagugcgugaaccucaccacccgcacgcagcugccgcccgccuacaccaacagcuucacccggggcgucuacuaccccgacaagguguuccgcuccagcgugcugcacuccacccaggaccucuuccugcccuucuucagcaacgucacgugguuccacgccaucuccgggaccaacggcaccaagcgguucgacaacccggugcugcccuucaacgacggggucuacuucgcgagcaccgagaaguccaacaucauccgcggcuggaucuucgggacgacccucgacagcaagacccagucccugcugaucgugaacaacgccaccaacguggucaucaaggugugcgaguuccaguucugcaacgaccccuuccucggcguguacuaccacaagaacaacaagagcuggauggaguccgaguuccgggucuacagcuccgccaacaacugcacguucgaguacgugagccagcccuuccugauggaccuggagggcaagcaggggaacuucaagaaccuccgcgaguucguguucaagaacaucgacggcuacuucaagaucuacuccaagcacaccccgaucaaccugguccgggaccugccccagggguucagcgcccucgagccccugguggaccugcccaucggcaucaacaucacccgcuuccagacccuccuggcccugcaccgguccuaccucacgccgggggacagcagcuccggcuggaccgcgggcgccgccgccuacuacgugggguaccugcagccccgcaccuuccugcucaaguacaacgagaacggcaccaucacggacgcggucgacugcgcccuggacccccugagcgagaccaagugcacccucaaguccuucaccguggagaaggggaucuaccagacgagcaacuuccgggugcagcccaccgaguccaucguccgcuucccgaacaucaccaaccugugccccuucggcgagguguucaacgccacccgguucgccagcgucuacgccuggaaccgcaagcggaucuccaacugcguggcggacuacagcgugcuguacaacuccgccagcuucuccacguucaagugcuacggcgucagccccaccaagcucaacgaccugugcuucaccaacguguacgccgacuccuucgugauccgcggggacgagguccggcagaucgcccccggccagaccgggaagaucgccgacuacaacuacaagcugccggacgacuucacgggcugcgugaucgcguggaacagcaacaaccucgacuccaaggucgggggcaacuacaacuaccuguaccgccuguuccgcaagagcaaccucaagcccuucgagcgggacaucuccaccgagaucuaccaggccggcagcacccccugcaacgggguggagggcuucaacugcuacuucccccugcaguccuacggguuccagccgaccaacggcgugggguaccagcccuaccggguggucgugcugagcuucgagcuccugcacgcccccgccacggugugcggccccaagaaguccaccaaccuggucaagaacaagugcgugaacuucaacuucaacggccucaccgggaccggcgugcugaccgagagcaacaagaaguuccugccguuccagcaguucgggcgcgacaucgccgacacgaccgacgcgguccgcgacccccagacccuggagauccucgacaucacccccugcagcuucggcgggguguccgugaucacgccgggcaccaacaccagcaaccaggucgccgugcuguaccagggcgugaacugcaccgagguccccguggccauccacgccgaccagcugacgcccaccuggcggguguacuccaccggcagcaacgucuuccagacccgcgccgggugccucaucggcgcggagcacgugaacaacuccuacgagugcgacauccccaucggggccggcaucugcgccagcuaccagacgcagaccaacuccccgcggcgcgcccggagcguggcgucccagagcaucaucgccuacaccaugucccugggcgccgagaacagcgucgccuacuccaacaacagcaucgccauccccaccaacuucacgaucuccgugaccaccgagauccugcccgugagcaugaccaagacgagcgucgacugcaccauguacaucugcggggacuccaccgagugcagcaaccuccugcugcaguacggcuccuucugcacccagcucaaccgcgcgcugacggggaucgccguggagcaggacaagaacacccaggagguguucgcccaggucaagcagaucuacaagacgcccccgaucaaggacuucggcggguucaacuucagccagauccugcccgaccccuccaagcccagcaagcgguccuucaucgaggaccuccuguucaacaaggugacccuggccgacgccggcuucaucaagcaguacggcgacugccucggggacaucgcggcccgcgaccugaucugcgcccagaaguucaacggccugaccgugcucccgccccugcugaccgacgagaugaucgcccaguacaccagcgcccuccuggcggggaccaucacguccggcuggaccuucggggccggcgccgcccugcagauccccuucgcgaugcagauggccuaccgguucaacggcaucggggucacccagaacgugcucuacgagaaccagaagcugaucgccaaccaguucaacagcgccaucggcaagauccaggacucccugagcuccaccgccagcgcgcucgggaagcugcaggacguggucaaccagaacgcccaggcccugaacacgcucgugaagcagcuguccagcaacuucggcgccaucuccagcgugcugaacgacauccucucccgccuggacccgcccgaggccgaggugcagaucgaccggcugaucaccgggcgccuccagagccugcagaccuacgugacccagcagcugauccgggcggccgagauccgcgccagcgccaaccucgccgcgaccaagauguccgagugcguccugggccagagcaagcggguggacuucugcggcaagggguaccaccugauguccuucccccagagcgccccgcacggcguggucuuccuccacgugacguacguccccgcccaggagaagaacuucaccaccgcccccgcgaucugccacgacgggaaggcccacuucccccgcgagggcguguucguguccaacgggacccacugguucgucacgcagcggaacuucuacgagccgcagaucaucaccaccgacaacaccuucgugagcggcaacugcgacguggucaucggcaucgugaacaacacgguguacgacccccugcagcccgagcuggacuccuucaaggaggagcucgacaaguacuucaagaaccacaccagccccgacgucgaccugggggacaucuccggcaucaacgccagcguggugaacauccagaaggagaucgaccgccugaacgaggucgccaagaaccucaacgagucccugaucgaccugcaggagcucgggaaguacgagcaguacaucaaguggccgugguacaucuggcugggcuucaucgccggccugaucgcgaucgugauggugaccaucaugcucugcugcaugaccagcugcugcuccugccugaaggggugcugcagcugcggcuccugcugcaaguucgacgaggacgacagcgagcccguccugaagggggugaagcuccacuacacgugaggacuaguuauaagacugacuagcccgaugggccucccaacgggcccuccuccccuccuugcaccgagauuaauaaaaaaaaaaaaaaaaaaaaaaaaaaaaaaaaaaaaaaaaaaaaaaaaaaaaaaaaaaaaaaaaaaaaaaaaaaaaaaaaaaaaaaaaaaaaaaaaaaaa

SEQ ID NO: 25504 - RNA, 4011 nt, Artificial Sequence
  SARS-CoV-2/Wuhan/WIV05/2019__EPI_ISL_402128 spike protein mRNA gc (1-1273)(K986P_V987P_Y453F_D614G)
aggagaaagcuuaccauguucguguuccugguccuccugccccuggugagcucccagugcgugaaccucaccacccgcacgcagcugccgcccgccuacaccaacagcuucacccggggcgucuacuaccccgacaagguguuccgcuccagcgugcugcacuccacccaggaccucuuccugcccuucuucagcaacgucacgugguuccacgccauccacguguccgggaccaacggcaccaagcgguucgacaacccggugcugcccuucaacgacggggucuacuucgcgagcaccgagaaguccaacaucauccgcggcuggaucuucgggacgacccucgacagcaagacccagucccugcugaucgugaacaacgccaccaacguggucaucaaggugugcgaguuccaguucugcaacgaccccuuccucggcguguacuaccacaagaacaacaagagcuggauggaguccgaguuccgggucuacagcuccgccaacaacugcacguucgaguacgugagccagcccuuccugauggaccuggagggcaagcaggggaacuucaagaaccuccgcgaguucguguucaagaacaucgacggcuacuucaagaucuacuccaagcacaccccgaucaaccugguccgggaccugccccagggguucagcgcccucgagccccugguggaccugcccaucggcaucaacaucacccgcuuccagacccuccuggcccugcaccgguccuaccucacgccgggggacagcagcuccggcuggaccgcgggcgccgccgccuacuacgugggguaccugcagccccgcaccuuccugcucaaguacaacgagaacggcaccaucacggacgcggucgacugcgcccuggacccccugagcgagaccaagugcacccucaaguccuucaccguggagaaggggaucuaccagacgagcaacuuccgggugcagcccaccgaguccaucguccgcuucccgaacaucaccaaccugugccccuucggcgagguguucaacgccacccgguucgccagcgucuacgccuggaaccgcaagcggaucuccaacugcguggcggacuacagcgugcuguacaacuccgccagcuucuccacguucaagugcuacggcgucagccccaccaagcucaacgaccugugcuucaccaacguguacgccgacuccuucgugauccgcggggacgagguccggcagaucgcccccggccagaccgggaagaucgccgacuacaacuacaagcugccggacgacuucacgggcugcgugaucgcguggaacagcaacaaccucgacuccaaggucgggggcaacuacaacuaccuguuccgccuguuccgcaagagcaaccucaagcccuucgagcgggacaucuccaccgagaucuaccaggccggcagcacccccugcaacgggguggagggcuucaacugcuacuucccccugcaguccuacggguuccagccgaccaacggcgugggguaccagcccuaccggguggucgugcugagcuucgagcuccugcacgcccccgccacggugugcggccccaagaaguccaccaaccuggucaagaacaagugcgugaacuucaacuucaacggccucaccgggaccggcgugcugaccgagagcaacaagaaguuccugccguuccagcaguucgggcgcgacaucgccgacacgaccgacgcgguccgcgacccccagacccuggagauccucgacaucacccccugcagcuucggcgggguguccgugaucacgccgggcaccaacaccagcaaccaggucgccgugcuguaccagggcgugaacugcaccgagguccccguggccauccacgccgaccagcugacgcccaccuggcggguguacuccaccggcagcaacgucuuccagacccgcgccgggugccucaucggcgcggagcacgugaacaacuccuacgagugcgacauccccaucggggccggcaucugcgccagcuaccagacgcagaccaacuccccgcggcgcgcccggagcguggcgucccagagcaucaucgccuacaccaugucccugggcgccgagaacagcgucgccuacuccaacaacagcaucgccauccccaccaacuucacgaucuccgugaccaccgagauccugcccgugagcaugaccaagacgagcgucgacugcaccauguacaucugcggggacuccaccgagugcagcaaccuccugcugcaguacggcuccuucugcacccagcucaaccgcgcgcugacggggaucgccguggagcaggacaagaacacccaggagguguucgcccaggucaagcagaucuacaagacgcccccgaucaaggacuucggcggguucaacuucagccagauccugcccgaccccuccaagcccagcaagcgguccuucaucgaggaccuccuguucaacaaggugacccuggccgacgccggcuucaucaagcaguacggcgacugccucggggacaucgcggcccgcgaccugaucugcgcccagaaguucaacggccugaccgugcucccgccccugcugaccgacgagaugaucgcccaguacaccagcgcccuccuggcggggaccaucacguccggcuggaccuucggggccggcgccgcccugcagauccccuucgcgaugcagauggccuaccgguucaacggcaucggggucacccagaacgugcucuacgagaaccagaagcugaucgccaaccaguucaacagcgccaucggcaagauccaggacucccugagcuccaccgccagcgcgcucgggaagcugcaggacguggucaaccagaacgcccaggcccugaacacgcucgugaagcagcuguccagcaacuucggcgccaucuccagcgugcugaacgacauccucucccgccuggacccgcccgaggccgaggugcagaucgaccggcugaucaccgggcgccuccagagccugcagaccuacgugacccagcagcugauccgggcggccgagauccgcgccagcgccaaccucgccgcgaccaagauguccgagugcguccugggccagagcaagcggguggacuucugcggcaagggguaccaccugauguccuucccccagagcgccccgcacggcguggucuuccuccacgugacguacguccccgcccaggagaagaacuucaccaccgcccccgcgaucugccacgacgggaaggcccacuucccccgcgagggcguguucguguccaacgggacccacugguucgucacgcagcggaacuucuacgagccgcagaucaucaccaccgacaacaccuucgugagcggcaacugcgacguggucaucggcaucgugaacaacacgguguacgacccccugcagcccgagcuggacuccuucaaggaggagcucgacaaguacuucaagaaccacaccagccccgacgucgaccugggggacaucuccggcaucaacgccagcguggugaacauccagaaggagaucgaccgccugaacgaggucgccaagaaccucaacgagucccugaucgaccugcaggagcucgggaaguacgagcaguacaucaaguggccgugguacaucuggcugggcuucaucgccggccugaucgcgaucgugauggugaccaucaugcucugcugcaugaccagcugcugcuccugccugaaggggugcugcagcugcggcuccugcugcaaguucgacgaggacgacagcgagcccguccugaagggggugaagcuccacuacacgugaggacuaguuauaagacugacuagcccgaugggccucccaacgggcccuccuccccuccuugcaccgagauuaauaaaaaaaaaaaaaaaaaaaaaaaaaaaaaaaaaaaaaaaaaaaaaaaaaaaaaaaaaaaaaaaaaaaaaaaaaaaaaaaaaaaaaaaaaaaaaaaaaaaa

SEQ ID NO: 25505 - RNA, 4011 nt, Artificial Sequence
  SARS-CoV-2/Wuhan/WIV05/2019__EPI_ISL_402128 spike protein mRNA gc (1-1273)(K986P_V987P_D614G_I692V)
aggagaaagcuuaccauguucguguuccugguccuccugccccuggugagcucccagugcgugaaccucaccacccgcacgcagcugccgcccgccuacaccaacagcuucacccggggcgucuacuaccccgacaagguguuccgcuccagcgugcugcacuccacccaggaccucuuccugcccuucuucagcaacgucacgugguuccacgccauccacguguccgggaccaacggcaccaagcgguucgacaacccggugcugcccuucaacgacggggucuacuucgcgagcaccgagaaguccaacaucauccgcggcuggaucuucgggacgacccucgacagcaagacccagucccugcugaucgugaacaacgccaccaacguggucaucaaggugugcgaguuccaguucugcaacgaccccuuccucggcguguacuaccacaagaacaacaagagcuggauggaguccgaguuccgggucuacagcuccgccaacaacugcacguucgaguacgugagccagcccuuccugauggaccuggagggcaagcaggggaacuucaagaaccuccgcgaguucguguucaagaacaucgacggcuacuucaagaucuacuccaagcacaccccgaucaaccugguccgggaccugccccagggguucagcgcccucgagccccugguggaccugcccaucggcaucaacaucacccgcuuccagacccuccuggcccugcaccgguccuaccucacgccgggggacagcagcuccggcuggaccgcgggcgccgccgccuacuacgugggguaccugcagccccgcaccuuccugcucaaguacaacgagaacggcaccaucacggacgcggucgacugcgcccuggacccccugagcgagaccaagugcacccucaaguccuucaccguggagaaggggaucuaccagacgagcaacuuccgggugcagcccaccgaguccaucguccgcuucccgaacaucaccaaccugugccccuucggcgagguguucaacgccacccgguucgccagcgucuacgccuggaaccgcaagcggaucuccaacugcguggcggacuacagcgugcuguacaacuccgccagcuucuccacguucaagugcuacggcgucagccccaccaagcucaacgaccugugcuucaccaacguguacgccgacuccuucgugauccgcggggacgagguccggcagaucgcccccggccagaccgggaagaucgccgacuacaacuacaagcugccggacgacuucacgggcugcgugaucgcguggaacagcaacaaccucgacuccaaggucgggggcaacuacaacuaccuguaccgccuguuccgcaagagcaaccucaagcccuucgagcgggacaucuccaccgagaucuaccaggccggcagcacccccugcaacgggguggagggcuucaacugcuacuucccccugcaguccuacggguuccagccgaccaacggcgugggguaccagcccuaccggguggucgugcugagcuucgagcuccugcacgcccccgccacggugugcggccccaagaaguccaccaaccuggucaagaacaagugcgugaacuucaacuucaacggccucaccgggaccggcgugcugaccgagagcaacaagaaguuccugccguuccagcaguucgggcgcgacaucgccgacacgaccgacgcgguccgcgacccccagacccuggagauccucgacaucacccccugcagcuucggcgggguguccgugaucacgccgggcaccaacaccagcaaccaggucgccgugcuguaccagggcgugaacugcaccgagguccccguggccauccacgccgaccagcugacgcccaccuggcggguguacuccaccggcagcaacgucuuccagacccgcgccgggugccucaucggcgcggagcacgugaacaacuccuacgagugcgacauccccaucggggccggcaucugcgccagcuaccagacgcagaccaacuccccgcggcgcgcccggagcguggcgucccagagcgucaucgccuacaccaugucccugggcgccgagaacagcgucgccuacuccaacaacagcaucgccauccccaccaacuucacgaucuccgugaccaccgagauccugcccgugagcaugaccaagacgagcgucgacugcaccauguacaucugcggggacuccaccgagugcagcaaccuccugcugcaguacggcuccuucugcacccagcucaaccgcgcgcugacggggaucgccguggagcaggacaagaacacccaggagguguucgcccaggucaagcagaucuacaagacgcccccgaucaaggacuucggcggguucaacuucagccagauccugcccgaccccuccaagcccagcaagcgguccuucaucgaggaccuccuguucaacaaggugacccuggccgacgccggcuucaucaagcaguacggcgacugccucggggacaucgcggcccgcgaccugaucugcgcccagaaguucaacggccugaccgugcucccgccccugcugaccgacgagaugaucgcccaguacaccagcgcccuccuggcggggaccaucacguccggcuggaccuucggggccggcgccgcccugcagauccccuucgcgaugcagauggccuaccgguucaacggcaucggggucacccagaacgugcucuacgagaaccagaagcugaucgccaaccaguucaacagcgccaucggcaagauccaggacucccugagcuccaccgccagcgcgcucgggaagcugcaggacguggucaaccagaacgcccaggcccugaacacgcucgugaagcagcuguccagcaacuucggcgccaucuccagcgugcugaacgacauccucucccgccuggacccgcccgaggccgaggugcagaucgaccggcugaucaccgggcgccuccagagccugcagaccuacgugacccagcagcugauccgggcggccgagauccgcgccagcgccaaccucgccgcgaccaagauguccgagugcguccugggccagagcaagcggguggacuucugcggcaagggguaccaccugauguccuucccccagagcgccccgcacggcguggucuuccuccacgugacguacguccccgcccaggagaagaacuucaccaccgcccccgcgaucugccacgacgggaaggcccacuucccccgcgagggcguguucguguccaacgggacccacugguucgucacgcagcggaacuucuacgagccgcagaucaucaccaccgacaacaccuucgugagcggcaacugcgacguggucaucggcaucgugaacaacacgguguacgacccccugcagcccgagcuggacuccuucaaggaggagcucgacaaguacuucaagaaccacaccagccccgacgucgaccugggggacaucuccggcaucaacgccagcguggugaacauccagaaggagaucgaccgccugaacgaggucgccaagaaccucaacgagucccugaucgaccugcaggagcucgggaaguacgagcaguacaucaaguggccgugguacaucuggcugggcuucaucgccggccugaucgcgaucgugauggugaccaucaugcucugcugcaugaccagcugcugcuccugccugaaggggugcugcagcugcggcuccugcugcaaguucgacgaggacgacagcgagcccguccugaagggggugaagcuccacuacacgugaggacuaguuauaagacugacuagcccgaugggccucccaacgggcccuccuccccuccuugcaccgagauuaauaaaaaaaaaaaaaaaaaaaaaaaaaaaaaaaaaaaaaaaaaaaaaaaaaaaaaaaaaaaaaaaaaaaaaaaaaaaaaaaaaaaaaaaaaaaaaaaaaaaa

SEQ ID NO: 25506 - RNA, 4011 nt, Artificial Sequence
  SARS-CoV-2/Wuhan/WIV05/2019__EPI_ISL_402128 spike protein mRNA gc (1-1273)(K986P_V987P_D614G_M1229I)
aggagaaagcuuaccauguucguguuccugguccuccugccccuggugagcucccagugcgugaaccucaccacccgcacgcagcugccgcccgccuacaccaacagcuucacccggggcgucuacuaccccgacaagguguuccgcuccagcgugcugcacuccacccaggaccucuuccugcccuucuucagcaacgucacgugguuccacgccauccacguguccgggaccaacggcaccaagcgguucgacaacccggugcugcccuucaacgacggggucuacuucgcgagcaccgagaaguccaacaucauccgcggcuggaucuucgggacgacccucgacagcaagacccagucccugcugaucgugaacaacgccaccaacguggucaucaaggugugcgaguuccaguucugcaacgaccccuuccucggcguguacuaccacaagaacaacaagagcuggauggaguccgaguuccgggucuacagcuccgccaacaacugcacguucgaguacgugagccagcccuuccugauggaccuggagggcaagcaggggaacuucaagaaccuccgcgaguucguguucaagaacaucgacggcuacuucaagaucuacuccaagcacaccccgaucaaccugguccgggaccugccccagggguucagcgcccucgagccccugguggaccugcccaucggcaucaacaucacccgcuuccagacccuccuggcccugcaccgguccuaccucacgccgggggacagcagcuccggcuggaccgcgggcgccgccgccuacuacgugggguaccugcagccccgcaccuuccugcucaaguacaacgagaacggcaccaucacggacgcggucgacugcgcccuggacccccugagcgagaccaagugcacccucaaguccuucaccguggagaaggggaucuaccagacgagcaacuuccgggugcagcccaccgaguccaucguccgcuucccgaacaucaccaaccugugccccuucggcgagguguucaacgccacccgguucgccagcgucuacgccuggaaccgcaagcggaucuccaacugcguggcggacuacagcgugcuguacaacuccgccagcuucuccacguucaagugcuacggcgucagccccaccaagcucaacgaccugugcuucaccaacguguacgccgacuccuucgugauccgcggggacgagguccggcagaucgcccccggccagaccgggaagaucgccgacuacaacuacaagcugccggacgacuucacgggcugcgugaucgcguggaacagcaacaaccucgacuccaaggucgggggcaacuacaacuaccuguaccgccuguuccgcaagagcaaccucaagcccuucgagcgggacaucuccaccgagaucuaccaggccggcagcacccccugcaacgggguggagggcuucaacugcuacuucccccugcaguccuacggguuccagccgaccaacggcgugggguaccagcccuaccggguggucgugcugagcuucgagcuccugcacgcccccgccacggugugcggccccaagaaguccaccaaccuggucaagaacaagugcgugaacuucaacuucaacggccucaccgggaccggcgugcugaccgagagcaacaagaaguuccugccguuccagcaguucgggcgcgacaucgccgacacgaccgacgcgguccgcgacccccagacccuggagauccucgacaucacccccugcagcuucggcgggguguccgugaucacgccgggcaccaacaccagcaaccaggucgccgugcuguaccagggcgugaacugcaccgagguccccguggccauccacgccgaccagcugacgcccaccuggcggguguacuccaccggcagcaacgucuuccagacccgcgccgggugccucaucggcgcggagcacgugaacaacuccuacgagugcgacauccccaucggggccggcaucugcgccagcuaccagacgcagaccaacuccccgcggcgcgcccggagcguggcgucccagagcaucaucgccuacaccaugucccugggcgccgagaacagcgucgccuacuccaacaacagcaucgccauccccaccaacuucacgaucuccgugaccaccgagauccugcccgugagcaugaccaagacgagcgucgacugcaccauguacaucugcggggacuccaccgagugcagcaaccuccugcugcaguacggcuccuucugcacccagcucaaccgcgcgcugacggggaucgccguggagcaggacaagaacacccaggagguguucgcccaggucaagcagaucuacaagacgcccccgaucaaggacuucggcggguucaacuucagccagauccugcccgaccccuccaagcccagcaagcgguccuucaucgaggaccuccuguucaacaaggugacccuggccgacgccggcuucaucaagcaguacggcgacugccucggggacaucgcggcccgcgaccugaucugcgcccagaaguucaacggccugaccgugcucccgccccugcugaccgacgagaugaucgcccaguacaccagcgcccuccuggcggggaccaucacguccggcuggaccuucggggccggcgccgcccugcagauccccuucgcgaugcagauggccuaccgguucaacggcaucggggucacccagaacgugcucuacgagaaccagaagcugaucgccaaccaguucaacagcgccaucggcaagauccaggacucccugagcuccaccgccagcgcgcucgggaagcugcaggacguggucaaccagaacgcccaggcccugaacacgcucgugaagcagcuguccagcaacuucggcgccaucuccagcgugcugaacgacauccucucccgccuggacccgcccgaggccgaggugcagaucgaccggcugaucaccgggcgccuccagagccugcagaccuacgugacccagcagcugauccgggcggccgagauccgcgccagcgccaaccucgccgcgaccaagauguccgagugcguccugggccagagcaagcggguggacuucugcggcaagggguaccaccugauguccuucccccagagcgccccgcacggcguggucuuccuccacgugacguacguccccgcccaggagaagaacuucaccaccgcccccgcgaucugccacgacgggaaggcccacuucccccgcgagggcguguucguguccaacgggacccacugguucgucacgcagcggaacuucuacgagccgcagaucaucaccaccgacaacaccuucgugagcggcaacugcgacguggucaucggcaucgugaacaacacgguguacgacccccugcagcccgagcuggacuccuucaaggaggagcucgacaaguacuucaagaaccacaccagccccgacgucgaccugggggacaucuccggcaucaacgccagcguggugaacauccagaaggagaucgaccgccugaacgaggucgccaagaaccucaacgagucccugaucgaccugcaggagcucgggaaguacgagcaguacaucaaguggccgugguacaucuggcugggcuucaucgccggccugaucgcgaucgugaucgugaccaucaugcucugcugcaugaccagcugcugcuccugccugaaggggugcugcagcugcggcuccugcugcaaguucgacgaggacgacagcgagcccguccugaagggggugaagcuccacuacacgugaggacuaguuauaagacugacuagcccgaugggccucccaacgggcccuccuccccuccuugcaccgagauuaauaaaaaaaaaaaaaaaaaaaaaaaaaaaaaaaaaaaaaaaaaaaaaaaaaaaaaaaaaaaaaaaaaaaaaaaaaaaaaaaaaaaaaaaaaaaaaaaaaaaa
